United States Patent Application Publication US 2022/0290142 A1 - sequence listing, part 18

SEQ ID NO: 15479 - DNA, 45255 bp, Homo sapiens
cgcgcagcggtgggctgagctaaaatggctgaggagagagtcgcgacggtgagcgccgagattctctttagttgcccggccgcagggcaaggcaagctggcgggtggcttttgtcccatgcagcggttcctggagagaggcggagctgggtgccgagcgtctcagggtgggcggggcgacacggtcccctttttactgtcccgggaactggtcgcctggggcaagtctggatacttagcagcacaggtcctgttctaggactgtagtccctcttggggtgcgctggacggagaagggagacttttcaccagtaatggctcttaccgtagtgccatctttttctgtctcgggggtttggaaggtaatgactagcacttgtgtagacagttcctgttaatcccgtgaattgggaatttaacatgcctggaagcttgcagcgtcactgccttctgccagtggagcgggactgtgttttttctgtggtgattaagtttaggaaagtacggttttggaattcatctgaaggctgagttgggcgttcactccacagaactgctaatatagaggaacccgatgaattcaggatgacctagtcgctattttttgaggcatatatctataattggatctaatttcggtaaagtgccaagtgtgaagctttgtttaccttgctttagtgttgggtttgaaagcctgttctgtccatttgttagaatgattttaggtattcggaatttattgtctttcgaaaaacgccctggaaaacagtacaaatagcagcctttggctgttttacaacttagttttggctaagcagcaaggttagtgttattgttagagggccttttgtttgttttctactctcatttgcagagtagtcatattattctagtctaattagaaaactctgaagacagaaacttttttttttgagacggagtgtcgctgttgtcggcccgggctggagtgcaatggcgcgatctcggctcactgcaacctccgcctcccaggttccagcaattctcctgcctcagcctccggattagctgagaatacaggcgcctgccaccacgcccggccgaaacatttttattaagctaagaaatttaaaatagctaggccggacgcggtgcatcacgcctgtaatcccagcactttgggaggccgagacgggtggatcacttgaggtcatgagtttgagaccatcctggccaacatggtgaaaccccgtctctactaaaaatacaaaaattagcggggcatcgtggcgctcgcctgtaatcccaggtacctggaaggctgaggcaggagaatcgcttgaaccccggaggcggaggttgcagtgagccgagatcatgccattgcactccagcatgagcgacagagacagactccttctcaaaaaaaaagaaagaaaaaacagattttaaaataattaaataggccaggctcagtggctcacgcctgtaatcctagcaccttgggaggctgaggtgggtggatcgcctgaggtcaggagttcgagaccagcctggccaacgtagtgaaaccctgtccctactaaaaaaatacaaaaaattagctggacgtggtggcgggcgctggtaatcccagctactagggaggctgaggcaggagaatcgcttagaacccaggaggcagaggttgcagtgagccgagatcgtgccatttcactgcagcctgggcatccagagcaaaactccgtctcagaaaaaaaaaaaaagtaaatagcatggttaatgttactgggttttaaatattaaaaacataggaaagaaaatacttccactccagcctgggtgacagagcaagactccgtctcaaaaaaaaaaaaaaaaaaaaaaagaaaatacttctaagtaatcttaaagtgtaaaagataatgggtaacataacattgctacaaatatagcttatcctctagtgctcatcacaagtgtttgtgtaatagaatatgaacttgagtctgtgacggcagaattgtcatgtacatttgaatgtctaatactgttttaaagagaatagcttttgtttcgatatgacttagcaattaagcctgaagttaactgttttcattgttgtcaaatttattgctagtagtgttacgtttatagtaattttcatcttttcaagttaccaatgcatggaaatgtgaatttctgtccttttaggaagtggtattttatcttttttttttttttttttttgagacggagtctcactttgtcgccctgtctggagtgcagtggcgtgatctcagctcagtggaacctctgcctcccgggttcaagtgatttttctgcctcagcctcccgagtagctggggttacaggccctcaccaccatgcctggcttatttttgtggagatggggtttcaccacgttggccaggctggtcttgaactcctgaccttgtgatctgcacgcctcggtctcccaaagtgttgggattacaggcgtgagccatggccccctgccttattttttaatacaattaaaagaacccagtaatcctactcctagacctgtgtcccacagaaaaaagtgttaaacatgagcgtgtagtactagggcattcgttgtagtactatccgtagtggcaaaacgctggaagcaaattaaatgcccattaatagggtaattgatgacttcagatatttccatactgtggaatattatgcagtcattaaaaagaatgttacaactaattgcttttcctctcagaagcccctctctctcactagagaaagctgttctcctttctttcttctgcctattaaacctccattcctaaactcagaaagaaaaaaaaaaaaagagaatgttacgactaattgacttggagggacttccatggtgtacatttaaataaaaggtagatgtgaagtggggtatattatgtgatcttaatttcataacacaaaggaaaacatatagatccgtagataaggatatatggatatggaggagagaaaaggaaaagactcaaaactcacagaatttttgaagaaatgtatagctaaaaatctaagaaggctacagtcaaggccttgaggccagaagacaccccatcaaaactgagtaaaactagcccagtgtgggacgcagaaattctagtatgctaccaaaattacttacggattgctaccagttccttagaaggaaaactgaggactaatatttgtattttcagtatagtttagaattcttaaaaaatgagcaaacaggctgtacttggtggctcatgcctgtaatgccaggacttgtggaaactgaggtgagaggataacttgagtccagaggtttgagaccagtctgggcaacatgttggagccccatttctacaaaaaacacaaaaattagccagacgtggtggcacgcgcctgtcttcccagctactggggaggatcatctgagcctgggggaagttgaggctccagtgagccatgatcatgccactggactccagcaggggcagagtgagactttgtctgaaaaaaacaaaaaatgaatgagcaactaactctggctttcatgatttgtgcttataaatctttttatttatttatttatttatttatttatttatttatttatttattttgagacggagtcttgctctgtcgcccaggctggagcgcagtggcgcgatctcggctcactgcaacctccgcctcccgggttcacgccattctccagcctgagcctccggagtagctgggactacaggcgcctgccaccacgcccagctaattttttgtatttttagtagagacggggtttcaccgtgttagccaggatggtttcaatctcctgaccttgtgatccgcccgactcagcctcccaaagtgctgggattacaggcgagccactgtacccagcctataaattttttttataatgccctgattcccattatttgatgtatttggataaatatgtcatcctgtaaattgaaggattaaactgataagagcagaaaacagaaattagtacactagttgatctggctcagatatagtgcctatgtatcaggtgctccatgaatatttgttggatgaataaatgatcataaaactatataaaaatgaagaaataacagaataaaataatttgttctatataaatcctatgaatgagattgagtgggctaatagaatcctttccatctcaaaatgttctggaaagtcttgagtaaaagactcatcaaaaaaataattctgctttgtgcagaaagaagggttgctgacctttgaaggtgctttttgagtctttaacattctttagtagtatattccccaaagttaagaaattctagttagattttaaaaaattgagttaacatttaaaaaacagttttgttgaggtataatacacgtaccataaaatttactcaatttaagtacaaagtttgatcagttttagtaaatttatatagttgcacagctgtcatcagaggctgcttttaaaacatgtccatcactccagaagggttcctgtgtcaatggaattgctgggttatattgtttaagtatttgtttaaaaaaacagaaacaaatctgcctaacttctgcaggctatatacgagttaacatttccatgagcaatgcatgagggttgtgatttttccacatccctgtcaacacttggtttgtcagtttgtttttatttagctgttgtagtggatgggtagtgatggtgtatggtggttttaatttgtatttccttcatgaataatgatattgaagattttttatatgtttattttccacccgtatctctttggtgaaatgtctttataaatttttgtgaatttttaaatcaagatcattaaccaaatgagcccctcatttgggctcaagtgatccttccacctcaacctcccgagtagctgggaccacaggtgcaggccacgcttggctaatttttgtatattttgtagaggcggggttttgccatgttgcccaggctggtcttaaactcctgaactcaagcaattggcctgcctcacataagtattctcttttattttgaggattaatttttgttgttgtgaaatatatcctacctgtaaaagagtgcttaaaatgtcgtatgtgtgctttaaaggataatataatggaaacttgtgttcctactgcccaggttaggaaatgggttattaataactttgaaacctcctaaatgcctctctcctactgcattttccttcctccacatcagatgtagtgtttcttcaattttatattaatattttgtactttttatagttttaccatatatgtttatatatatccttaatatattagtttttaaaatttgttattaaccttcagtttattcattatttcaacactgtatagtatcttattgtagtaaagtatgtcaattaacttatccattccactagatggagatcgggattatttctggtttttagttattaaaaacaatgctgctgctgggtgcagtggcttacgcctgtaatcctagcactttgggaggccgaggctgcggatcatgaggtcaagagatcgagatcatcctggccaacatggtgcaactccgtctctactaaaaatacaaaaattagcaggatgcggtgctgcgcgcctgtagtccctgctactcgggaggctgaggcgggagaatcacttgaacccaggaggcggaggttgcagtgagccgagattgtgccactgcacttcagcttggcagagcgagacttcgtctcaaaaaaaaaaaaaaaaaaagctgctataaatatggccaagactaaggaaaggtaagtgaggtgcttagggttcacattttatggagtaagagtaagtaccttcttaaggtttataccctaggttcttcacatgcctcactttagtcctagccctgagcattattatgtaggtcttctgatgcaatatctaagagtttctctaaggtatacctagaaatagattgctaggtaatggagtaactttattacttacaggaaactatatggtggttgtaacaatttatgcttctgccaccagtcatggtggatatgaaattatgtcttaatgtgataatttacattgcaatttttttttttttttttttttttttttttgagacagagtcttgctctgtcacccaggctggagtgcagtggcgtgatcttggctcactgcaacctctgcctcctgggctcaagtgatccttccacctcagcctcccgagtagctgagaccacaggcgcaggccacacttggctaatttttgtatattctgtagaggcggggtttcgtcatgttacccaggctggtcttaaactcctgaactcaagcaatcggcctgcctcagcctaccgaagtgctgggattagaggtgtgagccaccacacctggctgtttgtttgttttgagcctgttcctcaggctggagtgcagtggtccaatcatggcttgctgcaactccgcttcctgggcttaagagatcctcccacctcagccttctgagtagctaggactaagggcacctgccactatgcctggctaatttctaaagttttttttatagaggcagagtctcgctgttttgcccaagctgttctcaaatttctaggctcgtgtgatcctcctgcctcagcctcccaaagtgctgggattataggtgtgagccaccacacctggctgatctatctgtcttaaactggagaattgcatttttttctacctcctttcttttttttaaaaaaactgaatttccatctgttacccctccctttctgctcctcttatttcatgccttggaagttatactttgccttcctttaatgagtaccaaagaaattaaaaaatacatgtttactgtaagtccaggcctaaatgttgctactacagggaccatcaaatgctttactaccatctattgccatctgcaaatgtatgccattgttgtttagttttgtagttcttaatgtattttaattaaacaccacaaattatgctttttgtttgttttattcagtcagtagatgcttagaatacttgcttattttaccaattcctttgcttattccactcctttgttctgggattatttttctttttcctaatatattttcattaaaagtttatttggtgagaatctaaaaactctcaaattctgaaagttttaaaaatttgcctttgttgttgaaaattagttttgatgggtgagagaatctagatcaggtgttagcaaacctttttttgtaaagggccagatagtaaatattgtgggctttgtgggccatagagtctctctgacaactactcagcaatgctgttgtaggacaaaagcaaccatagacattatgtaaacatgagtgtgggtatgttctcacaaattttgtttatagacactgaaatttgactcaattttcatgtgttaaaaattattattttttgaatttttttaaccatataaaaatgtaaaaatcattcgtagcttgtagaccaaataaacaggatggatttgacctgtgggccatagtttgctgacctctggtctaaattaacattcattttacttagtacctgacactggagtaattattcttatgatgtcttattgtgatattgtcttccatttttaattgttgaagagccagctgtcagtcttttttgtttttctttttcttcttcttttttttttgaaatggagttttgctcttatcgcccaagctggagtgcagtggtgtgatcttggcccactgcaacctctgccttctgggttcaagcgattttcctgcctcagcctcccaagtagctgggattacaggtgcctgccaccacacccagctaatttttgtatttttagtagagatggggcttcaccatgttggccaggctggtgttgaactcctaacctcaggtgatccacctgccttggcctcccaaagtgctgcaattacaggcatgaggcacggcgtctggcctttctttcctttttttttttttttgagacgtagtcttgctctgttgcccaggccggggggcgatggtacgatcttggctcattgcaacctctgcttcccaagttcaagccattctcctgcctcagcctcccaagtagctgggactataggcacgtgccaccatgccgagctaatttttgtatatttagtagagacggggtttcaccatgttgtccaggctggtcttgaactcctgacctcaagtgatcctctcgccttggcctctcaaataactgtcctttctttgttggtaatctggtgatatgttttcttgtttggctgcttttaagagctgcttcttgtctctggtgcagttcgctatgatgtatctaagtatgtatttattttcatttaacctggtcaggatttgttgagtatccagaaactaaggattggtgtttctcattacatctggaaaaatttgagccattatttttgcttatattgtggtatgtcataggaagttgagaaaagaaaaattcatttgatggttttctatgaggttatagtggaaaataactatctcccttttagaattgagtgctagacagtttctgtgtagatgatctcataagcttccttttatcaaacagcgatcacttttttggtttggctgctgagaagtatggcatcaagtataatactcatatgaggtgtttaagaactgagtatatttcttatgcacattttactatatactataattatacattaaaaatgcacattgtaaatattataaatatgtgttatacattgttaatagtttggatagcaaaagtatgacttgacatttgttttttaaaccatatttaaagtaactctatcacaatatggatttaatggattaattgcataattggtgagctactgattattcttgttatttggatgcttctttaagttagcaagtttatattgtggtgcttcaatatagactacttatttcatttcagagaactcaatttcctgtatctactgagtctcaaaaaccccggcagaaaaaaggtctgtatgcagtttcatggtatgtgtatgtttgcacagacagatttctcttttatttatttatttatttttttttttggaggcagagtctcactgtcacccaggctggagtgcagtagcacaatcttggctcactgcaacctttgcctctggggctcaagcaattctcctgcctcagcctcccgagtagctgggattacaggtgcacgccaccacacctggctaacttttgtgttttagtagagatgaggtttcactgtgtttgccaggctggtctcgaactcctgacctcaggtgatctgcccaccttggcctcccaaagtgttgggattacaggcgtgagccgccacgcctggccagatttctctctcttgttgattcttttatctattctatattatttcaaaatgagtgttgggaaaagaagtaatagtctaaatgttctgtcacatctagcttttatttaatagagttattagatattaggaggttggtttgacctggaaattatttaaatggggtttgattattatgtaagtgtgtactaattttctgcttctggaaaaaccactttgtgaagttccaggtatctttttgctttgttggtttctagtttaattctattgtgggtagagaacattctttatatggtttgttttatggcccacaatgtggcctgtgttggtgcatgtcccatgtacacttggaaataatgtgtattctgctcttgtaggatgtagcattctgtaaatgtcaattaggtcaagttggttgatagtgttctgtatatacttacaattacagatattcatattcttactgatgtagttactgattggaagggtgatagaagagtgttgaagtgtgcaaatgtaattgtggatttgtttctactttcagttctatcaatttttgatttgtgtattttgaagatctgttgttggatgcatatacatttaggattgtctgatttcttggtaaattgacccgtttgtctttatataatattcctcttcaatttctgataatattccttgtttgaagtctactttgcctgataatattttagttttagttatttatttagctattttagttttgctttggccagtctttgaatggtatcaacatataattttcgtagagtaaaattccctttttttagtacaaattctgagtttcgacaaatgaaactagccatgtaaccactagtagcaccataatcaagttataaaagtttaattactcccccaaaagtcacctttactttgtagtaaaccacttcttccattcccaattgcgggcagccattaatctgtttctttcttcctagttttgcctttcttggaatgccaaataaatggaatcatacattattattattttgagagagagggtctcgctctgtcacccaagctagagtgcagtggtgtgattatagctcactgcaacctgaaactcctgggttcaaatggttttccccagtagctgggtctacaggtgcatgccgccatgcctggctaatttttatgtattttttttgtagaaatgggggtctggctctgttgcccaggctggttttgaactcctggcttcaagtgatactccatcttcggcctcctgaagtactggcattacaggcatgagctattgcacctgggttatgtaaatttttcagtggcttttaaacctcatataatgtttgtttgttggtttgtttttgaggcggaggctcgctctgtcacccaggctggagtgcagtggtgcagtctcagctcactgcaacctccacctcctgggttcaagtgattctgctgtctcagcctcccaagtagctgggattatcggcatgaaccaccatgcctggctaatttttttatttttagtacagatggggtttcaccacgttggccaggctggtcttgaactcctgacctcaagtgatccacctgctttggccccccaaagtactgggattacaggcatgagccactgcatccagcccaatatagggaggtattaagaaaagagaagaactatcatccttaagtattaacgggactttaacaaattaaaaaagtagtactttgaataaaaagctgtcacattttactgtgaaatccttagactttttttatacctctagttcaggttttttcagctttggcatgaatgatattttgagcaagataaatctttgttggagttgtcctgtatattgtaggatggttaacaacatccctggcttctacctggtagatgacagtagcacttaattgtaacaaccaaaagtgtctccagatgttgccagttattccttctggggcaaaattgttcccacttgagaaccactgctctggttaagtagtgtaatacttggaaatagaaggcagaaagttggtaagtgcataaagaattcacacagaagttggattagcaagctgagagacgttatttgaacaagtagcaattggaggcattttgactgagaatggatgttgtgcctctccctcactctttcctcctcagcttgagaggtccatattctctcaaagtttgactctttagttttgagggtgatgactgccaactgtggaagggataaacagatttctgtttggtatttttgtccaaatatatcaggactttttcaagaacaggcaatgaaattattgatcagaactacttggtggttctgagaaaataatatgctacatgaggctactgaagtcctcttccttttgccccatgatgtaaccttaggtgactttcttctggctttcagttgaagatcttacccatcattgaggtgagcgaactgatttactgcttgagtctattttcttccttaaaggagtcttcattgaaaactttacccattttggggtggccatagctgaggatgagttttgtccacaacctgagacaacatactcactatgtaaaaaacctgatctcagcttgatatctggttttagactaattgtttaatagaataatttattattgtaaaatatatataaaatttaccatttttaagtgtgtaagtcagtggcattaagtacatttacaaagttgtgcagccatcaccactgtccatttctagaagtgtttcatcattccaaacagaaacactgtacccattaaacaataaatctccacatccccttgcctccccagatcctggtaatctccattctattttctgtatctatgaatttgactattctaggtttttcatgtaaggtgaatcatacaatatttgcccttttctgcctggcttattccactcagcattttcaagattcattcatgttgtagcatgtgtcagaatttcattcctttttaaggctgaataatattctagtgtatgtatatatcacattttgtttatctgtctgttgatgggcatttgggttgttttccttagagtctttatatgtcagtaattcttaaagaatttaaaagttgtagaaactaggaattttgtagatattctagaaatatgtcatttcctgtactgtatataataatttattctacagactaattactgtgtatatatttggttctcagacgtgattttgattttgtagatgctgtacatgctcttcacttcattaatcttttccttttgctaattttggttcttgtgtatacagaattatagagttacaaggtaatttagttgttacctaattcaccctaaagtctacatgaaaccactgtcacagtctttgataagtagttaccaaatctcactatttctactgtgatagtgaatgactttcattgattagctttctgaaagaatagtttatcttacttgtcttggtatcctcacctctgagtctatttgtctattgtaatctggcttttgctccaccgctccactgattaaatggatgagctaagcatttttttttttttccactgcaacctctgcctcccgggttcaagtgattctcttgcctcagcttcccgtgtagctggtattacaggtgcccaccaccatgcctggctaattttttgtctttttagtagaaacggggtttcactatgttggccagactggtatcgagctcctgacttcatgatccaccccaaagcctcccaaagttctgggattacaggtgtgagccaccgtgcttggcccaattctgtttaatttttgaggaacaatgttaacttctaatttaaatggaaggtagtatatatctaatttttccctattatttttaatttcaatgctagtaaatctttaaatctgaaatacacactcttgaattttgacagatatgtatactcatgtacatatttatattcctgtaatcatcagatcaaattaaacatttttatcacttagaaagtttcctcatgcctttttccagtaagtcttctgcttcacttcgccagatgcaaccaccattctgatttctgcctgtataaattgattttgaactttcctataataagttgtgcttgaacttcacacaaagggagccatacagtatctactatttagcttttggcagctttcatacaacatgttgttttggagattcatccgtgttgttatatgtatcagtagttcttttatttaaaaaatgctgtttagtattcagttgcatgaatataccaccgtttgtccattctcctgttaatgagtatttgcaatgtttccagtttttgagtactgtgaaagtttctatgaacatttatttatttagagatggagtctcgctttattgcccaggctggagtgcagtggtgcgatctcagctcactgtaacctccgcctcctgggttcaatcgattcttcagcttcagcctcctgagtagctgggactataggtgtgtgccaccatgcccggctaatttttctatttttagtagagacgggatttcaccatattagccaggctggtcttgaattccttacctcatgatccgcccgcctcagcctcccatagtgctgggattacaggcatgagccactgcacccggcctgaacatttatttactggttttttttgtgtgtgcatgtgtgtgcaagttttcacttgaataagtgcctagggagtggaattgcttggtcatatgtgaactgtttgttttaactttataataaactgccgaagtattttccaaagtggttgtacagttttacccgaccgccagcaacgtgtgaggattctgtttggctacattcttgccaacatttgttactatcagtctttttcatattagacttgctggtgggtatattgtgttttattgtgattttaatttgcattacactaatgactagtgatgttgaacaccttttcatatacttattggtcatatcttttgtgtagtgtctgctcaagttttttgcctatttttaaatttcttttttccttattattgatttgtgagacttcttaatatattctgaatgtacgtcctttgtctgttatatatgtggtaagtatttccccccagcctgtgttttactactttcattttattaaggtatcttttgatgatcaaaagttttaattttgatgaaggccaatttactattatttttcttttgttattaatgccttctctgtcttgtctaggaaatcttgatccttaccccagactgagttgtgtgtcctctcccttttctgcattaatattgcagaaattaattttttggttttagaaaatgtctaatttggctcaatcagtaatttttgatatctttctattgaaatatatatacagaaaagtacatacataaatcataattgtactgtgcagtgaatttttacaaagtaaacatatccatgtaatcaccatctagattaaggtatagaatattatcagtgccctccaggccgcctccttattccctaccagtcattaaccacccctcccaaaggtagtaacttgtatttaacttctatcttctacatcagttttgcctgcttttgaatttaatgtaaatggaatcatgcagtgtgtactttttaatatctaacttcgttgctcagaattatgtttgtgagattcatttatgttgttgcatgtagtagtggttggttgttttcttccttgttatatatattccattgtggggctctacctaagtctattcattttatacttgatgaacatttgggatatttttattgtgatgtattatgaataatgccaccatgaagagtcttgtacatgttttttggtacacatacatacttaggagtaggattttcagggtcaccaggaaggatatatttaggctcagtgaatactagcaagcaatttttaaaatgcggtcaatataatccccatgtgtaaaataaaggtgtacaaacgcacacacacacacttgctcatatgcttatatgtgcatagaaattccttgaaaatactcaagaaatgcttcacctctggtaagggataggaatggaatgggtcttttgtttagtatcctatgtgccctttgaattttgttttactgtaagtatgtatttttaagaaaaccaactagttatttttaaaaatcatttgaaagtcttcctactttgatatatgaaaaacactggttttaaaaaaaataatagaaaagctttaaaatcattattatttttttgagacggagtcttgctctgtcgccaggctggagtgcagtggtgcgatttccgctcaccacaacctttgcctcccggattcaagcaattctcctgcctcagcctcccaagtagctgggactacaggtgtgtgccaccaggcccagctaatttttttttttttttgtatttttaatagagatggggtttcaccatgttggccaggatggtctcaatctcttgacctcgtgatctgcctgcctcggcctcccaaagtgctgggattacaggcgtgagccactgtgcctggccgctttaaaatcattaatgttgcgttgctcagttatgtctaattgacagcccaaacatttacattgtaatattagaaaatcctttatgattgggcagaaacttggtttaatgtgtcaccttggagacctgggttatagtcctgcctcttccattaactacttgttgaatgtggacaatttacttaacctttagggccttaatttcctcctttataatgtgagaatgttctctgaattgcataactcactggccttacgtgactattcagtggaataataagagagaaaaactttgagatacatgcacacacacccttaagaaggatataattgttaaattttgctttgaggaaataaaataatctaagctataaagtaaaaccataattagctaatcttttatatgacttttttcttcctcatttcaagctaatgagaagcaaacaaactggatagcagcaatataattaaaaaattataggccagcttctagcatgtattcttgagtcaatactgactcagcccagtctcttcctcttccttcatcatcatttatgtacctgaacagagtagatgtttctcttgatcctgggcctgttcgccctcagatccattccttgccttctcttctctttttggtatagtgaggagctgactctttttttttttttttttttttttgagacggagtctcgctctgtcgcccaggctggagtgcagtggcgggatctcggctcactgcaagctccgccttccgggttcacgccattctcctgcctcagcctcccaagtagctgggactacaggcgcccgccactacgcccggctaattttttttgtatttttagtagagacggggtttcacctttttttagccgggatggtctcgatctcctgacctcgtgatccgcccgcctcggcctcccaaagtgctgggattacaggcgtgagccatcgcgcccggccgaggagctgactcttgcagcctccttttcttcccaggcttccgtgtcagcagtttctggctggattagcaagtggaggaactggcaggagattagaaggcaagaggaaagagaagacagggcttccctccccgaccttcaggcctcagagtcgtagtggttttttgctcatgcagacttctgatttgtctcaccattccctgttgggcctctcatttcttccattgcctgttctctgcattaaagtccttgtgtttcaaatcctcaagtggctttttgttaggctttgactgatacagggctcaaaatgatagtaatgaaaatgtcttacatttatattcttttcaagatttgttatctcttttgataccccaaatatcctattgaggtagaaaagtgttataattcctgtttggcatgaggaaattaacatttattgaatgactattttcagattctttggattttcgggtgaaaattttaggggggataaatggaggcccagagaagtgaaataacttgccctaggccccatagaaggctggtattgaatcaagattgaaattctgcatgtgaaaacttttacgtgctacatgtctgctagtcctggaagaaatcctttctttgatgagtattttttttaaaggctttacttgcaatatatttacaaaagccttagttatttagtaaatttttcaatgaaaaatctgaaccataataattttctgcttagtacttatatagctagcatactatccctagcattaatcaaagtgtcatgtaaaggtttgatttttgagcctaagcagaatttgaaattcttctaagagaatttagcacctagggcaaactacaggggagaattcttgaggtgtcatgtttattcacttctggaattgtttaaaatatgtcaggtgcatccttaaagggagaaagaagggggaagagatgttacaaaagagtagaatggggcaagagaagtggcaagggagtattgttgctaggttgccagccttctgcccccactgtcttggtgatggtggaggggtagtgtggcagctgggatatgaatgaggtcttttttataactcactaaaagccattaccttgtcttcatctcgtcagctggctacctgacctctgtggtaacataggctcctgaaatgtagcattggagatgatcactgtgctttattgcaaaataggggagactctgctctgcatttacatgcttatgttttgtggaggatctttcaactagtaattctcataatacctgtgaaagcatataagaaccagtatctccatttttagggggagttggagtgagcaatgatttggaataccagaaattcaacttatatatttacaggtaaaattctaattgtaaattcaggattcatagattctagggatttctgaggtatccagaattccttcatctttgatgataagtagataataatggtaataaaaataacagcaacaggcccagcacagtgacccacacctgtaatcccagcactttgggagactgaggcaggtggatcacttgaggtcaggagttcaagaccagcctggcggacatggcaaaaccccatttctactaaaaatgcaaaaattagctgagcatagtggcatgtgcctgtaatcccagctactcagtaggctgagtcataagaatcatttgaatctgggaggtggagattgcggtgagctaagatcgcgccactgcactccggcctttatgacagaactcgactccatctcaaaaaaacaaaacaaaacaaaacaaaacaaaaacaaaatgcaaaaaaacagcaacaataataggtaacatttctttaaggcctactatgtaccaggcactatttgaacctctttatatattaggtaatacgatacaactctatgagaatgagtattttatttcctgacccttctatttaaaagtaaaaccccccacccggcactgtttctctttcctgctttatttttctccatagaaaaatatcactcataagtgtaacatactttattatctgtcctgtgtggtagtagcccctgccctcaattataaactccatgaaatcagggagtcagttttgttcactgctgtattcccagtgcctagaacagtgcctggaatcatggtaggtacccagcgaatattggttgaatgaatgagtcttggttttacagatgaggaaactataaatttcccaggtcacacatttggtaataggacagttgtgtacactgaaatgttctctaaaatatttgatggaacgaaaattagcttttggacagctacatctccaagagtgtgaaatgaccttcagcactggatttggtggattttcctttttctaatccctagagttccatttaatgagcgtttgggttcttgagctaccttacaaattgaacacttttttctccagctttcactcaagaaacacaaaacatggcttgtcctttttttttttttttttttttttgagactgggtctcactctgtcacccaggttggagtgcagtgcacaatcatggttcattgcaacctctgcctcccaggctcaagcaatcctcctaactcagcctcctgagtagctgggactacaggcttgtgcctccactcctggctaatttttttgtattttttgtagagatggggtttgtccaggctggccttgaagtgctggactcaagtgatccgtccacctgggcctcccaaagtgctggggttacaggcgtaaaccactatagctagccctgattgtcttttattgtgagattttaataacagctaagacttgaaaattaacattttataaattttcttttagactacttagtgatatactaagtatctaaggtttgtaatacttagtataaactcaaaagggttcagtgcctcattctcttttactctttccctttagtagataggtgacagaggactgggtcatgcagttgagacttggtccaagatgacttagtaagctacttgtcccagaactatttatttatttacttatttttgagatggagtctcgctctgtcgcccaggctggagtgcagtggtgtgatcttggctcactgcaacccccgtctcctgggttcaagcgattcttttgcctcagcctcccgagtagctgggattataggtgcccgccaccactcccggctaattttttgtatttttagtagagacttggtttcattgtgttagccaggattgtttcgatctcctgacctcatgatccacctgcgtggacctcccaaaatgctaggattacaggcgtgagtcaccacccccggaccctggaactatttatgacggtgcactttatgcacttaacacactcacatgtctttaagcttggtgactcgtgtggctttttcgaaggagatttgattctggaagtggttaagtaggatgtgaatggctaaggtctggtcattggtgaagcctaggggaagaaaagaaaggaaacacaagtcttagaagaatttcagatcggccccaacgactagaagggtggttctactaagaaaatgtgtgtagtcagaaaatgaagagtcagttgcttaaaattttactttttttcttgttcctggcatgtaaagtcatatccatactttctgttataatttcttcttacaaattccattgataatccctattcttggatagcaatgagcagcattacttcttttttatttttttaaaaaaattaaattttttgttgaaatgagggtcctgctgtattgcccaggctggtatcaaatttctgggctcaactgatcctcctgcctcagcctcccaaagcgctgggattacagttgtgagccagtgtgtctggttgtaccttttaatttttgtgttcaggcaacattaactctgagtcacagtaagctttttttttcttcctgtcatattatggacatagaagttttttggttttctttagattgtttctccttaggttgcagaacatcaagaaatggattacagtcattttcctctcttccccatgctcttccctttcttttccttttttcttttctttttttttttttggagacagaatcttgctctttggccgaggctggagtacagtgtcatgatcttggctcactgtaacctccccgcaccaggttcaagtgattctggtgcccaagcctccctagtagctgggatgtcaggatgcgccaccacaccctgctaatttttgtatttttttgtagagatggggtttcaccatgttgtccaggctgacctcaaactcctggactcaaatgatctgccctcctcggtctcccaaagtgctgggattataggcatgagccaccacatctggcctcttttccatttttaaaaaggactgtctccaacatattaaaattcacaaaaaataatataaacacacatgtactcactggctaggcttaataaaaaacatttagtcatgtttactttaaagctttttatttttttgagaaataggcattaaagagttgaagtctcctttctgtcttttcataattctgttcttccctcttccttccttgagatcttcactattcttgggttaatttggatctttctactccttgttaccacagaaaagtaattcttaatgaatttgaccatattttaaacttctgatttcagtgggcaggtaactcattttatggtttctgtattgtgagccattttcaatgactcaactagatttttttcatcgttgacttctcatttctgggcaacagcataatgttctcatttgagctatttctaaagattgtgtttaactatttaaaatatttgtggtactctgatcatcagatgtgatttttttttttttttgagacggagtctcactctttcaccaggctggagtgcagtggcgcgatctcggctcactgtaacctccttctcccaggttcaagtgatgctcctgcctcagcctcccaagtagctgggactattggtgcgggttaccacacccggctaattttttgtatttttagtagagacagggtttcaccatgtttgctaggatggtctcgatcttctgacctcgtgatctgcctgccttggcctcccaaagtgctgggattacaggcgtgagccactgcacctggccagaagtgatattaactatcttatatgtatatttctgttgcgggaagtcaggggccccaaacggagggaccggctggagctgtggcagaggaacgtaaattgtgattatttcatggacacttaccagttcccaaataatattcttataatttcttacacctgtctttaatctcttaatcctgttatcttcgtaagctgaggatgtacctcacctcagggccactatgataattgtgttaactgtacaaattgattgtaaaacgtgtgtttgaacaatatgaaatcagtgcaccttgaacagaataacagcaattttagggaacaagggaagacaaccataaggtctgactgcctgtggggttgggcaaaatagagccatatttttcttctttgcagagagcctataaacggacatgcaagtagggaagatatcgctaaattcttttcctagcaaggaattttaataatactctggagaaggaatgcattccttggaggaggtctatagggcatgtctgtcttatgctgttgacataaggactgaaatacaccctggtctcctgcagtaccctcaggcttattagggtggggaaaaaaccccaccctggtaaatttgaggtcagatcagttttctgctctcaaaccctgttttctgttgtttaagatgtttatcaagacaatttgtgcaccgctgaacatagactcttatcagtaattttgcttttgccttttgccttgtgatctttgttggacccttatcaggagtttctgattttgcccttgtcctgtttcctcagaagcatgtgatctttgttctcctttttgccctttgaggcatgtgatctttgtgacctactcactgttcttaggccccctccccttttgaaatccttaataaacacttgcttattttgcagctcaggtgggcatcacggtcctaccgatatatgtgaggcccagctgtgaaattcctctcttcgtactcttatttcttagccggctgacgcttatagaaaatagaaagaacctacattgaaatattgggggcaggttcccctgatatatttccttagtgacattcctgcaatctcctttagaaagtctttctgttcaccttctataaccagggaaggagagattgagaagagacgaaggatgattttatgtttttcagtcccagtcattatttgatgagaaactgatattacaagctttaaaaactcaagatatgtattcaacatgtagtagtagaacaagtatcttagtttaatagtctataaatttttgatgcactataatatattattgtagtcagtagcatcaaaattttaatgtgatattgcagtatgtttatggttagtttagacatgaggacagtgctaaaggagaaaatctaatgactgtgttgtttgttttgtcaaaatatgctgcctagctccagagtttcctattttggagaagcagaactggttgattcatcttcattatatccggaaagattatgaagcctgcaaggtaagagattgccataataataaaaatgagaggcaggatgttgggtaggcaactaacagtgcctgctaaacagagtgtggcagtttatatctcagtgataaaacatgaattccttcttccccatacttcatacactggttatcttttgctatggtagtgatgtttaacatacaacctcaatatttcagtggcccccaacaaacaaatattaattgctcatgggctttcagatcagctgtgggttggctgggtttgactgcaggctgtgggtcaggtttaggtgtgttccatgtgtcttctcatgtcaagagcaaacaactctcttggacatgttggtcttctggtggaggcagatgttcaactcagcatattaacttttttatctttggatagatgaaaaatggtattttgtcgagtttttttttttttttttttttttttgagatggagtctcactgtcacctaggctggagtgcagtggcatgatcttggctcattgcagcctttgtctcccaggttcaagcaattcttctgcctcagcctccccagtagatgggactacagatgagtgtcaccatgcccagctaattttttgtatttttagtagagatggggtttcaccatattggccaggctggtctcgaactcctgaccttgtgatctgcccgccttggcctcccaaagtgctgggattacaggcgtgagccaccgtgcccagccctgagttttattttttaatttctctcttactgcaaggttgatcatcatgtgtatatttaaaaaccatttgtatttccctttctctgtatctttggtgacataccatatgtgttacaaacttgcaggcagacagtggtagtactaacatgcagaatgtatccttggtgtcatcttttttggtatccagagctttgtgacccatctaaggtttttaatttatacccatggcatttatacctatggcaatgcacagaactaattcatactggtatgacaaagattcataccagtttttttttttctttttttaagtggagttttgctcttattgcccaggctagagtgcagtggcgcaatctcggctcactgcaacccccgctttccagtttcaagcaattctcctgcctcagcctcccaagtcgctgggattacaggtgcccgccaccatgcccagctaatttttttttttttttttgtatttctagtagaggtggagtttcaccatgttggtcaggctggtctcaaactgctgacctcgtaatccacctgcctcagcctcccaaagtgctgggattacaggcgtgagccaccgcacccggcccataccagttttttttgacaccgctgatccgaaggcagataccagtatgaatctttttttttttgagatggagttttgctcttgtcgccaagggtggagtgcaatggcgtgacctcggctcaccacaacctccgcctcctgggttcaagcgattgtcctgcctcagcctcctgagtagctgggattacaggcatgtgccaccacgcctggctaattttttgtgtttttagtagagatggggtttttccatgttggtcaggctggtctcaaactcccgacctcaggtgatctgcccgcttcggccacccaaagtgctgggattacatgcgtgagccaccgcgcctggccaccagtatgaatcttgaaaggttctctttctttttcatctgtgataatacttggaaatcttatcacacttttcttagcttgcctagttagattttagacaggggttggcaaactttttctgtaatgggccaacaatattttagggtttgtaggccacatacagtctctacatcatatttgttatcttattttttataaccctttagaaataaaaaaaccactgttagcttgagagctgtacaaaaatatacagggcctgtaagccctgtagtttgcaaatccctgttctagaagaagtaatcacaacaagggagttgaaattttaagaaactgaatgaactaatactttactaggcattattaatactctaggtttttttacatatgattcttgtccacgtctgctttttcattactatttgttttcttttttttttcagacagagtctcactctgttgcccaggctggagtgcagtggcgctatcttggctcactgcaacctccgcctcctgggttcaagcgattctccttcctcagcctcctgagtagctgggattacagacacgcaccactactgcccggctaatttttgtatttttagtagagatggggtttcaccatattggttaggctgatcttgaactcctgacctcataatctgcctgccttggtctcccaaagttttgggattacaagcatgagccaccgcacctggcctgtccatgtccactttttcttaaagacacctgaagaaacttaaccactgctcagaagcatttttctccctctttcaggctgttatcaaagaacagcttcaagagactcagggattgtgtgaatatgctatctatgtccaaggtaagacacatacttcttgtcttcttgctagagaaatacacttttcctaggttcttgaaaaagatcaggcaattgaagaaacaagttcaagtacagtcatgcaccacttaacaatggagatatgttctaagaaatgtgttgttaggcaattttgtcattgtgtgaacattacatggagtgtacttacacaaacatagatggatgatatagtgtactatacacatgatatagtctgttgctcccaggctacaaacctgtatgagcaggtgttataccgaatactgtaggcagttgtaaaacagtggtaagtgtatctaaacatagaaaaggtactgtaaaaatatggtataaaagataaaaaatagtatacctgtatagagtacttaccatggatggactggaagttgctctgggtgagttagtggtgagtgaatgtgaaggtctaggacattattgtatactaatgtagactttatgttgtatactaatgtagactttataaacactgtacacttagcctacactaaatttatttaaaaatattttttctacaatgataaattaactttagcttactataactttttactttataaactttaaaactttttggctcttttggggtaatacttaaaacacacaacaacattgtacatttgtacaaaaatagtttctttaggtccttattctataagcttttttctttttctttcttttttttttttggtagagagacagagtctcactttgttgcccaggctggtcttgaactcctgggctcaagcagttctcctgcctcagcctctcaaagtgctgggattataggcatgagctacgacacctggccctttatgctattcttaaaactttttatttttttacttttaaacttttttgttaaaaactacgatacacacactactacagtggtggtactaacatgtggaatgtgtccttgctgtcttttttggcattcagagctttgtgacccatctaaggtctttgtgacacacacacacacacacacacacacacacacacacgcacacgcacgcacgcactggtctaggcctacactgagtcaagattataaatatcactgtcttccacctccttatggaaggtcttcagtggcaataacatacatggagctgtcatctcctataacaataggaataccttctggaatacctcctgaaggatctgcctgaggcagttattcttttttttagtaagtggaaggagtacactctaaaataaagattaaaatgtatagcgtagtaaatacataaaccagtaatgtagtcatttattatcaagtattaagttctatatatatgtaattgtatatgctgtacttctatgtgactggcagcacagtaggtttgtttataccagcatcactacagataggtaagtaatgcattgcactgttttgattgctatgacgtcactgggcaataggaatttttcctcttcattataatcttaagtgatcatcatcatttatacagctgtcgaccaaaatgtcattacaggtgcatgagtttaaatgttccagaaaggttttattcagtattaatctttttatggaatctgaatataattactgtgttggatttgacttcagaaatgactagtaatgttaaaaaattgctatgattacccattttttagtttctggctagtgttttttggaatggatgcttaggattcctgcctaatgcagtgatttcagggccaaaagatgcttttggaaggattgcttgtaatcaagctaaaagagatgaagaagagcttgaggatttctgtaaggtgaatcaggatgaggggaagaagcctggaaataaacaagataaagcagagcataaattcagctcattagaaaccaaagataaggaccactcacttactttttttttttttttttttttttgagacagagtcttgctctgttgcccaggctggagtgcagtggtgcgatcccagctcactgcaacctctgccttccaggttcaagcgatcctcctgcctcagcccccctattagctgggattacaggcacatgccaccatgtccagctagtttttgtatttttagtagagacaaggttttgccatattggccaggctggtctcgaactcctgacctcaggtgatccacctgccttggcctaccaaagtgctgggattacaggcatgaaccactgcacctggcccactgacttaaattttcctctttagtggcataagtagcattcttagtttttccaggaactttctttttgactcttgggtgtaaataaatggttttgtttaccattcattgcatttgtagtcttcagattaacatataattttctgacataattgttaagatattgacaaatttaggacatcatggcaaaaaatgctcttattcccagtgtcacaagtatcagactttcagtgcctgataaattcttctggaaacataggcctaggaaaaacctctggttctaattggttgttacactgacaactgaagtcttaaatgttactttatcctttgccagaatctccatgttgaatttgaggtattgattccatttgccccatttgggggttcgctctgaaaactatcagttggaagtaaattatgataaatgaagcatctgatggggaagccccaaaatgttgttaatgtgaagagtttgtgtgataatttgcaaaggaactgattatctatgtgatggatcctgggagtagagagagaagtaggtaggtttgagctaccttgctaaaagacagttgagcttgtcagcagttttggttgttgtttcagcctgtccaaagccatatctgattgttttaaggatacagttgtccaaaggatttacttgatgtggtttcccagttttctcttctccaatttttctgaccccaggctccattcttcccagaacatggttttacttttttttgtattttctgtttcttggcagcattgatatttcgcctagaaggaaatatccaagaatccctagaactcttccagacatgtgcagttcttagtcctcagagtgctgataacctcaagcaggtggccagatctttgtgagtattggcaacctggaggccctagggcactcacagagaacagtgtaaaatgcattcctaggtccagcctgctgctggcagctgcatcagcctgatacacaagtgggggaatggtttaataggtacagtgggattcactctgaagagcatggattaagtttgaaatttgagaaaatgagataactagtgttaaggaactaagcattttaaacactgtgcattctagtttgatgggggaccaatattgtttatcatgtaaatagagacaccttgtaccctaagtcttctaaacttattggcaatccttggaatttttctcatctactcttctaacacttagtatttgtcacacagtaagtttttagtaaggacagagagttcctgacttctgatggttcaacttacataatttttcaactttacaatgatgtaaaattgttatgtattcagtagaaactgtacttcaagtatccatacagccattccgtttttcattttcagtatagtattcagtaaattacatgagatattcagcattttattataaagttggcattgtgttagatggttttgcctaactgtcagcaaatgtagttaagaaagtggagataggaactccatggaacagagtaagtgttctgagcatgcttaagataggctaggctatctatgatgtctggtagagtagatgtattacatgcatttttgaattacagtgttttcaatttacaatgggtttactgggatgtaaccccatcataagttgaggagcatctctatttgttgagtgaatgtcctaaagattcctagatggaaagaatctcaagtgtttataaactactaggtactcccttttcagtcctttgttccatggagttcctatctcccctttcttagccacattgccattcatacctgtgttgtttttgcatagagcttggttttccctgtttctctctaaactcaggatccaatatcaaggaaagagacttagtcttggaaggaaaggatgtgtccctaatgggtgatgataaatgatggtagttactgcttaacatggtatatcattaggcttatttcttttttggtctgcatttatagtacattgtagaagaaaaattccacaagactctcactaaaattggtatagaatgagaccaaggccttggaacagctgccagtgcaatccctactaagagagcttctgctgttagtgtatagcagcttcactgaccaaaccagcacaaccacctcatagagaaaaggcttctagaattctctgctggatgaaatatgattaaaatgtgggactagtagggttagtcttctaagaattttgaggtaataattatggaaaatatatcttttacagatttcttttgggaaaacataaagctgccattgaagtatataatgaagcagctaaactcaaccagaaagattgggtaagtagagaactttcagttctttcttattagtaaacttgctaatggttccatttatcatctggctgtcttatttctgaattcttacattccaaaaatgtcttgattttaacctcatacttaattcatgatttgtataagtataggatcaaaaaccatgtttcctcataactttgcaggcattgctgcatgattttctagcagtttgctgacgagcagtctcttaccagtctgattcttgttgatgacccctagaagctttgggtatttttttcgtcattggaattccacagtatcagcaataggcatctagttgtgtttcatgtctttttcccgtccccatctgtgtgacattcaattgactctttcattctgaagacccttgcctttctttgggtcagggcctttgagtagttctttatttttcccctccccttctctttgtgtcaattgaggattgtgtgtaaatgcaacagaaaatttgactaaacattggctttacaaattcgtttttgtttttttttttaattctcatgaaacaagatgtccaggtaagtagttgctggcattgatttggtggtcctaggatgtcaagactgagagtttttcctcatggttacaagaagactgctgcatccagcatcatatctgcattctagggaggcagaaagagaaagcaacaaggagaaaaggacagagcctatactgggaaagcacaactttcccagaagtcccccacagacttccacttatgtcatatcagctccccttctataaggaaggctggttaaatgtcgtttttaatctggtcacactgccactctaaacaaaattagggttcttttagtaaggaaaaagagaagagtaggtagcaggtaggcaagtagataactagcagcatctgccacactgttttccattctctatgagagatgttctctaactattctctacaactcttaacttgcctctcattttctacctctgtgtccttttctttgtgtgtggtgcgggggggtacagaggctcactctgttgcccaggctggagtgcagtggcgtgatctcggctcactgcaacctctttcttccaggttcaagtgattctcctgtctcagcctcctgagtagctgggattacaggcgcctgccaccatgcccggctaatttttgtatttttggtagagacggggtttcaccatgttggctaggctggtctccaactcctgacctcaggtgattcacctgccttgtcctcccaaagtgttgggattataggtgtgagacaccacgcctgaccctccttgtcattttattatatgttcaggacatgtattcagtcttatcttccatatcatcatttttgtttttagctatttgtattctgttatataccctatccatccaatattttttatttcatttccttttattgtatttttaatttccaaaaatcttgtcttttcttcaatgtctctgattcttgaagttcttttctgcttctcagaattatctttttcttcctctctgcattttggttcttctattttatgctgttggtatttttcaagtatttggtgattctcagagagacattcatatctgtgagtgaagaactagatttattagtacagagaattagcatggatttcctttgcagttcttacggggcactattatttttgaagtgtgttcaatttgttagtcgcttttcttctgtacatcggaagattgagttgagtctttatgccatggagtatgttatagctaacagccagagtgaaactacagatgaagaaaaattcatgtacttttcattcagtcggtttttcaaaaaatgagtatgtctgctatatgccaagcactgatctatgccctggagatgcaaagatggactgttggattataagatactcaactagaataggaaatgaaggaagaagagcaaggtttggaagaaggtgatggtaagaaatcagagttaaatcctgtctttcagaggattttggatatgataagttttaggttctgaggggatatctaaattgagatgtgtccagtaggattggatatagaaatctgaaactcaagtgttttggagtagagatgtgaattctggagtcagcaacataaaggtggtaattgaaaccattagattggttgacattaccctgcaatgagctgaggatgggaccctggaaaaaaagagttttttactttttttttgtctgtttgagacggcacaggaaaagttactgctttaatgcagggaggaagccctgcattctctatgggggccaggatcatgggggtggccagtgccacaaatggtcaccatacaggccagggaggagccagggcccaccaataatccctggaacatccctggatgctagcagttttttactttctaaatttttttttttttttttaagagacaaggttgcctaggctggagtatagtggggtgatcatagcttactgtaacctccaactcctgggctcaagtgatcctcctgcctctgcctcctgagtagctggggctacaggtgcaagccaccatgcctggctaaatttattttgtggaaatgaggtctcatgttacccaggctggtctcaagctcctgtcctcaagtgatcctcctgctttagcttcccagagtgctgggattacaggtgtgagccatcaaaaagcaattttgaaggactgagcagaagaagagaacccatagagggagatagggaagaggtaaagcaggagagctcagggtcacagggggaatggaacgtatttcttaatctatccagttggttgaaagagctcatttggtattactgactcacttgggataaccatcccattgttactagtagatgtgatcattcacaaaacagccattctttttttttttttttgttgagacagagtctcattctgtcacctaggctagagtgcagtggctcaatcttggctcactgcaacctctgcctcctgggttcaagcgattctcctcccccagcctcctgagtagctgggatttacaggcacccgccaccatgcccagctaatttttgtatttttagtagagatgaggtttcaccatgttggtcaggctggtctcgagctcctgacgttgtgatccgcccaccttggcctcccaaagtgctgagactacaggtgtgagccaccaccttttttttttttaactttaaaatttttctttaaaattttccccttcatggcatttttattttctttttagaatattttaatgattttgaattttacttttattaatagcccttacctaccctacatatttcataagtacctgtagaaaaccttatagtagctggagcatggtggctcatacctgtaataccagcactttaaaaggatgctgagtggggaggatcacttgagcccaggagtctgagaccagcctgggcaacatagagacccagtttctaggaaaaaaaaataaaaattagtggtcgtgtgcacctgtagtcctagctattctagaggctgaggtaggaggatcacgttagcccaggaggttgaggctgcagtgatgcggtgaactgtgattgtgtcactgcacttcagcatggaaagcagagcaagaccctgtctcaaaaaaaaaaaaaaaaaagaaacaaccttgtagccctactttcttggactcatcagggtattccacagtcttgctgcaacaggggaatagtaattcctcctgccattatcttagttgacttttggaacagttctgttaagtagggagaatttcccccattgacaagtgaggaagctaaggctttggaagatggaagttgctacagtgaggtagttgctgagccagaactggaattcagacctgtgatctaggatgatctaagattcctcgtcttaagactgtgatcttttccactgtaccaactgcctttgcaggatgtctgctgggttcccttacctcctgaaagataggatttgactctgatttgttctgttgccctttccaaatttcttttgcagttagtttgttaaaggtatattgctgccttctcaactatctatgtcaaagattttaaaaggtcagaggttagccttcaggacatctatttacttacctaccttaacaattcctactgtagagcaggacatttaaaggacaagaaaggctttatttctgccttgtctctctccatgcatgcattcttatagcatgacaaagttggcagtatacaagttttggaagcaggcctgagttcaaatcccaatgttctataatatggacatgatttgtgattgaataaaaaaaatttttaaatgtgcggcatttgtgagataattggaaattttaacgtaattgaatatctaatatcaagcagtcactactttttttcgagtgtgacgatgtgggtagtttaagaaaaaggccttatcttttagaaataaatacggaaacatttgtggataaaacgttgggctgttatttgcttacaaaagttgtgggagtagatggggtgtggattggatggttgttgggacaggatgattagtacctaattctgtctgcacttacgtatgattgaaattctccctaggatgtagaactaaaaaagaaaaaaaaaatcccaatactctctgtcttaagttaggtaatctactcaacctctctgagcttcaatttccttatctgtaaaattggaaagattataactatgttgcaggtttgctgaaaattaaagtaacatatatgaaaacatctggcataaagcctgatgttagtaggtgctcaaccaatggttgctgttttgttgtttttactatttttggagacttggaaaacattaaatcagttgttatctctgagcctgggggtccatgtttcctcagacagggacacatctccactactaatagggtagttcttactatgtttcccaagagcattttccttacccttgctttctccttttccaaagctaccttaaataaagggaggtttattataaaggaatttgagagtccataaaacagtatcaagagatgcaggttggtcttttagtgaagcagaactggaacgcttcagcatccaaggtagctactctgccttttctgcttcatcttttctttctgtagatcaaaggttggcaaactttttttgtaaagggccagttaataaatattttaatttgtatagcttcatacagactctgttgcaacgacttaactctgcagttctaatgcaaaagagccatacaaaaacaatagttgtgtctgtgttccaatgaatctgtacttataaaaaagggcagggaatggatttggcccatggaccatagttttcccatgtcagctctagacttctgcagatggctccaattacatgtattccatcacagcagactccaggtggcgctgtcagtcctcaagttcacatcacctagtaaatttagtacttgtaactaactagctctcttccaattccagattcctagggaaaggacttcagttgtgtcaggtgtcactatccaactgtgttgccttaagggcggaaatgtgtggctagcagccctctcagcaggggctgtgggtagtctctcctgagaagaaggagcaaagggtatgggtgatgggcaactcttaaagaaaaaaggtatggggatgggctgggtatgtgccccagggttccccatagatccaggaagatcacctgtttattctgcttttatttcttataatctgtatttttttatgttgaggaacttatttttaacaattaatttgagtatgaactctaataaaaagctgactgtaatgcatagtttaaagtttaaaccttgccgagcaataacaatctctagatgtctgttgtttcactctaatacttactgtggaattacacctgagttgttttccttcttttttatgagcctaggagatcagccataacctaggagtttgctacatatacctgaagcagttcaacaaggtaatttatagaagtggtgatagatttcactgagggtgcacttgttgcagaagttgttacattgctcatttggtattatccctagtgcttgcagaggtttttggaactgaaaattgaaagtacctttatacatttttttctgttttaattctcacttgtcattattcatctgttgttttctgcttgtaataagaacatggaaagttctagaaatatgagggaatggcagtttttctcctttcttctttttctctacctccagttaaatttcccagtttagaaacagatgcttaataaaacatacatatcaaaaagtggacccttaagtcttaaaggtgtgatcatgaccatgtgagctatctccatgccctgacggcaacttagtttttagggtcattgaaaataaattttaaattttaagtggatctgatttctgagttttcagttttaattttatagttattttccatgatgagaaattatatttcactgtgattaagctatagactcctatatcagagaagacaagttgagcttacctcaaatttggtactcaggtaagaaaaagtatatatcataattgaggagtagacaaaattactgagagctctaaaacttagtgatgagagcgttgggtagtttccttcatagagctcacagttagtgattgtgaagttttattctcctttctccgatgccaccaggactgagaatctgaattggttagtacccatttgacaatgtttagtttgtgtcaatttgcagactggtgtaactagtatcccacactggtgtgaaaaaaaatatgcacattagcagttggggtgtaaaagtaacttttctcctgagataacaatatatatacataaaatacatttagtgggccccttaggttttgtagatggatctatagttttatatacttggttaggagatttttctcttcagagacaatttcaaacaggcacatttctattcacaggattattctgagtcaggggaaaagaaggatttgtctttggttggatctgtgctgagaagaaatatatttagattttactgtacagctaacaggctaggcaaatacaatacctggcatttatataaatgcttgttgaatctgtgaatgactaaacaaagcccttttgtttactaggagaaggtaagctcctccagagcaaggagttggttttataaactcaaatatatttagcatctagaacagcaagcagttgggtgaataaatgagaacaatctatttattcatttatcatcacattgatggggaaacctggcccaccatagggaaggttgtgcacttggtcagtgttacagctgggatttagtttagtgtagtactctacactgtactatgatggcccttttgacttatgaagtatgagtcataggtgtgaatatcaggcagaaaacattcagaaagattaatcgtcttgtataaattcttccaagtggctccagaagcagatatcccatgttgccagctgtcttttcaacaaggacagttttggtatgttttggtctttgggtagtgggggctgtttgctgaaatgtgatgttcctatgtcaatacagcagaaagtgtctttacattagccatataaaggtatagttcgttcagtggtagtgatttggttttctttattttgttaaacttgtcaggcacaagaccagttgcacaatgccctgaatcttaataggcacgatctgacttatataatgctggggaagatccacttgctggagggagacttggacaaggccattgaagtctacaagaaagcagtggagtaagtgtatctgtttcctttaaaacagtgagaaactaaaaaaattgagtggatatgtgaactcccaagcctaaaagagtgaatatgtttgattaattacttactgtatgagttaaaggttaagctgaagtttaagagctcccagtagcttcaataaggtagactgtgtttctttcttacctataaggatgactgctgctttaggttagctgggcagctctattctacaaggtcagccagggatccaggtttcttccttattaactcaccattccttaggctgttgtctttacctgcatggttgatgctgaatgtaacatccacatccaggctgtggtggaaggagatggtttgggaagctaagcatggaataagcatctggctatatatatatatatatatagagagagagagagagagagagagagacatgatcttactccatcactcaggctggagtgcagtggagaacacagctcactgcagcctcaacctcttgggctaaagcaatcttcctacctcagcctcccaagtagttgggactacaggcatgtgccaccatgcccagctaatttaaaaaaaaaaactgtttttgtgttgacagggtcttgctgtgttgcccaggctggtcttaaacttctgggctcaagcgatcctcctgcctcagccttccaaagtgctggaattacaggtgtgagccactgcacctggccttggtaataagttttaaatgacccagaaattgcacacatcgttcctgcttacattccatggttcaaaactacatgatagttacaagggaagtgggcagacatgcactcaagaagaaggaaataacagatttaagagttggccgacagtctgccattttggtatcatatgttaataacagatcttctgttttcagagatattattagggacagaaatctcctgattcagtaaaaaacaaaacaaaacaaaacaaaacatttggccttattagcatgagaccagtatcttttttcccccttccccattttcccttccccttccccgttttccccttccctttccccgttttcccttcccccttttctcttccccctttccctttcccccttcccccttcccccttcctcttccccttcctccttccctcttcccccatcccccttcccccatccccctttccccatccccctttccccatccccctttccccatccccctttccccatccccctttccccatccccctttccccatccccctttccccatcccccttccccctttccccttccccctttccccttcctcctttcccttccccctttccccttttcccatctcccttcccctttcccctccctctctcccttccttcctttttctctcttttctttccatcctttccctccctcccattcccatctttctttgtttctttcttttcttcctttcttccttcctttctttccttcctttcatttatttcaacagtctcgctctgtcgcccaggggtgagtgcagtggcgcgatctcgcctcactgcaacctctgcctcctgggttcaagcgattctcatgcctcagcctcctgagtagctgggactgcacgagcacgccaccacccctggctaatgtttgtatttttagcagagacagggtttcaccatgttggtcaggctggtctcgaattcctggcctcaagtgatctgcttgccttggtctcccatagtgctgggattgcaggcgtgaaccactgcgcccagccttgtgttgttacttttaaatgggatagctgtagcaaaatgccttgtctcatttgtttggtcccttaatagaatgtctggtctgtggttcaaggcttattattcctaataattagattctgaactaaacttagatttctattaatttgttaatcatctttgtcttctaccatggtagtaaattttctggttatatcagtcacagcactgctttctgaattttcttcaaccatattttgtgtctaaaacagaaaaatcccttggtttgttaagctacagaacagacttttgtcatcaagaggctgtatatttgggcaagtagtaaggagccatgtaacatgttcagtgcctctgtggtgctaggtagtagccctgatccctgacccctgccttctagaggttagctctttgagaatagcatacataaatcccaaggggaacattcttccagtaactgatcaaggactttggtcactaaatttcctaagggagaaatgtggacagctaaaatctgaagccttactgagaagatagagaccattgttcatgacctacagctttgaagagagtagtcatgttgtagtggggaagccaatattgctagaattacagaagttacctggctttggggagggaagtgatcaaagtggatgtttattatggcagaaagtgaaaggcggattcccagttgaattgagaaagctctgtttggtcagctcaggcctcccctggctggggctttgcatcttctggttcaggtcttcctataggtaaccagtgccctatatcattccttagaagcagaagacattgttcatagccctttggtgttttactgttgaaactgtctgatgatcctatggtcagatcatctcaactcagtgttgccttggttttgtgacaaagacaaatactagtgagggattgagcaggcaatccctgatgtgagtattttacttacatcagtgtttactcccaaaggtcagtagcaccttctttcctaggattggtatgtatcttccttcttttgtttagtttggctacttggtatagctctttgtttaagtggagagaacagcattaggggccttgggatcctaaattacatagaaaattatgctgcctggcattgtgagcacaatgaggatagaaaaaaaattccacaagagaggactggtgaaactgtgtgtgttctaggctgacttggtttataaagcattgttctttaattttatcagtgtgaccaagacagtcatgcaaaacattctataggttctttcttaggacttttaccctaagaaaggaatctgaattctaagcctcatttttcttgctgagcagttctccttatcaccagggttgagatgacctacttttgatggcaattcccaaattgccttcaggtatttccacggggaggaagaggctcagtggggtctgtcaagtattgcacgagggcatattactgtgcatgtgtcttcgtgtttctcatctacatcttgtttccctctgagcatctctatgttgcaggttctcaccagaaaatacagagcttcttacaactttaggattactctacttacaggtaatgaaaactctgtactcattcatgcactgatgttagaaatggttttgggtttgtgtgtatggtggttttcctgcattctgatatttattttattaaaggtcatataaagttcatgaactacactctctctattcgatactctttgctaaaggaattaattttctgcatttaaattggaagcaattctattttagcctagtgcaattataattcttatctaggctgggtgtggtctcatgcctgtaatcccagcaatttgggaggctgaggctggtggatcacttgagctcaggagttggagaccagcctgggtaacatagtgagaccctgtctctacaaaaaataaaaaaattagccaggcatggtggcatgcttctgtagtcccagctacttgggaggctgtgatgggaagattgcttgaactcggaaggcagaggttgcagtgagctgagattgagtcactgcactccatcctgggtgacagagccagatcctgtctcagaaaaaaaaaaaaattcttatgctatccaggaaagagcatatatgagaaataactctggtcttggaggctgttattttgttgtgaggagagaaacagatacaagtgagcacttagggctttggggcaaagccatttcttttgatctttcttcccagccagagtcttattggaaagagagaaggcaaagtatacttttatctagaataagaagttttctgtcccctcaacattcctgaatgtgaatgggattcttttagctccattgattctctggctgaggacccagggcccaggtatccaaggggcttttccctcttccccaatatacacatttgccaagttccttggtcagctgattctgcctccagccctgcctctgtggtggcctttatgtctatttcatttttctttaaaaggaatcaggagcttaaccctgggtcttcctgggctttggcttgggaggttggctccacgggagatgaggatacccagctcatttcctgcaaagaggcattaatgtggaacagtactagtgtggcagagatggttcttatcaaatagatactttgaccttatcaggtgacaaattaacaaaaatagaaggaaaaccatgactggggatttttagttttctttctttattatctggtaactgtagctgctttttttttttttttttttttttttaaagtcaagagaactcaaaaaagccagagcatttctgttctgggtgaggttggccagactgtttttttttttttttttttggagacggagtttcactctttttgcctaggctagagtgcaatggcgtgatctcggctcactgcaacctctgcctcctgggttcaagcgattctcctgcctcagcctcccaagtagctgggattacaggcatgtgccaccatgcctgggtaattttgtatttttagtagagatggggtttctccatgttggtcaggctggtctcgaactcctgacctcaggtgatccacccaccttagcctcccaaagtgctgggattataggcattagccaccacgcctggtctggccagactcttttaactgccgtctccttgctgatgtaaattgtcttgtttgctttttttccaagctcggcatttaccagaaggcatttgaacatcttggcaatgcactgacttatgaccctaccaactacaaggtattacaggctgtgaaggctctggccttcatatagacggtcccactgctcctagaggtgatctgaccctggaaagcaaaggaatagcttcttaaatttggatacctgagaaatagaaaaaatataaataaaaggtggctcttcttatttgaaaatagtgtcaagtatgctctacttatcttctaaaagtgcacatttgttataatagacgtgtaacccctgcagaaggcagatcatagtgctagtaaagcttatgtgttacttaggaaattagcaatgcctccacaactattgtcaaaaataaatctgcggcccggcgcggtggctcacgcctgtaatcccagcactttgggaggctgaggtgggcagatcacgaggtcaggagatcgagaccatcctggctaacacagtgaaaccccgtctctactaaaaatacaaaaaaattagccgggcgtggtggcgggcgcctgtagtcccagctcctcgggaggctgaggcaggagaatggcgtgaacccgggaggcagagcttgcagtgagctgagatcacgcgccactgcactccagcctgggtgacagagcgagactctgtctcaaaaaaaaaaaaaataaaaaataaaaaaaataaatctgctgggcatggtggcttatgcctgtaatcccagcactttggaatgctgaggcaggaggatcacttgaggccaggagttcaagaccaggctgggccacatagtgagacccccatttctacaaaaaaaattatccaggcatggtggcacacacctgtagtcctagccactcggaaggtggaagagggaagatcacttgagcccaggagtttgagtctacagtgggctatgatggcaccactatactccagcctgggtgacagagaccctgtctctaaaaagaaacaataattatgttgaaatgacttctagagtcctaatgatttgatactacaactttttttctagatgtgactttgggaatgagaaggaatagcatcaaatggatgaacatcattgaggagatgcagcaagacaagctgtttattaaaggatacaaactgaattctgatttaggaagtaacattagactgtcagctcccaccttgatacctttccttagagaaatgaaagggctgggctgatgaagcctaaagctgactcgccctctgttctacggtagaaagaaatttaccttaagtagccacgtacaggtgtatttcaggtatctagaacacttggtataccaaataggggctgcagagaacagattaaaggaagtttttacttaaagggctctggtattcattctgaaatactgactttcctggctagaagtaggaaacagatgggtaaagcaagtaacattttatctttttttttttttttttttttttttttttttgtgctgtgccagagagccacagtgtagagtgcaaggacattcctcaggaacatttgtcccaataggttggatatatttatgtccctggaagaaattttccagtcccatctatgctgatgggcctgctgagtatagactcaggaaagctgccccactgctacagccttttgggaatgactgaatgactttctctgtgccatgttttcaggccatcttggcagcaggcagcatgatgcagacccacggggactttgatgttgccctcaccaaatacagagttgtggcttgtgctgttccagaaagtcctccactctggaataacattggaatgtgtttctttggcaagaagaaatatgtggcgg

SEQ ID NO: 15480 - DNA, 51351 bp, Homo sapiens
gagctaaaatggctgaggagagagtcgcgacggtgagcgccgagattctctttagttgcccggccgcagggcaaggcaagctggcgggtggcttttgtcccatgcagcggttcctggagagaggcggagctgggtgccgagcgtctcagggtgggcggggcgacacggtcccctttttactgtcccgggaactggtcgcctggggcaagtctggatacttagcagcacaggtcctgttctaggactgtagtccctcttggggtgcgctggacggagaagggagacttttcaccagtaatggctcttaccgtagtgccatctttttctgtctcgggggtttggaaggtaatgactagcacttgtgtagacagttcctgttaatcccgtgaattgggaatttaacatgcctggaagcttgcagcgtcactgccttctgccagtggagcgggactgtgttttttctgtggtgattaagtttaggaaagtacggttttggaattcatctgaaggctgagttgggcgttcactccacagaactgctaatatagaggaacccgatgaattcaggatgacctagtcgctattttttgaggcatatatctataattggatctaatttcggtaaagtgccaagtgtgaagctttgtttaccttgctttagtgttgggtttgaaagcctgttctgtccatttgttagaatgattttaggtattcggaatttattgtctttcgaaaaacgccctggaaaacagtacaaatagcagcctttggctgttttacaacttagttttggctaagcagcaaggttagtgttattgttagagggccttttgtttgttttctactctcatttgcagagtagtcatattattctagtctaattagaaaactctgaagacagaaacttttttttttgagacggagtgtcgctgttgtcggcccgggctggagtgcaatggcgcgatctcggctcactgcaacctccgcctcccaggttccagcaattctcctgcctcagcctccggattagctgagaatacaggcgcctgccaccacgcccggccgaaacatttttattaagctaagaaatttaaaatagctaggccggacgcggtgcatcacgcctgtaatcccagcactttgggaggccgagacgggtggatcacttgaggtcatgagtttgagaccatcctggccaacatggtgaaaccccgtctctactaaaaatacaaaaattagcggggcatcgtggcgctcgcctgtaatcccaggtacctggaaggctgaggcaggagaatcgcttgaaccccggaggcggaggttgcagtgagccgagatcatgccattgcactccagcatgagcgacagagacagactccttctcaaaaaaaaagaaagaaaaaacagattttaaaataattaaataggccaggctcagtggctcacgcctgtaatcctagcaccttgggaggctgaggtgggtggatcgcctgaggtcaggagttcgagaccagcctggccaacgtagtgaaaccctgtccctactaaaaaaatacaaaaaattagctggacgtggtggcgggcgctggtaatcccagctactagggaggctgaggcaggagaatcgcttagaacccaggaggcagaggttgcagtgagccgagatcgtgccatttcactgcagcctgggcatccagagcaaaactccgtctcagaaaaaaaaaaaaagtaaatagcatggttaatgttactgggttttaaatattaaaaacataggaaagaaaatacttccactccagcctgggtgacagagcaagactccgtctcaaaaaaaaaaaaaaaaaaaaaaagaaaatacttctaagtaatcttaaagtgtaaaagataatgggtaacataacattgctacaaatatagcttatcctctagtgctcatcacaagtgtttgtgtaatagaatatgaacttgagtctgtgacggcagaattgtcatgtacatttgaatgtctaatactgttttaaagagaatagcttttgtttcgatatgacttagcaattaagcctgaagttaactgttttcattgttgtcaaatttattgctagtagtgttacgtttatagtaattttcatcttttcaagttaccaatgcatggaaatgtgaatttctgtccttttaggaagtggtattttatcttttttttttttttttttttgagacggagtctcactttgtcgccctgtctggagtgcagtggcgtgatctcagctcagtggaacctctgcctcccgggttcaagtgatttttctgcctcagcctcccgagtagctggggttacaggccctcaccaccatgcctggcttatttttgtggagatggggtttcaccacgttggccaggctggtcttgaactcctgaccttgtgatctgcacgcctcggtctcccaaagtgttgggattacaggcgtgagccatggccccctgccttattttttaatacaattaaaagaacccagtaatcctactcctagacctgtgtcccacagaaaaaagtgttaaacatgagcgtgtagtactagggcattcgttgtagtactatccgtagtggcaaaacgctggaagcaaattaaatgcccattaatagggtaattgatgacttcagatatttccatactgtggaatattatgcagtcattaaaaagaatgttacaactaattgcttttcctctcagaagcccctctctctcactagagaaagctgttctcctttctttcttctgcctattaaacctccattcctaaactcagaaagaaaaaaaaaaaaagagaatgttacgactaattgacttggagggacttccatggtgtacatttaaataaaaggtagatgtgaagtggggtatattatgtgatcttaatttcataacacaaaggaaaacatatagatccgtagataaggatatatggatatggaggagagaaaaggaaaagactcaaaactcacagaatttttgaagaaatgtatagctaaaaatctaagaaggctacagtcaaggccttgaggccagaagacaccccatcaaaactgagtaaaactagcccagtgtgggacgcagaaattctagtatgctaccaaaattacttacggattgctaccagttccttagaaggaaaactgaggactaatatttgtattttcagtatagtttagaattcttaaaaaatgagcaaacaggctgtacttggtggctcatgcctgtaatgccaggacttgtggaaactgaggtgagaggataacttgagtccagaggtttgagaccagtctgggcaacatgttggagccccatttctacaaaaaacacaaaaattagccagacgtggtggcacgcgcctgtcttcccagctactggggaggatcatctgagcctgggggaagttgaggctccagtgagccatgatcatgccactggactccagcaggggcagagtgagactttgtctgaaaaaaacaaaaaatgaatgagcaactaactctggctttcatgatttgtgcttataaatctttttatttatttatttatttatttatttatttatttatttatttattttgagacggagtcttgctctgtcgcccaggctggagcgcagtggcgcgatctcggctcactgcaacctccgcctcccgggttcacgccattctccagcctgagcctccggagtagctgggactacaggcgcctgccaccacgcccagctaattttttgtatttttagtagagacggggtttcaccgtgttagccaggatggtttcaatctcctgaccttgtgatccgcccgactcagcctcccaaagtgctgggattacaggcgagccactgtacccagcctataaattttttttataatgccctgattcccattatttgatgtatttggataaatatgtcatcctgtaaattgaaggattaaactgataagagcagaaaacagaaattagtacactagttgatctggctcagatatagtgcctatgtatcaggtgctccatgaatatttgttggatgaataaatgatcataaaactatataaaaatgaagaaataacagaataaaataatttgttctatataaatcctatgaatgagattgagtgggctaatagaatcctttccatctcaaaatgttctggaaagtcttgagtaaaagactcatcaaaaaaataattctgctttgtgcagaaagaagggttgctgacctttgaaggtgctttttgagtctttaacattctttagtagtatattccccaaagttaagaaattctagttagattttaaaaaattgagttaacatttaaaaaacagttttgttgaggtataatacacgtaccataaaatttactcaatttaagtacaaagtttgatcagttttagtaaatttatatagttgcacagctgtcatcagaggctgcttttaaaacatgtccatcactccagaagggttcctgtgtcaatggaattgctgggttatattgtttaagtatttgtttaaaaaaacagaaacaaatctgcctaacttctgcaggctatatacgagttaacatttccatgagcaatgcatgagggttgtgatttttccacatccctgtcaacacttggtttgtcagtttgtttttatttagctgttgtagtggatgggtagtgatggtgtatggtggttttaatttgtatttccttcatgaataatgatattgaagattttttatatgtttattttccacccgtatctctttggtgaaatgtctttataaatttttgtgaatttttaaatcaagatcattaaccaaatgagcccctcatttgggctcaagtgatccttccacctcaacctcccgagtagctgggaccacaggtgcaggccacgcttggctaatttttgtatattttgtagaggcggggttttgccatgttgcccaggctggtcttaaactcctgaactcaagcaattggcctgcctcacataagtattctcttttattttgaggattaatttttgttgttgtgaaatatatcctacctgtaaaagagtgcttaaaatgtcgtatgtgtgctttaaaggataatataatggaaacttgtgttcctactgcccaggttaggaaatgggttattaataactttgaaacctcctaaatgcctctctcctactgcattttccttcctccacatcagatgtagtgtttcttcaattttatattaatattttgtactttttatagttttaccatatatgtttatatatatccttaatatattagtttttaaaatttgttattaaccttcagtttattcattatttcaacactgtatagtatcttattgtagtaaagtatgtcaattaacttatccattccactagatggagatcgggattatttctggtttttagttattaaaaacaatgctgctgctgggtgcagtggcttacgcctgtaatcctagcactttgggaggccgaggctgcggatcatgaggtcaagagatcgagatcatcctggccaacatggtgcaactccgtctctactaaaaatacaaaaattagcaggatgcggtgctgcgcgcctgtagtccctgctactcgggaggctgaggcgggagaatcacttgaacccaggaggcggaggttgcagtgagccgagattgtgccactgcacttcagcttggcagagcgagacttcgtctcaaaaaaaaaaaaaaaaaaagctgctataaatatggccaagactaaggaaaggtaagtgaggtgcttagggttcacattttatggagtaagagtaagtaccttcttaaggtttataccctaggttcttcacatgcctcactttagtcctagccctgagcattattatgtaggtcttctgatgcaatatctaagagtttctctaaggtatacctagaaatagattgctaggtaatggagtaactttattacttacaggaaactatatggtggttgtaacaatttatgcttctgccaccagtcatggtggatatgaaattatgtcttaatgtgataatttacattgcaatttttttttttttttttttttttttttttgagacagagtcttgctctgtcacccaggctggagtgcagtggcgtgatcttggctcactgcaacctctgcctcctgggctcaagtgatccttccacctcagcctcccgagtagctgagaccacaggcgcaggccacacttggctaatttttgtatattctgtagaggcggggtttcgtcatgttacccaggctggtcttaaactcctgaactcaagcaatcggcctgcctcagcctaccgaagtgctgggattagaggtgtgagccaccacacctggctgtttgtttgttttgagcctgttcctcaggctggagtgcagtggtccaatcatggcttgctgcaactccgcttcctgggcttaagagatcctcccacctcagccttctgagtagctaggactaagggcacctgccactatgcctggctaatttctaaagttttttttatagaggcagagtctcgctgttttgcccaagctgttctcaaatttctaggctcgtgtgatcctcctgcctcagcctcccaaagtgctgggattataggtgtgagccaccacacctggctgatctatctgtcttaaactggagaattgcatttttttctacctcctttcttttttttaaaaaaactgaatttccatctgttacccctccctttctgctcctcttatttcatgccttggaagttatactttgccttcctttaatgagtaccaaagaaattaaaaaatacatgtttactgtaagtccaggcctaaatgttgctactacagggaccatcaaatgctttactaccatctattgccatctgcaaatgtatgccattgttgtttagttttgtagttcttaatgtattttaattaaacaccacaaattatgctttttgtttgttttattcagtcagtagatgcttagaatacttgcttattttaccaattcctttgcttattccactcctttgttctgggattatttttctttttcctaatatattttcattaaaagtttatttggtgagaatctaaaaactctcaaattctgaaagttttaaaaatttgcctttgttgttgaaaattagttttgatgggtgagagaatctagatcaggtgttagcaaacctttttttgtaaagggccagatagtaaatattgtgggctttgtgggccatagagtctctctgacaactactcagcaatgctgttgtaggacaaaagcaaccatagacattatgtaaacatgagtgtgggtatgttctcacaaattttgtttatagacactgaaatttgactcaattttcatgtgttaaaaattattattttttgaatttttttaaccatataaaaatgtaaaaatcattcgtagcttgtagaccaaataaacaggatggatttgacctgtgggccatagtttgctgacctctggtctaaattaacattcattttacttagtacctgacactggagtaattattcttatgatgtcttattgtgatattgtcttccatttttaattgttgaagagccagctgtcagtcttttttgtttttctttttcttcttcttttttttttgaaatggagttttgctcttatcgcccaagctggagtgcagtggtgtgatcttggcccactgcaacctctgccttctgggttcaagcgattttcctgcctcagcctcccaagtagctgggattacaggtgcctgccaccacacccagctaatttttgtatttttagtagagatggggcttcaccatgttggccaggctggtgttgaactcctaacctcaggtgatccacctgccttggcctcccaaagtgctgcaattacaggcatgaggcacggcgtctggcctttctttcctttttttttttttttgagacgtagtcttgctctgttgcccaggccggggggcgatggtacgatcttggctcattgcaacctctgcttcccaagttcaagccattctcctgcctcagcctcccaagtagctgggactataggcacgtgccaccatgccgagctaatttttgtatatttagtagagacggggtttcaccatgttgtccaggctggtcttgaactcctgacctcaagtgatcctctcgccttggcctctcaaataactgtcctttctttgttggtaatctggtgatatgttttcttgtttggctgcttttaagagctgcttcttgtctctggtgcagttcgctatgatgtatctaagtatgtatttattttcatttaacctggtcaggatttgttgagtatccagaaactaaggattggtgtttctcattacatctggaaaaatttgagccattatttttgcttatattgtggtatgtcataggaagttgagaaaagaaaaattcatttgatggttttctatgaggttatagtggaaaataactatctcccttttagaattgagtgctagacagtttctgtgtagatgatctcataagcttccttttatcaaacagcgatcacttttttggtttggctgctgagaagtatggcatcaagtataatactcatatgaggtgtttaagaactgagtatatttcttatgcacattttactatatactataattatacattaaaaatgcacattgtaaatattataaatatgtgttatacattgttaatagtttggatagcaaaagtatgacttgacatttgttttttaaaccatatttaaagtaactctatcacaatatggatttaatggattaattgcataattggtgagctactgattattcttgttatttggatgcttctttaagttagcaagtttatattgtggtgcttcaatatagactacttatttcatttcagagaactcaatttcctgtatctactgagtctcaaaaaccccggcagaaaaaaggtctgtatgcagtttcatggtatgtgtatgtttgcacagacagatttctcttttatttatttatttatttttttttttggaggcagagtctcactgtcacccaggctggagtgcagtagcacaatcttggctcactgcaacctttgcctctggggctcaagcaattctcctgcctcagcctcccgagtagctgggattacaggtgcacgccaccacacctggctaacttttgtgttttagtagagatgaggtttcactgtgtttgccaggctggtctcgaactcctgacctcaggtgatctgcccaccttggcctcccaaagtgttgggattacaggcgtgagccgccacgcctggccagatttctctctcttgttgattcttttatctattctatattatttcaaaatgagtgttgggaaaagaagtaatagtctaaatgttctgtcacatctagcttttatttaatagagttattagatattaggaggttggtttgacctggaaattatttaaatggggtttgattattatgtaagtgtgtactaattttctgcttctggaaaaaccactttgtgaagttccaggtatctttttgctttgttggtttctagtttaattctattgtgggtagagaacattctttatatggtttgttttatggcccacaatgtggcctgtgttggtgcatgtcccatgtacacttggaaataatgtgtattctgctcttgtaggatgtagcattctgtaaatgtcaattaggtcaagttggttgatagtgttctgtatatacttacaattacagatattcatattcttactgatgtagttactgattggaagggtgatagaagagtgttgaagtgtgcaaatgtaattgtggatttgtttctactttcagttctatcaatttttgatttgtgtattttgaagatctgttgttggatgcatatacatttaggattgtctgatttcttggtaaattgacccgtttgtctttatataatattcctcttcaatttctgataatattccttgtttgaagtctactttgcctgataatattttagttttagttatttatttagctattttagttttgctttggccagtctttgaatggtatcaacatataattttcgtagagtaaaattccctttttttagtacaaattctgagtttcgacaaatgaaactagccatgtaaccactagtagcaccataatcaagttataaaagtttaattactcccccaaaagtcacctttactttgtagtaaaccacttcttccattcccaattgcgggcagccattaatctgtttctttcttcctagttttgcctttcttggaatgccaaataaatggaatcatacattattattattttgagagagagggtctcgctctgtcacccaagctagagtgcagtggtgtgattatagctcactgcaacctgaaactcctgggttcaaatggttttccccagtagctgggtctacaggtgcatgccgccatgcctggctaatttttatgtattttttttgtagaaatgggggtctggctctgttgcccaggctggttttgaactcctggcttcaagtgatactccatcttcggcctcctgaagtactggcattacaggcatgagctattgcacctgggttatgtaaatttttcagtggcttttaaacctcatataatgtttgtttgttggtttgtttttgaggcggaggctcgctctgtcacccaggctggagtgcagtggtgcagtctcagctcactgcaacctccacctcctgggttcaagtgattctgctgtctcagcctcccaagtagctgggattatcggcatgaaccaccatgcctggctaatttttttatttttagtacagatggggtttcaccacgttggccaggctggtcttgaactcctgacctcaagtgatccacctgctttggccccccaaagtactgggattacaggcatgagccactgcatccagcccaatatagggaggtattaagaaaagagaagaactatcatccttaagtattaacgggactttaacaaattaaaaaagtagtactttgaataaaaagctgtcacattttactgtgaaatccttagactttttttatacctctagttcaggttttttcagctttggcatgaatgatattttgagcaagataaatctttgttggagttgtcctgtatattgtaggatggttaacaacatccctggcttctacctggtagatgacagtagcacttaattgtaacaaccaaaagtgtctccagatgttgccagttattccttctggggcaaaattgttcccacttgagaaccactgctctggttaagtagtgtaatacttggaaatagaaggcagaaagttggtaagtgcataaagaattcacacagaagttggattagcaagctgagagacgttatttgaacaagtagcaattggaggcattttgactgagaatggatgttgtgcctctccctcactctttcctcctcagcttgagaggtccatattctctcaaagtttgactctttagttttgagggtgatgactgccaactgtggaagggataaacagatttctgtttggtatttttgtccaaatatatcaggactttttcaagaacaggcaatgaaattattgatcagaactacttggtggttctgagaaaataatatgctacatgaggctactgaagtcctcttccttttgccccatgatgtaaccttaggtgactttcttctggctttcagttgaagatcttacccatcattgaggtgagcgaactgatttactgcttgagtctattttcttccttaaaggagtcttcattgaaaactttacccattttggggtggccatagctgaggatgagttttgtccacaacctgagacaacatactcactatgtaaaaaacctgatctcagcttgatatctggttttagactaattgtttaatagaataatttattattgtaaaatatatataaaatttaccatttttaagtgtgtaagtcagtggcattaagtacatttacaaagttgtgcagccatcaccactgtccatttctagaagtgtttcatcattccaaacagaaacactgtacccattaaacaataaatctccacatccccttgcctccccagatcctggtaatctccattctattttctgtatctatgaatttgactattctaggtttttcatgtaaggtgaatcatacaatatttgcccttttctgcctggcttattccactcagcattttcaagattcattcatgttgtagcatgtgtcagaatttcattcctttttaaggctgaataatattctagtgtatgtatatatcacattttgtttatctgtctgttgatgggcatttgggttgttttccttagagtctttatatgtcagtaattcttaaagaatttaaaagttgtagaaactaggaattttgtagatattctagaaatatgtcatttcctgtactgtatataataatttattctacagactaattactgtgtatatatttggttctcagacgtgattttgattttgtagatgctgtacatgctcttcacttcattaatcttttccttttgctaattttggttcttgtgtatacagaattatagagttacaaggtaatttagttgttacctaattcaccctaaagtctacatgaaaccactgtcacagtctttgataagtagttaccaaatctcactatttctactgtgatagtgaatgactttcattgattagctttctgaaagaatagtttatcttacttgtcttggtatcctcacctctgagtctatttgtctattgtaatctggcttttgctccaccgctccactgattaaatggatgagctaagcatttttttttttttccactgcaacctctgcctcccgggttcaagtgattctcttgcctcagcttcccgtgtagctggtattacaggtgcccaccaccatgcctggctaattttttgtctttttagtagaaacggggtttcactatgttggccagactggtatcgagctcctgacttcatgatccaccccaaagcctcccaaagttctgggattacaggtgtgagccaccgtgcttggcccaattctgtttaatttttgaggaacaatgttaacttctaatttaaatggaaggtagtatatatctaatttttccctattatttttaatttcaatgctagtaaatctttaaatctgaaatacacactcttgaattttgacagatatgtatactcatgtacatatttatattcctgtaatcatcagatcaaattaaacatttttatcacttagaaagtttcctcatgcctttttccagtaagtcttctgcttcacttcgccagatgcaaccaccattctgatttctgcctgtataaattgattttgaactttcctataataagttgtgcttgaacttcacacaaagggagccatacagtatctactatttagcttttggcagctttcatacaacatgttgttttggagattcatccgtgttgttatatgtatcagtagttcttttatttaaaaaatgctgtttagtattcagttgcatgaatataccaccgtttgtccattctcctgttaatgagtatttgcaatgtttccagtttttgagtactgtgaaagtttctatgaacatttatttatttagagatggagtctcgctttattgcccaggctggagtgcagtggtgcgatctcagctcactgtaacctccgcctcctgggttcaatcgattcttcagcttcagcctcctgagtagctgggactataggtgtgtgccaccatgcccggctaatttttctatttttagtagagacgggatttcaccatattagccaggctggtcttgaattccttacctcatgatccgcccgcctcagcctcccatagtgctgggattacaggcatgagccactgcacccggcctgaacatttatttactggttttttttgtgtgtgcatgtgtgtgcaagttttcacttgaataagtgcctagggagtggaattgcttggtcatatgtgaactgtttgttttaactttataataaactgccgaagtattttccaaagtggttgtacagttttacccgaccgccagcaacgtgtgaggattctgtttggctacattcttgccaacatttgttactatcagtctttttcatattagacttgctggtgggtatattgtgttttattgtgattttaatttgcattacactaatgactagtgatgttgaacaccttttcatatacttattggtcatatcttttgtgtagtgtctgctcaagttttttgcctatttttaaatttcttttttccttattattgatttgtgagacttcttaatatattctgaatgtacgtcctttgtctgttatatatgtggtaagtatttccccccagcctgtgttttactactttcattttattaaggtatcttttgatgatcaaaagttttaattttgatgaaggccaatttactattatttttcttttgttattaatgccttctctgtcttgtctaggaaatcttgatccttaccccagactgagttgtgtgtcctctcccttttctgcattaatattgcagaaattaattttttggttttagaaaatgtctaatttggctcaatcagtaatttttgatatctttctattgaaatatatatacagaaaagtacatacataaatcataattgtactgtgcagtgaatttttacaaagtaaacatatccatgtaatcaccatctagattaaggtatagaatattatcagtgccctccaggccgcctccttattccctaccagtcattaaccacccctcccaaaggtagtaacttgtatttaacttctatcttctacatcagttttgcctgcttttgaatttaatgtaaatggaatcatgcagtgtgtactttttaatatctaacttcgttgctcagaattatgtttgtgagattcatttatgttgttgcatgtagtagtggttggttgttttcttccttgttatatatattccattgtggggctctacctaagtctattcattttatacttgatgaacatttgggatatttttattgtgatgtattatgaataatgccaccatgaagagtcttgtacatgttttttggtacacatacatacttaggagtaggattttcagggtcaccaggaaggatatatttaggctcagtgaatactagcaagcaatttttaaaatgcggtcaatataatccccatgtgtaaaataaaggtgtacaaacgcacacacacacacttgctcatatgcttatatgtgcatagaaattccttgaaaatactcaagaaatgcttcacctctggtaagggataggaatggaatgggtcttttgtttagtatcctatgtgccctttgaattttgttttactgtaagtatgtatttttaagaaaaccaactagttatttttaaaaatcatttgaaagtcttcctactttgatatatgaaaaacactggttttaaaaaaaataatagaaaagctttaaaatcattattatttttttgagacggagtcttgctctgtcgccaggctggagtgcagtggtgcgatttccgctcaccacaacctttgcctcccggattcaagcaattctcctgcctcagcctcccaagtagctgggactacaggtgtgtgccaccaggcccagctaatttttttttttttttgtatttttaatagagatggggtttcaccatgttggccaggatggtctcaatctcttgacctcgtgatctgcctgcctcggcctcccaaagtgctgggattacaggcgtgagccactgtgcctggccgctttaaaatcattaatgttgcgttgctcagttatgtctaattgacagcccaaacatttacattgtaatattagaaaatcctttatgattgggcagaaacttggtttaatgtgtcaccttggagacctgggttatagtcctgcctcttccattaactacttgttgaatgtggacaatttacttaacctttagggccttaatttcctcctttataatgtgagaatgttctctgaattgcataactcactggccttacgtgactattcagtggaataataagagagaaaaactttgagatacatgcacacacacccttaagaaggatataattgttaaattttgctttgaggaaataaaataatctaagctataaagtaaaaccataattagctaatcttttatatgacttttttcttcctcatttcaagctaatgagaagcaaacaaactggatagcagcaatataattaaaaaattataggccagcttctagcatgtattcttgagtcaatactgactcagcccagtctcttcctcttccttcatcatcatttatgtacctgaacagagtagatgtttctcttgatcctgggcctgttcgccctcagatccattccttgccttctcttctctttttggtatagtgaggagctgactctttttttttttttttttttttttgagacggagtctcgctctgtcgcccaggctggagtgcagtggcgggatctcggctcactgcaagctccgccttccgggttcacgccattctcctgcctcagcctcccaagtagctgggactacaggcgcccgccactacgcccggctaattttttttgtatttttagtagagacggggtttcacctttttttagccgggatggtctcgatctcctgacctcgtgatccgcccgcctcggcctcccaaagtgctgggattacaggcgtgagccatcgcgcccggccgaggagctgactcttgcagcctccttttcttcccaggcttccgtgtcagcagtttctggctggattagcaagtggaggaactggcaggagattagaaggcaagaggaaagagaagacagggcttccctccccgaccttcaggcctcagagtcgtagtggttttttgctcatgcagacttctgatttgtctcaccattccctgttgggcctctcatttcttccattgcctgttctctgcattaaagtccttgtgtttcaaatcctcaagtggctttttgttaggctttgactgatacagggctcaaaatgatagtaatgaaaatgtcttacatttatattcttttcaagatttgttatctcttttgataccccaaatatcctattgaggtagaaaagtgttataattcctgtttggcatgaggaaattaacatttattgaatgactattttcagattctttggattttcgggtgaaaattttaggggggataaatggaggcccagagaagtgaaataacttgccctaggccccatagaaggctggtattgaatcaagattgaaattctgcatgtgaaaacttttacgtgctacatgtctgctagtcctggaagaaatcctttctttgatgagtattttttttaaaggctttacttgcaatatatttacaaaagccttagttatttagtaaatttttcaatgaaaaatctgaaccataataattttctgcttagtacttatatagctagcatactatccctagcattaatcaaagtgtcatgtaaaggtttgatttttgagcctaagcagaatttgaaattcttctaagagaatttagcacctagggcaaactacaggggagaattcttgaggtgtcatgtttattcacttctggaattgtttaaaatatgtcaggtgcatccttaaagggagaaagaagggggaagagatgttacaaaagagtagaatggggcaagagaagtggcaagggagtattgttgctaggttgccagccttctgcccccactgtcttggtgatggtggaggggtagtgtggcagctgggatatgaatgaggtcttttttataactcactaaaagccattaccttgtcttcatctcgtcagctggctacctgacctctgtggtaacataggctcctgaaatgtagcattggagatgatcactgtgctttattgcaaaataggggagactctgctctgcatttacatgcttatgttttgtggaggatctttcaactagtaattctcataatacctgtgaaagcatataagaaccagtatctccatttttagggggagttggagtgagcaatgatttggaataccagaaattcaacttatatatttacaggtaaaattctaattgtaaattcaggattcatagattctagggatttctgaggtatccagaattccttcatctttgatgataagtagataataatggtaataaaaataacagcaacaggcccagcacagtgacccacacctgtaatcccagcactttgggagactgaggcaggtggatcacttgaggtcaggagttcaagaccagcctggcggacatggcaaaaccccatttctactaaaaatgcaaaaattagctgagcatagtggcatgtgcctgtaatcccagctactcagtaggctgagtcataagaatcatttgaatctgggaggtggagattgcggtgagctaagatcgcgccactgcactccggcctttatgacagaactcgactccatctcaaaaaaacaaaacaaaacaaaacaaaacaaaaacaaaatgcaaaaaaacagcaacaataataggtaacatttctttaaggcctactatgtaccaggcactatttgaacctctttatatattaggtaatacgatacaactctatgagaatgagtattttatttcctgacccttctatttaaaagtaaaaccccccacccggcactgtttctctttcctgctttatttttctccatagaaaaatatcactcataagtgtaacatactttattatctgtcctgtgtggtagtagcccctgccctcaattataaactccatgaaatcagggagtcagttttgttcactgctgtattcccagtgcctagaacagtgcctggaatcatggtaggtacccagcgaatattggttgaatgaatgagtcttggttttacagatgaggaaactataaatttcccaggtcacacatttggtaataggacagttgtgtacactgaaatgttctctaaaatatttgatggaacgaaaattagcttttggacagctacatctccaagagtgtgaaatgaccttcagcactggatttggtggattttcctttttctaatccctagagttccatttaatgagcgtttgggttcttgagctaccttacaaattgaacacttttttctccagctttcactcaagaaacacaaaacatggcttgtcctttttttttttttttttttttttgagactgggtctcactctgtcacccaggttggagtgcagtgcacaatcatggttcattgcaacctctgcctcccaggctcaagcaatcctcctaactcagcctcctgagtagctgggactacaggcttgtgcctccactcctggctaatttttttgtattttttgtagagatggggtttgtccaggctggccttgaagtgctggactcaagtgatccgtccacctgggcctcccaaagtgctggggttacaggcgtaaaccactatagctagccctgattgtcttttattgtgagattttaataacagctaagacttgaaaattaacattttataaattttcttttagactacttagtgatatactaagtatctaaggtttgtaatacttagtataaactcaaaagggttcagtgcctcattctcttttactctttccctttagtagataggtgacagaggactgggtcatgcagttgagacttggtccaagatgacttagtaagctacttgtcccagaactatttatttatttacttatttttgagatggagtctcgctctgtcgcccaggctggagtgcagtggtgtgatcttggctcactgcaacccccgtctcctgggttcaagcgattcttttgcctcagcctcccgagtagctgggattataggtgcccgccaccactcccggctaattttttgtatttttagtagagacttggtttcattgtgttagccaggattgtttcgatctcctgacctcatgatccacctgcgtggacctcccaaaatgctaggattacaggcgtgagtcaccacccccggaccctggaactatttatgacggtgcactttatgcacttaacacactcacatgtctttaagcttggtgactcgtgtggctttttcgaaggagatttgattctggaagtggttaagtaggatgtgaatggctaaggtctggtcattggtgaagcctaggggaagaaaagaaaggaaacacaagtcttagaagaatttcagatcggccccaacgactagaagggtggttctactaagaaaatgtgtgtagtcagaaaatgaagagtcagttgcttaaaattttactttttttcttgttcctggcatgtaaagtcatatccatactttctgttataatttcttcttacaaattccattgataatccctattcttggatagcaatgagcagcattacttcttttttatttttttaaaaaaattaaattttttgttgaaatgagggtcctgctgtattgcccaggctggtatcaaatttctgggctcaactgatcctcctgcctcagcctcccaaagcgctgggattacagttgtgagccagtgtgtctggttgtaccttttaatttttgtgttcaggcaacattaactctgagtcacagtaagctttttttttcttcctgtcatattatggacatagaagttttttggttttctttagattgtttctccttaggttgcagaacatcaagaaatggattacagtcattttcctctcttccccatgctcttccctttcttttccttttttcttttctttttttttttttggagacagaatcttgctctttggccgaggctggagtacagtgtcatgatcttggctcactgtaacctccccgcaccaggttcaagtgattctggtgcccaagcctccctagtagctgggatgtcaggatgcgccaccacaccctgctaatttttgtatttttttgtagagatggggtttcaccatgttgtccaggctgacctcaaactcctggactcaaatgatctgccctcctcggtctcccaaagtgctgggattataggcatgagccaccacatctggcctcttttccatttttaaaaaggactgtctccaacatattaaaattcacaaaaaataatataaacacacatgtactcactggctaggcttaataaaaaacatttagtcatgtttactttaaagctttttatttttttgagaaataggcattaaagagttgaagtctcctttctgtcttttcataattctgttcttccctcttccttccttgagatcttcactattcttgggttaatttggatctttctactccttgttaccacagaaaagtaattcttaatgaatttgaccatattttaaacttctgatttcagtgggcaggtaactcattttatggtttctgtattgtgagccattttcaatgactcaactagatttttttcatcgttgacttctcatttctgggcaacagcataatgttctcatttgagctatttctaaagattgtgtttaactatttaaaatatttgtggtactctgatcatcagatgtgatttttttttttttttgagacggagtctcactctttcaccaggctggagtgcagtggcgcgatctcggctcactgtaacctccttctcccaggttcaagtgatgctcctgcctcagcctcccaagtagctgggactattggtgcgggttaccacacccggctaattttttgtatttttagtagagacagggtttcaccatgtttgctaggatggtctcgatcttctgacctcgtgatctgcctgccttggcctcccaaagtgctgggattacaggcgtgagccactgcacctggccagaagtgatattaactatcttatatgtatatttctgttgcgggaagtcaggggccccaaacggagggaccggctggagctgtggcagaggaacgtaaattgtgattatttcatggacacttaccagttcccaaataatattcttataatttcttacacctgtctttaatctcttaatcctgttatcttcgtaagctgaggatgtacctcacctcagggccactatgataattgtgttaactgtacaaattgattgtaaaacgtgtgtttgaacaatatgaaatcagtgcaccttgaacagaataacagcaattttagggaacaagggaagacaaccataaggtctgactgcctgtggggttgggcaaaatagagccatatttttcttctttgcagagagcctataaacggacatgcaagtagggaagatatcgctaaattcttttcctagcaaggaattttaataatactctggagaaggaatgcattccttggaggaggtctatagggcatgtctgtcttatgctgttgacataaggactgaaatacaccctggtctcctgcagtaccctcaggcttattagggtggggaaaaaaccccaccctggtaaatttgaggtcagatcagttttctgctctcaaaccctgttttctgttgtttaagatgtttatcaagacaatttgtgcaccgctgaacatagactcttatcagtaattttgcttttgccttttgccttgtgatctttgttggacccttatcaggagtttctgattttgcccttgtcctgtttcctcagaagcatgtgatctttgttctcctttttgccctttgaggcatgtgatctttgtgacctactcactgttcttaggccccctccccttttgaaatccttaataaacacttgcttattttgcagctcaggtgggcatcacggtcctaccgatatatgtgaggcccagctgtgaaattcctctcttcgtactcttatttcttagccggctgacgcttatagaaaatagaaagaacctacattgaaatattgggggcaggttcccctgatatatttccttagtgacattcctgcaatctcctttagaaagtctttctgttcaccttctataaccagggaaggagagattgagaagagacgaaggatgattttatgtttttcagtcccagtcattatttgatgagaaactgatattacaagctttaaaaactcaagatatgtattcaacatgtagtagtagaacaagtatcttagtttaatagtctataaatttttgatgcactataatatattattgtagtcagtagcatcaaaattttaatgtgatattgcagtatgtttatggttagtttagacatgaggacagtgctaaaggagaaaatctaatgactgtgttgtttgttttgtcaaaatatgctgcctagctccagagtttcctattttggagaagcagaactggttgattcatcttcattatatccggaaagattatgaagcctgcaaggtaagagattgccataataataaaaatgagaggcaggatgttgggtaggcaactaacagtgcctgctaaacagagtgtggcagtttatatctcagtgataaaacatgaattccttcttccccatacttcatacactggttatcttttgctatggtagtgatgtttaacatacaacctcaatatttcagtggcccccaacaaacaaatattaattgctcatgggctttcagatcagctgtgggttggctgggtttgactgcaggctgtgggtcaggtttaggtgtgttccatgtgtcttctcatgtcaagagcaaacaactctcttggacatgttggtcttctggtggaggcagatgttcaactcagcatattaacttttttatctttggatagatgaaaaatggtattttgtcgagtttttttttttttttttttttttttgagatggagtctcactgtcacctaggctggagtgcagtggcatgatcttggctcattgcagcctttgtctcccaggttcaagcaattcttctgcctcagcctccccagtagatgggactacagatgagtgtcaccatgcccagctaattttttgtatttttagtagagatggggtttcaccatattggccaggctggtctcgaactcctgaccttgtgatctgcccgccttggcctcccaaagtgctgggattacaggcgtgagccaccgtgcccagccctgagttttattttttaatttctctcttactgcaaggttgatcatcatgtgtatatttaaaaaccatttgtatttccctttctctgtatctttggtgacataccatatgtgttacaaacttgcaggcagacagtggtagtactaacatgcagaatgtatccttggtgtcatcttttttggtatccagagctttgtgacccatctaaggtttttaatttatacccatggcatttatacctatggcaatgcacagaactaattcatactggtatgacaaagattcataccagtttttttttttctttttttaagtggagttttgctcttattgcccaggctagagtgcagtggcgcaatctcggctcactgcaacccccgctttccagtttcaagcaattctcctgcctcagcctcccaagtcgctgggattacaggtgcccgccaccatgcccagctaatttttttttttttttttgtatttctagtagaggtggagtttcaccatgttggtcaggctggtctcaaactgctgacctcgtaatccacctgcctcagcctcccaaagtgctgggattacaggcgtgagccaccgcacccggcccataccagttttttttgacaccgctgatccgaaggcagataccagtatgaatctttttttttttgagatggagttttgctcttgtcgccaagggtggagtgcaatggcgtgacctcggctcaccacaacctccgcctcctgggttcaagcgattgtcctgcctcagcctcctgagtagctgggattacaggcatgtgccaccacgcctggctaattttttgtgtttttagtagagatggggtttttccatgttggtcaggctggtctcaaactcccgacctcaggtgatctgcccgcttcggccacccaaagtgctgggattacatgcgtgagccaccgcgcctggccaccagtatgaatcttgaaaggttctctttctttttcatctgtgataatacttggaaatcttatcacacttttcttagcttgcctagttagattttagacaggggttggcaaactttttctgtaatgggccaacaatattttagggtttgtaggccacatacagtctctacatcatatttgttatcttattttttataaccctttagaaataaaaaaaccactgttagcttgagagctgtacaaaaatatacagggcctgtaagccctgtagtttgcaaatccctgttctagaagaagtaatcacaacaagggagttgaaattttaagaaactgaatgaactaatactttactaggcattattaatactctaggtttttttacatatgattcttgtccacgtctgctttttcattactatttgttttcttttttttttcagacagagtctcactctgttgcccaggctggagtgcagtggcgctatcttggctcactgcaacctccgcctcctgggttcaagcgattctccttcctcagcctcctgagtagctgggattacagacacgcaccactactgcccggctaatttttgtatttttagtagagatggggtttcaccatattggttaggctgatcttgaactcctgacctcataatctgcctgccttggtctcccaaagttttgggattacaagcatgagccaccgcacctggcctgtccatgtccactttttcttaaagacacctgaagaaacttaaccactgctcagaagcatttttctccctctttcaggctgttatcaaagaacagcttcaagagactcagggattgtgtgaatatgctatctatgtccaaggtaagacacatacttcttgtcttcttgctagagaaatacacttttcctaggttcttgaaaaagatcaggcaattgaagaaacaagttcaagtacagtcatgcaccacttaacaatggagatatgttctaagaaatgtgttgttaggcaattttgtcattgtgtgaacattacatggagtgtacttacacaaacatagatggatgatatagtgtactatacacatgatatagtctgttgctcccaggctacaaacctgtatgagcaggtgttataccgaatactgtaggcagttgtaaaacagtggtaagtgtatctaaacatagaaaaggtactgtaaaaatatggtataaaagataaaaaatagtatacctgtatagagtacttaccatggatggactggaagttgctctgggtgagttagtggtgagtgaatgtgaaggtctaggacattattgtatactaatgtagactttatgttgtatactaatgtagactttataaacactgtacacttagcctacactaaatttatttaaaaatattttttctacaatgataaattaactttagcttactataactttttactttataaactttaaaactttttggctcttttggggtaatacttaaaacacacaacaacattgtacatttgtacaaaaatagtttctttaggtccttattctataagcttttttctttttctttcttttttttttttggtagagagacagagtctcactttgttgcccaggctggtcttgaactcctgggctcaagcagttctcctgcctcagcctctcaaagtgctgggattataggcatgagctacgacacctggccctttatgctattcttaaaactttttatttttttacttttaaacttttttgttaaaaactacgatacacacactactacagtggtggtactaacatgtggaatgtgtccttgctgtcttttttggcattcagagctttgtgacccatctaaggtctttgtgacacacacacacacacacacacacacacacacacacgcacacgcacgcacgcactggtctaggcctacactgagtcaagattataaatatcactgtcttccacctccttatggaaggtcttcagtggcaataacatacatggagctgtcatctcctataacaataggaataccttctggaatacctcctgaaggatctgcctgaggcagttattcttttttttagtaagtggaaggagtacactctaaaataaagattaaaatgtatagcgtagtaaatacataaaccagtaatgtagtcatttattatcaagtattaagttctatatatatgtaattgtatatgctgtacttctatgtgactggcagcacagtaggtttgtttataccagcatcactacagataggtaagtaatgcattgcactgttttgattgctatgacgtcactgggcaataggaatttttcctcttcattataatcttaagtgatcatcatcatttatacagctgtcgaccaaaatgtcattacaggtgcatgagtttaaatgttccagaaaggttttattcagtattaatctttttatggaatctgaatataattactgtgttggatttgacttcagaaatgactagtaatgttaaaaaattgctatgattacccattttttagtttctggctagtgttttttggaatggatgcttaggattcctgcctaatgcagtgatttcagggccaaaagatgcttttggaaggattgcttgtaatcaagctaaaagagatgaagaagagcttgaggatttctgtaaggtgaatcaggatgaggggaagaagcctggaaataaacaagataaagcagagcataaattcagctcattagaaaccaaagataaggaccactcacttactttttttttttttttttttttttgagacagagtcttgctctgttgcccaggctggagtgcagtggtgcgatcccagctcactgcaacctctgccttccaggttcaagcgatcctcctgcctcagcccccctattagctgggattacaggcacatgccaccatgtccagctagtttttgtatttttagtagagacaaggttttgccatattggccaggctggtctcgaactcctgacctcaggtgatccacctgccttggcctaccaaagtgctgggattacaggcatgaaccactgcacctggcccactgacttaaattttcctctttagtggcataagtagcattcttagtttttccaggaactttctttttgactcttgggtgtaaataaatggttttgtttaccattcattgcatttgtagtcttcagattaacatataattttctgacataattgttaagatattgacaaatttaggacatcatggcaaaaaatgctcttattcccagtgtcacaagtatcagactttcagtgcctgataaattcttctggaaacataggcctaggaaaaacctctggttctaattggttgttacactgacaactgaagtcttaaatgttactttatcctttgccagaatctccatgttgaatttgaggtattgattccatttgccccatttgggggttcgctctgaaaactatcagttggaagtaaattatgataaatgaagcatctgatggggaagccccaaaatgttgttaatgtgaagagtttgtgtgataatttgcaaaggaactgattatctatgtgatggatcctgggagtagagagagaagtaggtaggtttgagctaccttgctaaaagacagttgagcttgtcagcagttttggttgttgtttcagcctgtccaaagccatatctgattgttttaaggatacagttgtccaaaggatttacttgatgtggtttcccagttttctcttctccaatttttctgaccccaggctccattcttcccagaacatggttttacttttttttgtattttctgtttcttggcagcattgatatttcgcctagaaggaaatatccaagaatccctagaactcttccagacatgtgcagttcttagtcctcagagtgctgataacctcaagcaggtggccagatctttgtgagtattggcaacctggaggccctagggcactcacagagaacagtgtaaaatgcattcctaggtccagcctgctgctggcagctgcatcagcctgatacacaagtgggggaatggtttaataggtacagtgggattcactctgaagagcatggattaagtttgaaatttgagaaaatgagataactagtgttaaggaactaagcattttaaacactgtgcattctagtttgatgggggaccaatattgtttatcatgtaaatagagacaccttgtaccctaagtcttctaaacttattggcaatccttggaatttttctcatctactcttctaacacttagtatttgtcacacagtaagtttttagtaaggacagagagttcctgacttctgatggttcaacttacataatttttcaactttacaatgatgtaaaattgttatgtattcagtagaaactgtacttcaagtatccatacagccattccgtttttcattttcagtatagtattcagtaaattacatgagatattcagcattttattataaagttggcattgtgttagatggttttgcctaactgtcagcaaatgtagttaagaaagtggagataggaactccatggaacagagtaagtgttctgagcatgcttaagataggctaggctatctatgatgtctggtagagtagatgtattacatgcatttttgaattacagtgttttcaatttacaatgggtttactgggatgtaaccccatcataagttgaggagcatctctatttgttgagtgaatgtcctaaagattcctagatggaaagaatctcaagtgtttataaactactaggtactcccttttcagtcctttgttccatggagttcctatctcccctttcttagccacattgccattcatacctgtgttgtttttgcatagagcttggttttccctgtttctctctaaactcaggatccaatatcaaggaaagagacttagtcttggaaggaaaggatgtgtccctaatgggtgatgataaatgatggtagttactgcttaacatggtatatcattaggcttatttcttttttggtctgcatttatagtacattgtagaagaaaaattccacaagactctcactaaaattggtatagaatgagaccaaggccttggaacagctgccagtgcaatccctactaagagagcttctgctgttagtgtatagcagcttcactgaccaaaccagcacaaccacctcatagagaaaaggcttctagaattctctgctggatgaaatatgattaaaatgtgggactagtagggttagtcttctaagaattttgaggtaataattatggaaaatatatcttttacagatttcttttgggaaaacataaagctgccattgaagtatataatgaagcagctaaactcaaccagaaagattgggtaagtagagaactttcagttctttcttattagtaaacttgctaatggttccatttatcatctggctgtcttatttctgaattcttacattccaaaaatgtcttgattttaacctcatacttaattcatgatttgtataagtataggatcaaaaaccatgtttcctcataactttgcaggcattgctgcatgattttctagcagtttgctgacgagcagtctcttaccagtctgattcttgttgatgacccctagaagctttgggtatttttttcgtcattggaattccacagtatcagcaataggcatctagttgtgtttcatgtctttttcccgtccccatctgtgtgacattcaattgactctttcattctgaagacccttgcctttctttgggtcagggcctttgagtagttctttatttttcccctccccttctctttgtgtcaattgaggattgtgtgtaaatgcaacagaaaatttgactaaacattggctttacaaattcgtttttgtttttttttttaattctcatgaaacaagatgtccaggtaagtagttgctggcattgatttggtggtcctaggatgtcaagactgagagtttttcctcatggttacaagaagactgctgcatccagcatcatatctgcattctagggaggcagaaagagaaagcaacaaggagaaaaggacagagcctatactgggaaagcacaactttcccagaagtcccccacagacttccacttatgtcatatcagctccccttctataaggaaggctggttaaatgtcgtttttaatctggtcacactgccactctaaacaaaattagggttcttttagtaaggaaaaagagaagagtaggtagcaggtaggcaagtagataactagcagcatctgccacactgttttccattctctatgagagatgttctctaactattctctacaactcttaacttgcctctcattttctacctctgtgtccttttctttgtgtgtggtgcgggggggtacagaggctcactctgttgcccaggctggagtgcagtggcgtgatctcggctcactgcaacctctttcttccaggttcaagtgattctcctgtctcagcctcctgagtagctgggattacaggcgcctgccaccatgcccggctaatttttgtatttttggtagagacggggtttcaccatgttggctaggctggtctccaactcctgacctcaggtgattcacctgccttgtcctcccaaagtgttgggattataggtgtgagacaccacgcctgaccctccttgtcattttattatatgttcaggacatgtattcagtcttatcttccatatcatcatttttgtttttagctatttgtattctgttatataccctatccatccaatattttttatttcatttccttttattgtatttttaatttccaaaaatcttgtcttttcttcaatgtctctgattcttgaagttcttttctgcttctcagaattatctttttcttcctctctgcattttggttcttctattttatgctgttggtatttttcaagtatttggtgattctcagagagacattcatatctgtgagtgaagaactagatttattagtacagagaattagcatggatttcctttgcagttcttacggggcactattatttttgaagtgtgttcaatttgttagtcgcttttcttctgtacatcggaagattgagttgagtctttatgccatggagtatgttatagctaacagccagagtgaaactacagatgaagaaaaattcatgtacttttcattcagtcggtttttcaaaaaatgagtatgtctgctatatgccaagcactgatctatgccctggagatgcaaagatggactgttggattataagatactcaactagaataggaaatgaaggaagaagagcaaggtttggaagaaggtgatggtaagaaatcagagttaaatcctgtctttcagaggattttggatatgataagttttaggttctgaggggatatctaaattgagatgtgtccagtaggattggatatagaaatctgaaactcaagtgttttggagtagagatgtgaattctggagtcagcaacataaaggtggtaattgaaaccattagattggttgacattaccctgcaatgagctgaggatgggaccctggaaaaaaagagttttttactttttttttgtctgtttgagacggcacaggaaaagttactgctttaatgcagggaggaagccctgcattctctatgggggccaggatcatgggggtggccagtgccacaaatggtcaccatacaggccagggaggagccagggcccaccaataatccctggaacatccctggatgctagcagttttttactttctaaatttttttttttttttttaagagacaaggttgcctaggctggagtatagtggggtgatcatagcttactgtaacctccaactcctgggctcaagtgatcctcctgcctctgcctcctgagtagctggggctacaggtgcaagccaccatgcctggctaaatttattttgtggaaatgaggtctcatgttacccaggctggtctcaagctcctgtcctcaagtgatcctcctgctttagcttcccagagtgctgggattacaggtgtgagccatcaaaaagcaattttgaaggactgagcagaagaagagaacccatagagggagatagggaagaggtaaagcaggagagctcagggtcacagggggaatggaacgtatttcttaatctatccagttggttgaaagagctcatttggtattactgactcacttgggataaccatcccattgttactagtagatgtgatcattcacaaaacagccattctttttttttttttttgttgagacagagtctcattctgtcacctaggctagagtgcagtggctcaatcttggctcactgcaacctctgcctcctgggttcaagcgattctcctcccccagcctcctgagtagctgggatttacaggcacccgccaccatgcccagctaatttttgtatttttagtagagatgaggtttcaccatgttggtcaggctggtctcgagctcctgacgttgtgatccgcccaccttggcctcccaaagtgctgagactacaggtgtgagccaccaccttttttttttttaactttaaaatttttctttaaaattttccccttcatggcatttttattttctttttagaatattttaatgattttgaattttacttttattaatagcccttacctaccctacatatttcataagtacctgtagaaaaccttatagtagctggagcatggtggctcatacctgtaataccagcactttaaaaggatgctgagtggggaggatcacttgagcccaggagtctgagaccagcctgggcaacatagagacccagtttctaggaaaaaaaaataaaaattagtggtcgtgtgcacctgtagtcctagctattctagaggctgaggtaggaggatcacgttagcccaggaggttgaggctgcagtgatgcggtgaactgtgattgtgtcactgcacttcagcatggaaagcagagcaagaccctgtctcaaaaaaaaaaaaaaaaaagaaacaaccttgtagccctactttcttggactcatcagggtattccacagtcttgctgcaacaggggaatagtaattcctcctgccattatcttagttgacttttggaacagttctgttaagtagggagaatttcccccattgacaagtgaggaagctaaggctttggaagatggaagttgctacagtgaggtagttgctgagccagaactggaattcagacctgtgatctaggatgatctaagattcctcgtcttaagactgtgatcttttccactgtaccaactgcctttgcaggatgtctgctgggttcccttacctcctgaaagataggatttgactctgatttgttctgttgccctttccaaatttcttttgcagttagtttgttaaaggtatattgctgccttctcaactatctatgtcaaagattttaaaaggtcagaggttagccttcaggacatctatttacttacctaccttaacaattcctactgtagagcaggacatttaaaggacaagaaaggctttatttctgccttgtctctctccatgcatgcattcttatagcatgacaaagttggcagtatacaagttttggaagcaggcctgagttcaaatcccaatgttctataatatggacatgatttgtgattgaataaaaaaaatttttaaatgtgcggcatttgtgagataattggaaattttaacgtaattgaatatctaatatcaagcagtcactactttttttcgagtgtgacgatgtgggtagtttaagaaaaaggccttatcttttagaaataaatacggaaacatttgtggataaaacgttgggctgttatttgcttacaaaagttgtgggagtagatggggtgtggattggatggttgttgggacaggatgattagtacctaattctgtctgcacttacgtatgattgaaattctccctaggatgtagaactaaaaaagaaaaaaaaaatcccaatactctctgtcttaagttaggtaatctactcaacctctctgagcttcaatttccttatctgtaaaattggaaagattataactatgttgcaggtttgctgaaaattaaagtaacatatatgaaaacatctggcataaagcctgatgttagtaggtgctcaaccaatggttgctgttttgttgtttttactatttttggagacttggaaaacattaaatcagttgttatctctgagcctgggggtccatgtttcctcagacagggacacatctccactactaatagggtagttcttactatgtttcccaagagcattttccttacccttgctttctccttttccaaagctaccttaaataaagggaggtttattataaaggaatttgagagtccataaaacagtatcaagagatgcaggttggtcttttagtgaagcagaactggaacgcttcagcatccaaggtagctactctgccttttctgcttcatcttttctttctgtagatcaaaggttggcaaactttttttgtaaagggccagttaataaatattttaatttgtatagcttcatacagactctgttgcaacgacttaactctgcagttctaatgcaaaagagccatacaaaaacaatagttgtgtctgtgttccaatgaatctgtacttataaaaaagggcagggaatggatttggcccatggaccatagttttcccatgtcagctctagacttctgcagatggctccaattacatgtattccatcacagcagactccaggtggcgctgtcagtcctcaagttcacatcacctagtaaatttagtacttgtaactaactagctctcttccaattccagattcctagggaaaggacttcagttgtgtcaggtgtcactatccaactgtgttgccttaagggcggaaatgtgtggctagcagccctctcagcaggggctgtgggtagtctctcctgagaagaaggagcaaagggtatgggtgatgggcaactcttaaagaaaaaaggtatggggatgggctgggtatgtgccccagggttccccatagatccaggaagatcacctgtttattctgcttttatttcttataatctgtatttttttatgttgaggaacttatttttaacaattaatttgagtatgaactctaataaaaagctgactgtaatgcatagtttaaagtttaaaccttgccgagcaataacaatctctagatgtctgttgtttcactctaatacttactgtggaattacacctgagttgttttccttcttttttatgagcctaggagatcagccataacctaggagtttgctacatatacctgaagcagttcaacaaggtaatttatagaagtggtgatagatttcactgagggtgcacttgttgcagaagttgttacattgctcatttggtattatccctagtgcttgcagaggtttttggaactgaaaattgaaagtacctttatacatttttttctgttttaattctcacttgtcattattcatctgttgttttctgcttgtaataagaacatggaaagttctagaaatatgagggaatggcagtttttctcctttcttctttttctctacctccagttaaatttcccagtttagaaacagatgcttaataaaacatacatatcaaaaagtggacccttaagtcttaaaggtgtgatcatgaccatgtgagctatctccatgccctgacggcaacttagtttttagggtcattgaaaataaattttaaattttaagtggatctgatttctgagttttcagttttaattttatagttattttccatgatgagaaattatatttcactgtgattaagctatagactcctatatcagagaagacaagttgagcttacctcaaatttggtactcaggtaagaaaaagtatatatcataattgaggagtagacaaaattactgagagctctaaaacttagtgatgagagcgttgggtagtttccttcatagagctcacagttagtgattgtgaagttttattctcctttctccgatgccaccaggactgagaatctgaattggttagtacccatttgacaatgtttagtttgtgtcaatttgcagactggtgtaactagtatcccacactggtgtgaaaaaaaatatgcacattagcagttggggtgtaaaagtaacttttctcctgagataacaatatatatacataaaatacatttagtgggccccttaggttttgtagatggatctatagttttatatacttggttaggagatttttctcttcagagacaatttcaaacaggcacatttctattcacaggattattctgagtcaggggaaaagaaggatttgtctttggttggatctgtgctgagaagaaatatatttagattttactgtacagctaacaggctaggcaaatacaatacctggcatttatataaatgcttgttgaatctgtgaatgactaaacaaagcccttttgtttactaggagaaggtaagctcctccagagcaaggagttggttttataaactcaaatatatttagcatctagaacagcaagcagttgggtgaataaatgagaacaatctatttattcatttatcatcacattgatggggaaacctggcccaccatagggaaggttgtgcacttggtcagtgttacagctgggatttagtttagtgtagtactctacactgtactatgatggcccttttgacttatgaagtatgagtcataggtgtgaatatcaggcagaaaacattcagaaagattaatcgtcttgtataaattcttccaagtggctccagaagcagatatcccatgttgccagctgtcttttcaacaaggacagttttggtatgttttggtctttgggtagtgggggctgtttgctgaaatgtgatgttcctatgtcaatacagcagaaagtgtctttacattagccatataaaggtatagttcgttcagtggtagtgatttggttttctttattttgttaaacttgtcaggcacaagaccagttgcacaatgccctgaatcttaataggcacgatctgacttatataatgctggggaagatccacttgctggagggagacttggacaaggccattgaagtctacaagaaagcagtggagtaagtgtatctgtttcctttaaaacagtgagaaactaaaaaaattgagtggatatgtgaactcccaagcctaaaagagtgaatatgtttgattaattacttactgtatgagttaaaggttaagctgaagtttaagagctcccagtagcttcaataaggtagactgtgtttctttcttacctataaggatgactgctgctttaggttagctgggcagctctattctacaaggtcagccagggatccaggtttcttccttattaactcaccattccttaggctgttgtctttacctgcatggttgatgctgaatgtaacatccacatccaggctgtggtggaaggagatggtttgggaagctaagcatggaataagcatctggctatatatatatatatatatagagagagagagagagagagagagagacatgatcttactccatcactcaggctggagtgcagtggagaacacagctcactgcagcctcaacctcttgggctaaagcaatcttcctacctcagcctcccaagtagttgggactacaggcatgtgccaccatgcccagctaatttaaaaaaaaaaactgtttttgtgttgacagggtcttgctgtgttgcccaggctggtcttaaacttctgggctcaagcgatcctcctgcctcagccttccaaagtgctggaattacaggtgtgagccactgcacctggccttggtaataagttttaaatgacccagaaattgcacacatcgttcctgcttacattccatggttcaaaactacatgatagttacaagggaagtgggcagacatgcactcaagaagaaggaaataacagatttaagagttggccgacagtctgccattttggtatcatatgttaataacagatcttctgttttcagagatattattagggacagaaatctcctgattcagtaaaaaacaaaacaaaacaaaacaaaacatttggccttattagcatgagaccagtatcttttttcccccttccccattttcccttccccttccccgttttccccttccctttccccgttttcccttcccccttttctcttccccctttccctttcccccttcccccttcccccttcctcttccccttcctccttccctcttcccccatcccccttcccccatccccctttccccatccccctttccccatccccctttccccatccccctttccccatccccctttccccatccccctttccccatccccctttccccatcccccttccccctttccccttccccctttccccttcctcctttcccttccccctttccccttttcccatctcccttcccctttcccctccctctctcccttccttcctttttctctcttttctttccatcctttccctccctcccattcccatctttctttgtttctttcttttcttcctttcttccttcctttctttccttcctttcatttatttcaacagtctcgctctgtcgcccaggggtgagtgcagtggcgcgatctcgcctcactgcaacctctgcctcctgggttcaagcgattctcatgcctcagcctcctgagtagctgggactgcacgagcacgccaccacccctggctaatgtttgtatttttagcagagacagggtttcaccatgttggtcaggctggtctcgaattcctggcctcaagtgatctgcttgccttggtctcccatagtgctgggattgcaggcgtgaaccactgcgcccagccttgtgttgttacttttaaatgggatagctgtagcaaaatgccttgtctcatttgtttggtcccttaatagaatgtctggtctgtggttcaaggcttattattcctaataattagattctgaactaaacttagatttctattaatttgttaatcatctttgtcttctaccatggtagtaaattttctggttatatcagtcacagcactgctttctgaattttcttcaaccatattttgtgtctaaaacagaaaaatcccttggtttgttaagctacagaacagacttttgtcatcaagaggctgtatatttgggcaagtagtaaggagccatgtaacatgttcagtgcctctgtggtgctaggtagtagccctgatccctgacccctgccttctagaggttagctctttgagaatagcatacataaatcccaaggggaacattcttccagtaactgatcaaggactttggtcactaaatttcctaagggagaaatgtggacagctaaaatctgaagccttactgagaagatagagaccattgttcatgacctacagctttgaagagagtagtcatgttgtagtggggaagccaatattgctagaattacagaagttacctggctttggggagggaagtgatcaaagtggatgtttattatggcagaaagtgaaaggcggattcccagttgaattgagaaagctctgtttggtcagctcaggcctcccctggctggggctttgcatcttctggttcaggtcttcctataggtaaccagtgccctatatcattccttagaagcagaagacattgttcatagccctttggtgttttactgttgaaactgtctgatgatcctatggtcagatcatctcaactcagtgttgccttggttttgtgacaaagacaaatactagtgagggattgagcaggcaatccctgatgtgagtattttacttacatcagtgtttactcccaaaggtcagtagcaccttctttcctaggattggtatgtatcttccttcttttgtttagtttggctacttggtatagctctttgtttaagtggagagaacagcattaggggccttgggatcctaaattacatagaaaattatgctgcctggcattgtgagcacaatgaggatagaaaaaaaattccacaagagaggactggtgaaactgtgtgtgttctaggctgacttggtttataaagcattgttctttaattttatcagtgtgaccaagacagtcatgcaaaacattctataggttctttcttaggacttttaccctaagaaaggaatctgaattctaagcctcatttttcttgctgagcagttctccttatcaccagggttgagatgacctacttttgatggcaattcccaaattgccttcaggtatttccacggggaggaagaggctcagtggggtctgtcaagtattgcacgagggcatattactgtgcatgtgtcttcgtgtttctcatctacatcttgtttccctctgagcatctctatgttgcaggttctcaccagaaaatacagagcttcttacaactttaggattactctacttacaggtaatgaaaactctgtactcattcatgcactgatgttagaaatggttttgggtttgtgtgtatggtggttttcctgcattctgatatttattttattaaaggtcatataaagttcatgaactacactctctctattcgatactctttgctaaaggaattaattttctgcatttaaattggaagcaattctattttagcctagtgcaattataattcttatctaggctgggtgtggtctcatgcctgtaatcccagcaatttgggaggctgaggctggtggatcacttgagctcaggagttggagaccagcctgggtaacatagtgagaccctgtctctacaaaaaataaaaaaattagccaggcatggtggcatgcttctgtagtcccagctacttgggaggctgtgatgggaagattgcttgaactcggaaggcagaggttgcagtgagctgagattgagtcactgcactccatcctgggtgacagagccagatcctgtctcagaaaaaaaaaaaaattcttatgctatccaggaaagagcatatatgagaaataactctggtcttggaggctgttattttgttgtgaggagagaaacagatacaagtgagcacttagggctttggggcaaagccatttcttttgatctttcttcccagccagagtcttattggaaagagagaaggcaaagtatacttttatctagaataagaagttttctgtcccctcaacattcctgaatgtgaatgggattcttttagctccattgattctctggctgaggacccagggcccaggtatccaaggggcttttccctcttccccaatatacacatttgccaagttccttggtcagctgattctgcctccagccctgcctctgtggtggcctttatgtctatttcatttttctttaaaaggaatcaggagcttaaccctgggtcttcctgggctttggcttgggaggttggctccacgggagatgaggatacccagctcatttcctgcaaagaggcattaatgtggaacagtactagtgtggcagagatggttcttatcaaatagatactttgaccttatcaggtgacaaattaacaaaaatagaaggaaaaccatgactggggatttttagttttctttctttattatctggtaactgtagctgctttttttttttttttttttttttttaaagtcaagagaactcaaaaaagccagagcatttctgttctgggtgaggttggccagactgtttttttttttttttttttggagacggagtttcactctttttgcctaggctagagtgcaatggcgtgatctcggctcactgcaacctctgcctcctgggttcaagcgattctcctgcctcagcctcccaagtagctgggattacaggcatgtgccaccatgcctgggtaattttgtatttttagtagagatggggtttctccatgttggtcaggctggtctcgaactcctgacctcaggtgatccacccaccttagcctcccaaagtgctgggattataggcattagccaccacgcctggtctggccagactcttttaactgccgtctccttgctgatgtaaattgtcttgtttgctttttttccaagctcggcatttaccagaaggcatttgaacatcttggcaatgcactgacttatgaccctaccaactacaaggtattacaggctgtgaaggctctggccttcatatagacggtcccactgctcctagaggtgatctgaccctggaaagcaaaggaatagcttcttaaatttggatacctgagaaatagaaaaaatataaataaaaggtggctcttcttatttgaaaatagtgtcaagtatgctctacttatcttctaaaagtgcacatttgttataatagacgtgtaacccctgcagaaggcagatcatagtgctagtaaagcttatgtgttacttaggaaattagcaatgcctccacaactattgtcaaaaataaatctgcggcccggcgcggtggctcacgcctgtaatcccagcactttgggaggctgaggtgggcagatcacgaggtcaggagatcgagaccatcctggctaacacagtgaaaccccgtctctactaaaaatacaaaaaaattagccgggcgtggtggcgggcgcctgtagtcccagctcctcgggaggctgaggcaggagaatggcgtgaacccgggaggcagagcttgcagtgagctgagatcacgcgccactgcactccagcctgggtgacagagcgagactctgtctcaaaaaaaaaaaaaataaaaaataaaaaaaataaatctgctgggcatggtggcttatgcctgtaatcccagcactttggaatgctgaggcaggaggatcacttgaggccaggagttcaagaccaggctgggccacatagtgagacccccatttctacaaaaaaaattatccaggcatggtggcacacacctgtagtcctagccactcggaaggtggaagagggaagatcacttgagcccaggagtttgagtctacagtgggctatgatggcaccactatactccagcctgggtgacagagaccctgtctctaaaaagaaacaataattatgttgaaatgacttctagagtcctaatgatttgatactacaactttttttctagatgtgactttgggaatgagaaggaatagcatcaaatggatgaacatcattgaggagatgcagcaagacaagctgtttattaaaggatacaaactgaattctgatttaggaagtaacattagactgtcagctcccaccttgatacctttccttagagaaatgaaagggctgggctgatgaagcctaaagctgactcgccctctgttctacggtagaaagaaatttaccttaagtagccacgtacaggtgtatttcaggtatctagaacacttggtataccaaataggggctgcagagaacagattaaaggaagtttttacttaaagggctctggtattcattctgaaatactgactttcctggctagaagtaggaaacagatgggtaaagcaagtaacattttatctttttttttttttttttttttttttttttttgtgctgtgccagagagccacagtgtagagtgcaaggacattcctcaggaacatttgtcccaataggttggatatatttatgtccctggaagaaattttccagtcccatctatgctgatgggcctgctgagtatagactcaggaaagctgccccactgctacagccttttgggaatgactgaatgactttctctgtgccatgttttcaggccatcttggcagcaggcagcatgatgcagacccacggggactttgatgttgccctcaccaaatacagagttgtggcttgtgctgttccagaaagtcctccactctggaataacattggaatgtgtttctttggcaagaagaaatatgtggcggtgagtgtcccctcatgttctttgtttgtatttctacatgtggttattgggtctgtttagcttgcccttctcattgagtgccccttctctctcataggccatcagctgcctgaaacgagccaactacttggcaccctttgattggaagattctgtataatttgggccttgtccatttgaccatgcagcagtatgcatcagcttttcattttctcagtgcggccatcaacttccagccaaagatgggggagctctacatgctcttggcaggtaagaaacatttatgtggaaaactctctctgccatctgtaatgagggaaaaatggattagaatcatagaagatcagtggctgtctcataggagccattcccttagagatcctgtaggaatctggattactgtcctggagcttgaagaaatagaaaaagatgacaaaggaacttggttgtttctaacttgggggagtttgactcagagaccaacaggttaaataaagatcatccctagttcaccttttaccagttttttcctcttgccttgacaattcatttatgtatatattgagtccaactaagttccagacagcaagtgttaagagcttgggttttaggtagggtcctgcctctactacttattatatgtacctagggctgatgtgaggattgcatgattaagctctcaattaataatactggttttgttgaaatactgatttttgaaaactgttggttttactgtggttatataattggtctattattatcaatattgttgttactataattggcccctaggtgatacttccaagtcaagctaccttatgttgaaacccttatctcttctgagcatgttatatagaatgccattctcttcctgaaactccattttatgccatgcaaatactaaaattgatcataaaaataagttaaaattaatcaaacactttaacaattatgcacaaccattttaaagtactgactagtctttctaggaatttttttctccatatacatttacttactaaatgtaagacccaaagcagatttccatgtcctcatttggcagtcgtcttccagtggctttttgttcattactgtgggttcttatttaaaagagaaagcttgcaaaagcaattgtggttatttgagggttgcctgaatacaaagataactttaaaaaaaaaacataggttttattattattcagatatggtatgggcaacagatcagaagacatctgccactggaaagatagtctgttacaattcctgagaaggagggcatgctacaccgtgcagggccacatggggaagcaccaggtcaatcaggaggtagagggagcaaggggtaaatgtgggcacaattctttattgtagttttcatgggtagaaatgccctccccggggcaagaccgggaaagcaggttaaccaggttggggattggccagtttgaataatttcagtgggctctgggctatagggctgtctctaggtgtctggtacctgaccctcgggtgactaggactagggaatattggcccagtgtcagggcccagtaaaggaggcagttaagaatatgaacactgggttggtcggtctgcatacagaaggtactcttgtaggggttatatctaggaattagctgactgtgggagggacagtctccccagggtcagtaaggccccagatgtcaaaacatcagaataaaaaggctaaagtggggtgtgatggtacatacctgtagtgctggctacttgggaggctaaggcaggaagtttgcttaagcccaggagttgggagtacagcctgggcaacacagtgagactccattcctctctctttttttaaaaattttattttaggttcaggggtacatgtgcatcctgttacacaggcacgtgtgtcatggggattagttgtacagattatttcatcacccaggtactaagcctagtacccaatagttatttttttctggccctccccctcctccagtaagctccagtgtctgtttccctctgtgtctccatgtgttctcatcatttagctcttatagtgagaacatgcaggatttggttttctatcctttattaatttgctaaggatggtggcctccagctccatctatgttgctgcaaaggacacgatcttgttcttttgtatggctgtgtcgtattccatggtgtacatttacattttgtttatccagtctaccattgatgggcatttaggttgatttcacatctttgctattgtgaatagtgctgcattgaacacacacatgcatgtgtctttatggcagaacgatttacattcctttgggcatatacccagtaatgggattgctgggtcgaagggtagttgtatttttagctctttggggaattgccagattgctttccacaatggttgaactaatttacactcccatcaacagtgtataagcattcccttttctctgcagcctcaccaggatgttatattttgagtttttaataatagccattttgactggtgtgagatggttatctcactgtggtttcaatttgcatttctctaatcagtgatagagtttttcatatgcttgttggctgcatacatgacttcttttgaagtgtctgtttatgtcctttgcccattttaatgggattgtattcttcttgtaaatttgcttaagttccttatagatcctggatattagacctgcatggtttgcaaatattttctcccattttgtacattgtctgtttactgtgttgatagtttctttagatagctgggttctaatggaacacagaaatgtaaacagccataatgtaagagataacagcgatgctaactttacaaagtagagatggcattcaaactggatcctgaacaacaagctaaaatggaatagcacagaatggctgaggagccactgtgaagaaaggcatgcagccatgaaactgcagtgtcccttgctgttagtgggggttagtgttagagaatatgatgggagatgaatcaggaaagatattctggggtcagattatggaggtcatgcgtacagtgcaaggactttatcttagaggccatgtttgtccagctgtcttcctagatctcctcttaggtgcctggtaggagtgagtgcatagctggtggggaggtggaatgggcagggcttccagagcagctgtttttgttttatatattaggtgtcaaggaaatactgattttaaaaagtggggggagtgttttactgctaaatgaaagtgtaaagatcatggttatagatgtggggggccagtgaggattcctaagtaggatggtaatgtggtcagatttgtaaggcagtgagatacctggcagcgctgtggaaggtggaatggaggcaggtggggactttgacactggggaataaatggaaagcctaaaactacttgggcctgaacaagggcagtgtcagaaaagaaactgcaaaaaaaggatgcatagaacctggcaactgattgactgtagaagagatggttgaagatagcaccaggtatctaagctgacttagtaaactctggtgccatgagctgacagggtgaagtttactttgggggtagtctttaatactccttttgtcttctaagctgagctctccagctgcagtgctttctttgttgcagtggctctgaccaatctggaagatatagaaaatgccaagagagcctacgcagaagcagtccacctggataagtatgcactttgttgagaatggtactggcgggggttggactctccaaagccatgaggtggtgccatacatagcattggtgctgcctgtgtcagcccagctgttcctctatggcattagtacatagcagacctcagtgtggagggatgtgtctcctaagtatgtggtggctcagcaggaattgacactctgagaaaatgtttccagtcctaaactgagtaatcaggaggctagagaatgtcagaactggcagtgggcttgggttgctgatagctatgggctagctggaatatcagatgggactctgggctgtttaattcaagataaaacttgactcttccaggatttactccgctggcatcttctagacagcagggtagagatccctttttcaaccctggcctaggtagtctctgttgagggctgagatgccagatttggtcccaataccagctttgcttgttaggccattaactccttgattcttctccacaggtctgcttagcacgtatgtacctaccttgctgcataatggagaaatctctacttaaccagttttgttttgtttttgtgtaatgagaaggatctctaaatgaccatttgttgcagagcccccagctccatagaatctctgtctgccacaggtgtaaccctttagtaaacctgaactatgctgtgctgctgtacaaccagggcgagaagaagaacgccctggcccaatatcaggagatggagaagaaagtcagcctactcaaggacaatagctctctggaatttgactctgaggtatgtcttttattagctcccaagagtcataagtaagctctcaggagacttttaaaaatcaagcccagatcatccaaatccaaggtattacacgttcatggctgttctggctttgatgttcctagcagcatgagttcatcaattaataacagcctgagaaaaactttcctagaataataataaaaggaaattcaggcttactgagttgttattgctaattcaactcatcaaagttgaggtctgtgtctgtctgtagcttccttctatttcactttttttttttttttttttttgagacggaatctcgctctgttgcccaggctggagtgcaatggcgcaatctcagttcactgcaacctccgcctcctgggttcaagcaattctcctgcctcagccttccaagtagctgggactacaggcgcgtgccaccacgcccagctaatttttgtatttttagtagagacggggtttcaccatgttggccaggatggtcttgatctcttgacctcgtgatccacgtgcccagccctatttcacttgttgtaggaaatgcactgtttggcccggtaatgcaccaggcttgaattgttgggttttgagatcctatgtgaaccaccatgccatccagtaaaggcaatctgtaatctctactgtttgataagtacttcctgcctcaactgctagtacgaccagacactatttcagctaaaaccccagctcgaagaccaaagaagtgggttggcttgtctctgacagtcacgcttttgattcttttacttcctttgtggacacaagatggtggagatggctcagaagttgggagctgctctccaggttggggaggcactggtctggaccaaaccagttaaagatcccaaatcaaagcaccagaccacttcaaccagcaaacctgccagtttccagcagcctctgggctctaatcaagctctaggacaggcaatgtcttcagcagctgcatacaggacgctcccctcaggtaggaccatacagagctccatgaagacctggcaggtacaagccacatgtgtctgtcagcagagattatagctttcagtgaggttctcttcagactcatatgtccaacgtagtattggccacaaggggagaaaaaaaacacagggtggctaaattggcacttgtttccttaaggcgagctatgtagtaggtaacagctactcacagacttagttggatggtctatacactggtctttccaattttagcaatatgttattaagtatatcctgttatgcaatgtttaatttttactgctttatcagaagttgacacgtaaatatttttcagtgactcattgaaggcaaacttgactgttgctttatttctcagttatagtcttcccttatagttaatgggtcagtcccactggttccagaaaatatggggtttcctcttgaactctaacagcaaaaaagaatgatttcttctgaaattgtggaacatgaggattcaagtttttattttgttactaggtgctggaggaacatcccagttcacaaagcccccatctcttcctctggagccagagcctgcggtggaatcaagtccaactgaaacatcagaac

SEQ ID NO: 15481 - DNA, 36615 bp, Homo sapiens
gcagcggtgggctgagctaaaatggctgaggagagagtcgcgacggtgagcgccgagattctctttagttgcccggccgcagggcaaggcaagctggcgggtggcttttgtcccatgcagcggttcctggagagaggcggagctgggtgccgagcgtctcagggtgggcggggcgacacggtcccctttttactgtcccgggaactggtcgcctggggcaagtctggatacttagcagcacaggtcctgttctaggactgtagtccctcttggggtgcgctggacggagaagggagacttttcaccagtaatggctcttaccgtagtgccatctttttctgtctcgggggtttggaaggtaatgactagcacttgtgtagacagttcctgttaatcccgtgaattgggaatttaacatgcctggaagcttgcagcgtcactgccttctgccagtggagcgggactgtgttttttctgtggtgattaagtttaggaaagtacggttttggaattcatctgaaggctgagttgggcgttcactccacagaactgctaatatagaggaacccgatgaattcaggatgacctagtcgctattttttgaggcatatatctataattggatctaatttcggtaaagtgccaagtgtgaagctttgtttaccttgctttagtgttgggtttgaaagcctgttctgtccatttgttagaatgattttaggtattcggaatttattgtctttcgaaaaacgccctggaaaacagtacaaatagcagcctttggctgttttacaacttagttttggctaagcagcaaggttagtgttattgttagagggccttttgtttgttttctactctcatttgcagagtagtcatattattctagtctaattagaaaactctgaagacagaaacttttttttttgagacggagtgtcgctgttgtcggcccgggctggagtgcaatggcgcgatctcggctcactgcaacctccgcctcccaggttccagcaattctcctgcctcagcctccggattagctgagaatacaggcgcctgccaccacgcccggccgaaacatttttattaagctaagaaatttaaaatagctaggccggacgcggtgcatcacgcctgtaatcccagcactttgggaggccgagacgggtggatcacttgaggtcatgagtttgagaccatcctggccaacatggtgaaaccccgtctctactaaaaatacaaaaattagcggggcatcgtggcgctcgcctgtaatcccaggtacctggaaggctgaggcaggagaatcgcttgaaccccggaggcggaggttgcagtgagccgagatcatgccattgcactccagcatgagcgacagagacagactccttctcaaaaaaaaagaaagaaaaaacagattttaaaataattaaataggccaggctcagtggctcacgcctgtaatcctagcaccttgggaggctgaggtgggtggatcgcctgaggtcaggagttcgagaccagcctggccaacgtagtgaaaccctgtccctactaaaaaaatacaaaaaattagctggacgtggtggcgggcgctggtaatcccagctactagggaggctgaggcaggagaatcgcttagaacccaggaggcagaggttgcagtgagccgagatcgtgccatttcactgcagcctgggcatccagagcaaaactccgtctcagaaaaaaaaaaaaagtaaatagcatggttaatgttactgggttttaaatattaaaaacataggaaagaaaatacttccactccagcctgggtgacagagcaagactccgtctcaaaaaaaaaaaaaaaaaaaaaaagaaaatacttctaagtaatcttaaagtgtaaaagataatgggtaacataacattgctacaaatatagcttatcctctagtgctcatcacaagtgtttgtgtaatagaatatgaacttgagtctgtgacggcagaattgtcatgtacatttgaatgtctaatactgttttaaagagaatagcttttgtttcgatatgacttagcaattaagcctgaagttaactgttttcattgttgtcaaatttattgctagtagtgttacgtttatagtaattttcatcttttcaagttaccaatgcatggaaatgtgaatttctgtccttttaggaagtggtattttatcttttttttttttttttttttgagacggagtctcactttgtcgccctgtctggagtgcagtggcgtgatctcagctcagtggaacctctgcctcccgggttcaagtgatttttctgcctcagcctcccgagtagctggggttacaggccctcaccaccatgcctggcttatttttgtggagatggggtttcaccacgttggccaggctggtcttgaactcctgaccttgtgatctgcacgcctcggtctcccaaagtgttgggattacaggcgtgagccatggccccctgccttattttttaatacaattaaaagaacccagtaatcctactcctagacctgtgtcccacagaaaaaagtgttaaacatgagcgtgtagtactagggcattcgttgtagtactatccgtagtggcaaaacgctggaagcaaattaaatgcccattaatagggtaattgatgacttcagatatttccatactgtggaatattatgcagtcattaaaaagaatgttacaactaattgcttttcctctcagaagcccctctctctcactagagaaagctgttctcctttctttcttctgcctattaaacctccattcctaaactcagaaagaaaaaaaaaaaaagagaatgttacgactaattgacttggagggacttccatggtgtacatttaaataaaaggtagatgtgaagtggggtatattatgtgatcttaatttcataacacaaaggaaaacatatagatccgtagataaggatatatggatatggaggagagaaaaggaaaagactcaaaactcacagaatttttgaagaaatgtatagctaaaaatctaagaaggctacagtcaaggccttgaggccagaagacaccccatcaaaactgagtaaaactagcccagtgtgggacgcagaaattctagtatgctaccaaaattacttacggattgctaccagttccttagaaggaaaactgaggactaatatttgtattttcagtatagtttagaattcttaaaaaatgagcaaacaggctgtacttggtggctcatgcctgtaatgccaggacttgtggaaactgaggtgagaggataacttgagtccagaggtttgagaccagtctgggcaacatgttggagccccatttctacaaaaaacacaaaaattagccagacgtggtggcacgcgcctgtcttcccagctactggggaggatcatctgagcctgggggaagttgaggctccagtgagccatgatcatgccactggactccagcaggggcagagtgagactttgtctgaaaaaaacaaaaaatgaatgagcaactaactctggctttcatgatttgtgcttataaatctttttatttatttatttatttatttatttatttatttatttatttattttgagacggagtcttgctctgtcgcccaggctggagcgcagtggcgcgatctcggctcactgcaacctccgcctcccgggttcacgccattctccagcctgagcctccggagtagctgggactacaggcgcctgccaccacgcccagctaattttttgtatttttagtagagacggggtttcaccgtgttagccaggatggtttcaatctcctgaccttgtgatccgcccgactcagcctcccaaagtgctgggattacaggcgagccactgtacccagcctataaattttttttataatgccctgattcccattatttgatgtatttggataaatatgtcatcctgtaaattgaaggattaaactgataagagcagaaaacagaaattagtacactagttgatctggctcagatatagtgcctatgtatcaggtgctccatgaatatttgttggatgaataaatgatcataaaactatataaaaatgaagaaataacagaataaaataatttgttctatataaatcctatgaatgagattgagtgggctaatagaatcctttccatctcaaaatgttctggaaagtcttgagtaaaagactcatcaaaaaaataattctgctttgtgcagaaagaagggttgctgacctttgaaggtgctttttgagtctttaacattctttagtagtatattccccaaagttaagaaattctagttagattttaaaaaattgagttaacatttaaaaaacagttttgttgaggtataatacacgtaccataaaatttactcaatttaagtacaaagtttgatcagttttagtaaatttatatagttgcacagctgtcatcagaggctgcttttaaaacatgtccatcactccagaagggttcctgtgtcaatggaattgctgggttatattgtttaagtatttgtttaaaaaaacagaaacaaatctgcctaacttctgcaggctatatacgagttaacatttccatgagcaatgcatgagggttgtgatttttccacatccctgtcaacacttggtttgtcagtttgtttttatttagctgttgtagtggatgggtagtgatggtgtatggtggttttaatttgtatttccttcatgaataatgatattgaagattttttatatgtttattttccacccgtatctctttggtgaaatgtctttataaatttttgtgaatttttaaatcaagatcattaaccaaatgagcccctcatttgggctcaagtgatccttccacctcaacctcccgagtagctgggaccacaggtgcaggccacgcttggctaatttttgtatattttgtagaggcggggttttgccatgttgcccaggctggtcttaaactcctgaactcaagcaattggcctgcctcacataagtattctcttttattttgaggattaatttttgttgttgtgaaatatatcctacctgtaaaagagtgcttaaaatgtcgtatgtgtgctttaaaggataatataatggaaacttgtgttcctactgcccaggttaggaaatgggttattaataactttgaaacctcctaaatgcctctctcctactgcattttccttcctccacatcagatgtagtgtttcttcaattttatattaatattttgtactttttatagttttaccatatatgtttatatatatccttaatatattagtttttaaaatttgttattaaccttcagtttattcattatttcaacactgtatagtatcttattgtagtaaagtatgtcaattaacttatccattccactagatggagatcgggattatttctggtttttagttattaaaaacaatgctgctgctgggtgcagtggcttacgcctgtaatcctagcactttgggaggccgaggctgcggatcatgaggtcaagagatcgagatcatcctggccaacatggtgcaactccgtctctactaaaaatacaaaaattagcaggatgcggtgctgcgcgcctgtagtccctgctactcgggaggctgaggcgggagaatcacttgaacccaggaggcggaggttgcagtgagccgagattgtgccactgcacttcagcttggcagagcgagacttcgtctcaaaaaaaaaaaaaaaaaaagctgctataaatatggccaagactaaggaaaggtaagtgaggtgcttagggttcacattttatggagtaagagtaagtaccttcttaaggtttataccctaggttcttcacatgcctcactttagtcctagccctgagcattattatgtaggtcttctgatgcaatatctaagagtttctctaaggtatacctagaaatagattgctaggtaatggagtaactttattacttacaggaaactatatggtggttgtaacaatttatgcttctgccaccagtcatggtggatatgaaattatgtcttaatgtgataatttacattgcaatttttttttttttttttttttttttttttgagacagagtcttgctctgtcacccaggctggagtgcagtggcgtgatcttggctcactgcaacctctgcctcctgggctcaagtgatccttccacctcagcctcccgagtagctgagaccacaggcgcaggccacacttggctaatttttgtatattctgtagaggcggggtttcgtcatgttacccaggctggtcttaaactcctgaactcaagcaatcggcctgcctcagcctaccgaagtgctgggattagaggtgtgagccaccacacctggctgtttgtttgttttgagcctgttcctcaggctggagtgcagtggtccaatcatggcttgctgcaactccgcttcctgggcttaagagatcctcccacctcagccttctgagtagctaggactaagggcacctgccactatgcctggctaatttctaaagttttttttatagaggcagagtctcgctgttttgcccaagctgttctcaaatttctaggctcgtgtgatcctcctgcctcagcctcccaaagtgctgggattataggtgtgagccaccacacctggctgatctatctgtcttaaactggagaattgcatttttttctacctcctttcttttttttaaaaaaactgaatttccatctgttacccctccctttctgctcctcttatttcatgccttggaagttatactttgccttcctttaatgagtaccaaagaaattaaaaaatacatgtttactgtaagtccaggcctaaatgttgctactacagggaccatcaaatgctttactaccatctattgccatctgcaaatgtatgccattgttgtttagttttgtagttcttaatgtattttaattaaacaccacaaattatgctttttgtttgttttattcagtcagtagatgcttagaatacttgcttattttaccaattcctttgcttattccactcctttgttctgggattatttttctttttcctaatatattttcattaaaagtttatttggtgagaatctaaaaactctcaaattctgaaagttttaaaaatttgcctttgttgttgaaaattagttttgatgggtgagagaatctagatcaggtgttagcaaacctttttttgtaaagggccagatagtaaatattgtgggctttgtgggccatagagtctctctgacaactactcagcaatgctgttgtaggacaaaagcaaccatagacattatgtaaacatgagtgtgggtatgttctcacaaattttgtttatagacactgaaatttgactcaattttcatgtgttaaaaattattattttttgaatttttttaaccatataaaaatgtaaaaatcattcgtagcttgtagaccaaataaacaggatggatttgacctgtgggccatagtttgctgacctctggtctaaattaacattcattttacttagtacctgacactggagtaattattcttatgatgtcttattgtgatattgtcttccatttttaattgttgaagagccagctgtcagtcttttttgtttttctttttcttcttcttttttttttgaaatggagttttgctcttatcgcccaagctggagtgcagtggtgtgatcttggcccactgcaacctctgccttctgggttcaagcgattttcctgcctcagcctcccaagtagctgggattacaggtgcctgccaccacacccagctaatttttgtatttttagtagagatggggcttcaccatgttggccaggctggtgttgaactcctaacctcaggtgatccacctgccttggcctcccaaagtgctgcaattacaggcatgaggcacggcgtctggcctttctttcctttttttttttttttgagacgtagtcttgctctgttgcccaggccggggggcgatggtacgatcttggctcattgcaacctctgcttcccaagttcaagccattctcctgcctcagcctcccaagtagctgggactataggcacgtgccaccatgccgagctaatttttgtatatttagtagagacggggtttcaccatgttgtccaggctggtcttgaactcctgacctcaagtgatcctctcgccttggcctctcaaataactgtcctttctttgttggtaatctggtgatatgttttcttgtttggctgcttttaagagctgcttcttgtctctggtgcagttcgctatgatgtatctaagtatgtatttattttcatttaacctggtcaggatttgttgagtatccagaaactaaggattggtgtttctcattacatctggaaaaatttgagccattatttttgcttatattgtggtatgtcataggaagttgagaaaagaaaaattcatttgatggttttctatgaggttatagtggaaaataactatctcccttttagaattgagtgctagacagtttctgtgtagatgatctcataagcttccttttatcaaacagcgatcacttttttggtttggctgctgagaagtatggcatcaagtataatactcatatgaggtgtttaagaactgagtatatttcttatgcacattttactatatactataattatacattaaaaatgcacattgtaaatattataaatatgtgttatacattgttaatagtttggatagcaaaagtatgacttgacatttgttttttaaaccatatttaaagtaactctatcacaatatggatttaatggattaattgcataattggtgagctactgattattcttgttatttggatgcttctttaagttagcaagtttatattgtggtgcttcaatatagactacttatttcatttcagagaactcaatttcctgtatctactgagtctcaaaaaccccggcagaaaaaaggtctgtatgcagtttcatggtatgtgtatgtttgcacagacagatttctcttttatttatttatttatttttttttttggaggcagagtctcactgtcacccaggctggagtgcagtagcacaatcttggctcactgcaacctttgcctctggggctcaagcaattctcctgcctcagcctcccgagtagctgggattacaggtgcacgccaccacacctggctaacttttgtgttttagtagagatgaggtttcactgtgtttgccaggctggtctcgaactcctgacctcaggtgatctgcccaccttggcctcccaaagtgttgggattacaggcgtgagccgccacgcctggccagatttctctctcttgttgattcttttatctattctatattatttcaaaatgagtgttgggaaaagaagtaatagtctaaatgttctgtcacatctagcttttatttaatagagttattagatattaggaggttggtttgacctggaaattatttaaatggggtttgattattatgtaagtgtgtactaattttctgcttctggaaaaaccactttgtgaagttccaggtatctttttgctttgttggtttctagtttaattctattgtgggtagagaacattctttatatggtttgttttatggcccacaatgtggcctgtgttggtgcatgtcccatgtacacttggaaataatgtgtattctgctcttgtaggatgtagcattctgtaaatgtcaattaggtcaagttggttgatagtgttctgtatatacttacaattacagatattcatattcttactgatgtagttactgattggaagggtgatagaagagtgttgaagtgtgcaaatgtaattgtggatttgtttctactttcagttctatcaatttttgatttgtgtattttgaagatctgttgttggatgcatatacatttaggattgtctgatttcttggtaaattgacccgtttgtctttatataatattcctcttcaatttctgataatattccttgtttgaagtctactttgcctgataatattttagttttagttatttatttagctattttagttttgctttggccagtctttgaatggtatcaacatataattttcgtagagtaaaattccctttttttagtacaaattctgagtttcgacaaatgaaactagccatgtaaccactagtagcaccataatcaagttataaaagtttaattactcccccaaaagtcacctttactttgtagtaaaccacttcttccattcccaattgcgggcagccattaatctgtttctttcttcctagttttgcctttcttggaatgccaaataaatggaatcatacattattattattttgagagagagggtctcgctctgtcacccaagctagagtgcagtggtgtgattatagctcactgcaacctgaaactcctgggttcaaatggttttccccagtagctgggtctacaggtgcatgccgccatgcctggctaatttttatgtattttttttgtagaaatgggggtctggctctgttgcccaggctggttttgaactcctggcttcaagtgatactccatcttcggcctcctgaagtactggcattacaggcatgagctattgcacctgggttatgtaaatttttcagtggcttttaaacctcatataatgtttgtttgttggtttgtttttgaggcggaggctcgctctgtcacccaggctggagtgcagtggtgcagtctcagctcactgcaacctccacctcctgggttcaagtgattctgctgtctcagcctcccaagtagctgggattatcggcatgaaccaccatgcctggctaatttttttatttttagtacagatggggtttcaccacgttggccaggctggtcttgaactcctgacctcaagtgatccacctgctttggccccccaaagtactgggattacaggcatgagccactgcatccagcccaatatagggaggtattaagaaaagagaagaactatcatccttaagtattaacgggactttaacaaattaaaaaagtagtactttgaataaaaagctgtcacattttactgtgaaatccttagactttttttatacctctagttcaggttttttcagctttggcatgaatgatattttgagcaagataaatctttgttggagttgtcctgtatattgtaggatggttaacaacatccctggcttctacctggtagatgacagtagcacttaattgtaacaaccaaaagtgtctccagatgttgccagttattccttctggggcaaaattgttcccacttgagaaccactgctctggttaagtagtgtaatacttggaaatagaaggcagaaagttggtaagtgcataaagaattcacacagaagttggattagcaagctgagagacgttatttgaacaagtagcaattggaggcattttgactgagaatggatgttgtgcctctccctcactctttcctcctcagcttgagaggtccatattctctcaaagtttgactctttagttttgagggtgatgactgccaactgtggaagggataaacagatttctgtttggtatttttgtccaaatatatcaggactttttcaagaacaggcaatgaaattattgatcagaactacttggtggttctgagaaaataatatgctacatgaggctactgaagtcctcttccttttgccccatgatgtaaccttaggtgactttcttctggctttcagttgaagatcttacccatcattgaggtgagcgaactgatttactgcttgagtctattttcttccttaaaggagtcttcattgaaaactttacccattttggggtggccatagctgaggatgagttttgtccacaacctgagacaacatactcactatgtaaaaaacctgatctcagcttgatatctggttttagactaattgtttaatagaataatttattattgtaaaatatatataaaatttaccatttttaagtgtgtaagtcagtggcattaagtacatttacaaagttgtgcagccatcaccactgtccatttctagaagtgtttcatcattccaaacagaaacactgtacccattaaacaataaatctccacatccccttgcctccccagatcctggtaatctccattctattttctgtatctatgaatttgactattctaggtttttcatgtaaggtgaatcatacaatatttgcccttttctgcctggcttattccactcagcattttcaagattcattcatgttgtagcatgtgtcagaatttcattcctttttaaggctgaataatattctagtgtatgtatatatcacattttgtttatctgtctgttgatgggcatttgggttgttttccttagagtctttatatgtcagtaattcttaaagaatttaaaagttgtagaaactaggaattttgtagatattctagaaatatgtcatttcctgtactgtatataataatttattctacagactaattactgtgtatatatttggttctcagacgtgattttgattttgtagatgctgtacatgctcttcacttcattaatcttttccttttgctaattttggttcttgtgtatacagaattatagagttacaaggtaatttagttgttacctaattcaccctaaagtctacatgaaaccactgtcacagtctttgataagtagttaccaaatctcactatttctactgtgatagtgaatgactttcattgattagctttctgaaagaatagtttatcttacttgtcttggtatcctcacctctgagtctatttgtctattgtaatctggcttttgctccaccgctccactgattaaatggatgagctaagcatttttttttttttccactgcaacctctgcctcccgggttcaagtgattctcttgcctcagcttcccgtgtagctggtattacaggtgcccaccaccatgcctggctaattttttgtctttttagtagaaacggggtttcactatgttggccagactggtatcgagctcctgacttcatgatccaccccaaagcctcccaaagttctgggattacaggtgtgagccaccgtgcttggcccaattctgtttaatttttgaggaacaatgttaacttctaatttaaatggaaggtagtatatatctaatttttccctattatttttaatttcaatgctagtaaatctttaaatctgaaatacacactcttgaattttgacagatatgtatactcatgtacatatttatattcctgtaatcatcagatcaaattaaacatttttatcacttagaaagtttcctcatgcctttttccagtaagtcttctgcttcacttcgccagatgcaaccaccattctgatttctgcctgtataaattgattttgaactttcctataataagttgtgcttgaacttcacacaaagggagccatacagtatctactatttagcttttggcagctttcatacaacatgttgttttggagattcatccgtgttgttatatgtatcagtagttcttttatttaaaaaatgctgtttagtattcagttgcatgaatataccaccgtttgtccattctcctgttaatgagtatttgcaatgtttccagtttttgagtactgtgaaagtttctatgaacatttatttatttagagatggagtctcgctttattgcccaggctggagtgcagtggtgcgatctcagctcactgtaacctccgcctcctgggttcaatcgattcttcagcttcagcctcctgagtagctgggactataggtgtgtgccaccatgcccggctaatttttctatttttagtagagacgggatttcaccatattagccaggctggtcttgaattccttacctcatgatccgcccgcctcagcctcccatagtgctgggattacaggcatgagccactgcacccggcctgaacatttatttactggttttttttgtgtgtgcatgtgtgtgcaagttttcacttgaataagtgcctagggagtggaattgcttggtcatatgtgaactgtttgttttaactttataataaactgccgaagtattttccaaagtggttgtacagttttacccgaccgccagcaacgtgtgaggattctgtttggctacattcttgccaacatttgttactatcagtctttttcatattagacttgctggtgggtatattgtgttttattgtgattttaatttgcattacactaatgactagtgatgttgaacaccttttcatatacttattggtcatatcttttgtgtagtgtctgctcaagttttttgcctatttttaaatttcttttttccttattattgatttgtgagacttcttaatatattctgaatgtacgtcctttgtctgttatatatgtggtaagtatttccccccagcctgtgttttactactttcattttattaaggtatcttttgatgatcaaaagttttaattttgatgaaggccaatttactattatttttcttttgttattaatgccttctctgtcttgtctaggaaatcttgatccttaccccagactgagttgtgtgtcctctcccttttctgcattaatattgcagaaattaattttttggttttagaaaatgtctaatttggctcaatcagtaatttttgatatctttctattgaaatatatatacagaaaagtacatacataaatcataattgtactgtgcagtgaatttttacaaagtaaacatatccatgtaatcaccatctagattaaggtatagaatattatcagtgccctccaggccgcctccttattccctaccagtcattaaccacccctcccaaaggtagtaacttgtatttaacttctatcttctacatcagttttgcctgcttttgaatttaatgtaaatggaatcatgcagtgtgtactttttaatatctaacttcgttgctcagaattatgtttgtgagattcatttatgttgttgcatgtagtagtggttggttgttttcttccttgttatatatattccattgtggggctctacctaagtctattcattttatacttgatgaacatttgggatatttttattgtgatgtattatgaataatgccaccatgaagagtcttgtacatgttttttggtacacatacatacttaggagtaggattttcagggtcaccaggaaggatatatttaggctcagtgaatactagcaagcaatttttaaaatgcggtcaatataatccccatgtgtaaaataaaggtgtacaaacgcacacacacacacttgctcatatgcttatatgtgcatagaaattccttgaaaatactcaagaaatgcttcacctctggtaagggataggaatggaatgggtcttttgtttagtatcctatgtgccctttgaattttgttttactgtaagtatgtatttttaagaaaaccaactagttatttttaaaaatcatttgaaagtcttcctactttgatatatgaaaaacactggttttaaaaaaaataatagaaaagctttaaaatcattattatttttttgagacggagtcttgctctgtcgccaggctggagtgcagtggtgcgatttccgctcaccacaacctttgcctcccggattcaagcaattctcctgcctcagcctcccaagtagctgggactacaggtgtgtgccaccaggcccagctaatttttttttttttttgtatttttaatagagatggggtttcaccatgttggccaggatggtctcaatctcttgacctcgtgatctgcctgcctcggcctcccaaagtgctgggattacaggcgtgagccactgtgcctggccgctttaaaatcattaatgttgcgttgctcagttatgtctaattgacagcccaaacatttacattgtaatattagaaaatcctttatgattgggcagaaacttggtttaatgtgtcaccttggagacctgggttatagtcctgcctcttccattaactacttgttgaatgtggacaatttacttaacctttagggccttaatttcctcctttataatgtgagaatgttctctgaattgcataactcactggccttacgtgactattcagtggaataataagagagaaaaactttgagatacatgcacacacacccttaagaaggatataattgttaaattttgctttgaggaaataaaataatctaagctataaagtaaaaccataattagctaatcttttatatgacttttttcttcctcatttcaagctaatgagaagcaaacaaactggatagcagcaatataattaaaaaattataggccagcttctagcatgtattcttgagtcaatactgactcagcccagtctcttcctcttccttcatcatcatttatgtacctgaacagagtagatgtttctcttgatcctgggcctgttcgccctcagatccattccttgccttctcttctctttttggtatagtgaggagctgactctttttttttttttttttttttttgagacggagtctcgctctgtcgcccaggctggagtgcagtggcgggatctcggctcactgcaagctccgccttccgggttcacgccattctcctgcctcagcctcccaagtagctgggactacaggcgcccgccactacgcccggctaattttttttgtatttttagtagagacggggtttcacctttttttagccgggatggtctcgatctcctgacctcgtgatccgcccgcctcggcctcccaaagtgctgggattacaggcgtgagccatcgcgcccggccgaggagctgactcttgcagcctccttttcttcccaggcttccgtgtcagcagtttctggctggattagcaagtggaggaactggcaggagattagaaggcaagaggaaagagaagacagggcttccctccccgaccttcaggcctcagagtcgtagtggttttttgctcatgcagacttctgatttgtctcaccattccctgttgggcctctcatttcttccattgcctgttctctgcattaaagtccttgtgtttcaaatcctcaagtggctttttgttaggctttgactgatacagggctcaaaatgatagtaatgaaaatgtcttacatttatattcttttcaagatttgttatctcttttgataccccaaatatcctattgaggtagaaaagtgttataattcctgtttggcatgaggaaattaacatttattgaatgactattttcagattctttggattttcgggtgaaaattttaggggggataaatggaggcccagagaagtgaaataacttgccctaggccccatagaaggctggtattgaatcaagattgaaattctgcatgtgaaaacttttacgtgctacatgtctgctagtcctggaagaaatcctttctttgatgagtattttttttaaaggctttacttgcaatatatttacaaaagccttagttatttagtaaatttttcaatgaaaaatctgaaccataataattttctgcttagtacttatatagctagcatactatccctagcattaatcaaagtgtcatgtaaaggtttgatttttgagcctaagcagaatttgaaattcttctaagagaatttagcacctagggcaaactacaggggagaattcttgaggtgtcatgtttattcacttctggaattgtttaaaatatgtcaggtgcatccttaaagggagaaagaagggggaagagatgttacaaaagagtagaatggggcaagagaagtggcaagggagtattgttgctaggttgccagccttctgcccccactgtcttggtgatggtggaggggtagtgtggcagctgggatatgaatgaggtcttttttataactcactaaaagccattaccttgtcttcatctcgtcagctggctacctgacctctgtggtaacataggctcctgaaatgtagcattggagatgatcactgtgctttattgcaaaataggggagactctgctctgcatttacatgcttatgttttgtggaggatctttcaactagtaattctcataatacctgtgaaagcatataagaaccagtatctccatttttagggggagttggagtgagcaatgatttggaataccagaaattcaacttatatatttacaggtaaaattctaattgtaaattcaggattcatagattctagggatttctgaggtatccagaattccttcatctttgatgataagtagataataatggtaataaaaataacagcaacaggcccagcacagtgacccacacctgtaatcccagcactttgggagactgaggcaggtggatcacttgaggtcaggagttcaagaccagcctggcggacatggcaaaaccccatttctactaaaaatgcaaaaattagctgagcatagtggcatgtgcctgtaatcccagctactcagtaggctgagtcataagaatcatttgaatctgggaggtggagattgcggtgagctaagatcgcgccactgcactccggcctttatgacagaactcgactccatctcaaaaaaacaaaacaaaacaaaacaaaacaaaaacaaaatgcaaaaaaacagcaacaataataggtaacatttctttaaggcctactatgtaccaggcactatttgaacctctttatatattaggtaatacgatacaactctatgagaatgagtattttatttcctgacccttctatttaaaagtaaaaccccccacccggcactgtttctctttcctgctttatttttctccatagaaaaatatcactcataagtgtaacatactttattatctgtcctgtgtggtagtagcccctgccctcaattataaactccatgaaatcagggagtcagttttgttcactgctgtattcccagtgcctagaacagtgcctggaatcatggtaggtacccagcgaatattggttgaatgaatgagtcttggttttacagatgaggaaactataaatttcccaggtcacacatttggtaataggacagttgtgtacactgaaatgttctctaaaatatttgatggaacgaaaattagcttttggacagctacatctccaagagtgtgaaatgaccttcagcactggatttggtggattttcctttttctaatccctagagttccatttaatgagcgtttgggttcttgagctaccttacaaattgaacacttttttctccagctttcactcaagaaacacaaaacatggcttgtcctttttttttttttttttttttttgagactgggtctcactctgtcacccaggttggagtgcagtgcacaatcatggttcattgcaacctctgcctcccaggctcaagcaatcctcctaactcagcctcctgagtagctgggactacaggcttgtgcctccactcctggctaatttttttgtattttttgtagagatggggtttgtccaggctggccttgaagtgctggactcaagtgatccgtccacctgggcctcccaaagtgctggggttacaggcgtaaaccactatagctagccctgattgtcttttattgtgagattttaataacagctaagacttgaaaattaacattttataaattttcttttagactacttagtgatatactaagtatctaaggtttgtaatacttagtataaactcaaaagggttcagtgcctcattctcttttactctttccctttagtagataggtgacagaggactgggtcatgcagttgagacttggtccaagatgacttagtaagctacttgtcccagaactatttatttatttacttatttttgagatggagtctcgctctgtcgcccaggctggagtgcagtggtgtgatcttggctcactgcaacccccgtctcctgggttcaagcgattcttttgcctcagcctcccgagtagctgggattataggtgcccgccaccactcccggctaattttttgtatttttagtagagacttggtttcattgtgttagccaggattgtttcgatctcctgacctcatgatccacctgcgtggacctcccaaaatgctaggattacaggcgtgagtcaccacccccggaccctggaactatttatgacggtgcactttatgcacttaacacactcacatgtctttaagcttggtgactcgtgtggctttttcgaaggagatttgattctggaagtggttaagtaggatgtgaatggctaaggtctggtcattggtgaagcctaggggaagaaaagaaaggaaacacaagtcttagaagaatttcagatcggccccaacgactagaagggtggttctactaagaaaatgtgtgtagtcagaaaatgaagagtcagttgcttaaaattttactttttttcttgttcctggcatgtaaagtcatatccatactttctgttataatttcttcttacaaattccattgataatccctattcttggatagcaatgagcagcattacttcttttttatttttttaaaaaaattaaattttttgttgaaatgagggtcctgctgtattgcccaggctggtatcaaatttctgggctcaactgatcctcctgcctcagcctcccaaagcgctgggattacagttgtgagccagtgtgtctggttgtaccttttaatttttgtgttcaggcaacattaactctgagtcacagtaagctttttttttcttcctgtcatattatggacatagaagttttttggttttctttagattgtttctccttaggttgcagaacatcaagaaatggattacagtcattttcctctcttccccatgctcttccctttcttttccttttttcttttctttttttttttttggagacagaatcttgctctttggccgaggctggagtacagtgtcatgatcttggctcactgtaacctccccgcaccaggttcaagtgattctggtgcccaagcctccctagtagctgggatgtcaggatgcgccaccacaccctgctaatttttgtatttttttgtagagatggggtttcaccatgttgtccaggctgacctcaaactcctggactcaaatgatctgccctcctcggtctcccaaagtgctgggattataggcatgagccaccacatctggcctcttttccatttttaaaaaggactgtctccaacatattaaaattcacaaaaaataatataaacacacatgtactcactggctaggcttaataaaaaacatttagtcatgtttactttaaagctttttatttttttgagaaataggcattaaagagttgaagtctcctttctgtcttttcataattctgttcttccctcttccttccttgagatcttcactattcttgggttaatttggatctttctactccttgttaccacagaaaagtaattcttaatgaatttgaccatattttaaacttctgatttcagtgggcaggtaactcattttatggtttctgtattgtgagccattttcaatgactcaactagatttttttcatcgttgacttctcatttctgggcaacagcataatgttctcatttgagctatttctaaagattgtgtttaactatttaaaatatttgtggtactctgatcatcagatgtgatttttttttttttttgagacggagtctcactctttcaccaggctggagtgcagtggcgcgatctcggctcactgtaacctccttctcccaggttcaagtgatgctcctgcctcagcctcccaagtagctgggactattggtgcgggttaccacacccggctaattttttgtatttttagtagagacagggtttcaccatgtttgctaggatggtctcgatcttctgacctcgtgatctgcctgccttggcctcccaaagtgctgggattacaggcgtgagccactgcacctggccagaagtgatattaactatcttatatgtatatttctgttgcgggaagtcaggggccccaaacggagggaccggctggagctgtggcagaggaacgtaaattgtgattatttcatggacacttaccagttcccaaataatattcttataatttcttacacctgtctttaatctcttaatcctgttatcttcgtaagctgaggatgtacctcacctcagggccactatgataattgtgttaactgtacaaattgattgtaaaacgtgtgtttgaacaatatgaaatcagtgcaccttgaacagaataacagcaattttagggaacaagggaagacaaccataaggtctgactgcctgtggggttgggcaaaatagagccatatttttcttctttgcagagagcctataaacggacatgcaagtagggaagatatcgctaaattcttttcctagcaaggaattttaataatactctggagaaggaatgcattccttggaggaggtctatagggcatgtctgtcttatgctgttgacataaggactgaaatacaccctggtctcctgcagtaccctcaggcttattagggtggggaaaaaaccccaccctggtaaatttgaggtcagatcagttttctgctctcaaaccctgttttctgttgtttaagatgtttatcaagacaatttgtgcaccgctgaacatagactcttatcagtaattttgcttttgccttttgccttgtgatctttgttggacccttatcaggagtttctgattttgcccttgtcctgtttcctcagaagcatgtgatctttgttctcctttttgccctttgaggcatgtgatctttgtgacctactcactgttcttaggccccctccccttttgaaatccttaataaacacttgcttattttgcagctcaggtgggcatcacggtcctaccgatatatgtgaggcccagctgtgaaattcctctcttcgtactcttatttcttagccggctgacgcttatagaaaatagaaagaacctacattgaaatattgggggcaggttcccctgatatatttccttagtgacattcctgcaatctcctttagaaagtctttctgttcaccttctataaccagggaaggagagattgagaagagacgaaggatgattttatgtttttcagtcccagtcattatttgatgagaaactgatattacaagctttaaaaactcaagatatgtattcaacatgtagtagtagaacaagtatcttagtttaatagtctataaatttttgatgcactataatatattattgtagtcagtagcatcaaaattttaatgtgatattgcagtatgtttatggttagtttagacatgaggacagtgctaaaggagaaaatctaatgactgtgttgtttgttttgtcaaaatatgctgcctagctccagagtttcctattttggagaagcagaactggttgattcatcttcattatatccggaaagattatgaagcctgcaaggtaagagattgccataataataaaaatgagaggcaggatgttgggtaggcaactaacagtgcctgctaaacagagtgtggcagtttatatctcagtgataaaacatgaattccttcttccccatacttcatacactggttatcttttgctatggtagtgatgtttaacatacaacctcaatatttcagtggcccccaacaaacaaatattaattgctcatgggctttcagatcagctgtgggttggctgggtttgactgcaggctgtgggtcaggtttaggtgtgttccatgtgtcttctcatgtcaagagcaaacaactctcttggacatgttggtcttctggtggaggcagatgttcaactcagcatattaacttttttatctttggatagatgaaaaatggtattttgtcgagtttttttttttttttttttttttttgagatggagtctcactgtcacctaggctggagtgcagtggcatgatcttggctcattgcagcctttgtctcccaggttcaagcaattcttctgcctcagcctccccagtagatgggactacagatgagtgtcaccatgcccagctaattttttgtatttttagtagagatggggtttcaccatattggccaggctggtctcgaactcctgaccttgtgatctgcccgccttggcctcccaaagtgctgggattacaggcgtgagccaccgtgcccagccctgagttttattttttaatttctctcttactgcaaggttgatcatcatgtgtatatttaaaaaccatttgtatttccctttctctgtatctttggtgacataccatatgtgttacaaacttgcaggcagacagtggtagtactaacatgcagaatgtatccttggtgtcatcttttttggtatccagagctttgtgacccatctaaggtttttaatttatacccatggcatttatacctatggcaatgcacagaactaattcatactggtatgacaaagattcataccagtttttttttttctttttttaagtggagttttgctcttattgcccaggctagagtgcagtggcgcaatctcggctcactgcaacccccgctttccagtttcaagcaattctcctgcctcagcctcccaagtcgctgggattacaggtgcccgccaccatgcccagctaatttttttttttttttttgtatttctagtagaggtggagtttcaccatgttggtcaggctggtctcaaactgctgacctcgtaatccacctgcctcagcctcccaaagtgctgggattacaggcgtgagccaccgcacccggcccataccagttttttttgacaccgctgatccgaaggcagataccagtatgaatctttttttttttgagatggagttttgctcttgtcgccaagggtggagtgcaatggcgtgacctcggctcaccacaacctccgcctcctgggttcaagcgattgtcctgcctcagcctcctgagtagctgggattacaggcatgtgccaccacgcctggctaattttttgtgtttttagtagagatggggtttttccatgttggtcaggctggtctcaaactcccgacctcaggtgatctgcccgcttcggccacccaaagtgctgggattacatgcgtgagccaccgcgcctggccaccagtatgaatcttgaaaggttctctttctttttcatctgtgataatacttggaaatcttatcacacttttcttagcttgcctagttagattttagacaggggttggcaaactttttctgtaatgggccaacaatattttagggtttgtaggccacatacagtctctacatcatatttgttatcttattttttataaccctttagaaataaaaaaaccactgttagcttgagagctgtacaaaaatatacagggcctgtaagccctgtagtttgcaaatccctgttctagaagaagtaatcacaacaagggagttgaaattttaagaaactgaatgaactaatactttactaggcattattaatactctaggtttttttacatatgattcttgtccacgtctgctttttcattactatttgttttcttttttttttcagacagagtctcactctgttgcccaggctggagtgcagtggcgctatcttggctcactgcaacctccgcctcctgggttcaagcgattctccttcctcagcctcctgagtagctgggattacagacacgcaccactactgcccggctaatttttgtatttttagtagagatggggtttcaccatattggttaggctgatcttgaactcctgacctcataatctgcctgccttggtctcccaaagttttgggattacaagcatgagccaccgcacctggcctgtccatgtccactttttcttaaagacacctgaagaaacttaaccactgctcagaagcatttttctccctctttcaggctgttatcaaagaacagcttcaagagactcagggattgtgtgaatatgctatctatgtccaaggtaagacacatacttcttgtcttcttgctagagaaatacacttttcctaggttcttgaaaaagatcaggcaattgaagaaacaagttcaagtacagtcatgcaccacttaacaatggagatatgttctaagaaatgtgttgttaggcaattttgtcattgtgtgaacattacatggagtgtacttacacaaacatagatggatgatatagtgtactatacacatgatatagtctgttgctcccaggctacaaacctgtatgagcaggtgttataccgaatactgtaggcagttgtaaaacagtggtaagtgtatctaaacatagaaaaggtactgtaaaaatatggtataaaagataaaaaatagtatacctgtatagagtacttaccatggatggactggaagttgctctgggtgagttagtggtgagtgaatgtgaaggtctaggacattattgtatactaatgtagactttatgttgtatactaatgtagactttataaacactgtacacttagcctacactaaatttatttaaaaatattttttctacaatgataaattaactttagcttactataactttttactttataaactttaaaactttttggctcttttggggtaatacttaaaacacacaacaacattgtacatttgtacaaaaatagtttctttaggtccttattctataagcttttttctttttctttcttttttttttttggtagagagacagagtctcactttgttgcccaggctggtcttgaactcctgggctcaagcagttctcctgcctcagcctctcaaagtgctgggattataggcatgagctacgacacctggccctttatgctattcttaaaactttttatttttttacttttaaacttttttgttaaaaactacgatacacacactactacagtggtggtactaacatgtggaatgtgtccttgctgtcttttttggcattcagagctttgtgacccatctaaggtctttgtgacacacacacacacacacacacacacacacacacacgcacacgcacgcacgcactggtctaggcctacactgagtcaagattataaatatcactgtcttccacctccttatggaaggtcttcagtggcaataacatacatggagctgtcatctcctataacaataggaataccttctggaatacctcctgaaggatctgcctgaggcagttattcttttttttagtaagtggaaggagtacactctaaaataaagattaaaatgtatagcgtagtaaatacataaaccagtaatgtagtcatttattatcaagtattaagttctatatatatgtaattgtatatgctgtacttctatgtgactggcagcacagtaggtttgtttataccagcatcactacagataggtaagtaatgcattgcactgttttgattgctatgacgtcactgggcaataggaatttttcctcttcattataatcttaagtgatcatcatcatttatacagctgtcgaccaaaatgtcattacaggtgcatgagtttaaatgttccagaaaggttttattcagtattaatctttttatggaatctgaatataattactgtgttggatttgacttcagaaatgactagtaatgttaaaaaattgctatgattacccattttttagtttctggctagtgttttttggaatggatgcttaggattcctgcctaatgcagtgatttcagggccaaaagatgcttttggaaggattgcttgtaatcaagctaaaagagatgaagaagagcttgaggatttctgtaaggtgaatcaggatgaggggaagaagcctggaaataaacaagataaagcagagcataaattcagctcattagaaaccaaagataaggaccactcacttactttttttttttttttttttttttgagacagagtcttgctctgttgcccaggctggagtgcagtggtgcgatcccagctcactgcaacctctgccttccaggttcaagcgatcctcctgcctcagcccccctattagctgggattacaggcacatgccaccatgtccagctagtttttgtatttttagtagagacaaggttttgccatattggccaggctggtctcgaactcctgacctcaggtgatccacctgccttggcctaccaaagtgctgggattacaggcatgaaccactgcacctggcccactgacttaaattttcctctttagtggcataagtagcattcttagtttttccaggaactttctttttgactcttgggtgtaaataaatggttttgtttaccattcattgcatttgtagtcttcagattaacatataattttctgacataattgttaagatattgacaaatttaggacatcatggcaaaaaatgctcttattcccagtgtcacaagtatcagactttcagtgcctgataaattcttctggaaacataggcctaggaaaaacctctggttctaattggttgttacactgacaactgaagtcttaaatgttactttatcctttgccagaatctccatgttgaatttgaggtattgattccatttgccccatttgggggttcgctctgaaaactatcagttggaagtaaattatgataaatgaagcatctgatggggaagccccaaaatgttgttaatgtgaagagtttgtgtgataatttgcaaaggaactgattatctatgtgatggatcctgggagtagagagagaagtaggtaggtttgagctaccttgctaaaagacagttgagcttgtcagcagttttggttgttgtttcagcctgtccaaagccatatctgattgttttaaggatacagttgtccaaaggatttacttgatgtggtttcccagttttctcttctccaatttttctgaccccaggctccattcttcccagaacatggttttacttttttttgtattttctgtttcttggcagcattgatatttcgcctagaaggaaatatccaagaatccctagaactcttccagacatgtgcagttcttagtcctcagagtgctgataacctcaagcaggtggccagatctttgtgagtattggcaacctggaggccctagggcactcacagagaacagtgtaaaatgcattcctaggtccagcctgctgctggcagctgcatcagcctgatacacaagtgggggaatggtttaataggtacagtgggattcactctgaagagcatggattaagtttgaaatttgagaaaatgagataactagtgttaaggaactaagcattttaaacactgtgcattctagtttgatgggggaccaatattgtttatcatgtaaatagagacaccttgtaccctaagtcttctaaacttattggcaatccttggaatttttctcatctactcttctaacacttagtatttgtcacacagtaagtttttagtaaggacagagagttcctgacttctgatggttcaacttacataatttttcaactttacaatgatgtaaaattgttatgtattcagtagaaactgtacttcaagtatccatacagccattccgtttttcattttcagtatagtattcagtaaattacatgagatattcagcattttattataaagttggcattgtgttagatggttttgcctaactgtcagcaaatgtagttaagaaagtggagataggaactccatggaacagagtaagtgttctgagcatgcttaagataggctaggctatctatgatgtctggtagagtagatgtattacatgcatttttgaattacagtgttttcaatttacaatgggtttactgggatgtaaccccatcataagttgaggagcatctctatttgttgagtgaatgtcctaaagattcctagatggaaagaatctcaagtgtttataaactactaggtactcccttttcagtcctttgttccatggagttcctatctcccctttcttagccacattgccattcatacctgtgttgtttttgcatagagcttggttttccctgtttctctctaaactcaggatccaatatcaaggaaagagacttagtcttggaaggaaaggatgtgtccctaatgggtgatgataaatgatggtagttactgcttaacatggtatatcattaggcttatttcttttttggtctgcatttatagtacattgtagaagaaaaattccacaagactctcactaaaattggtatagaatgagaccaaggccttggaacagctgccagtgcaatccctactaagagagcttctgctgttagtgtatagcagcttcactgaccaaaccagcacaaccacctcatagagaaaaggcttctagaattctctgctggatgaaatatgattaaaatgtgggactagtagggttagtcttctaagaattttgaggtaataattatggaaaatatatcttttacagatttcttttgggaaaacataaagctgccattgaagtatataatgaagcagctaaactcaaccagaaagattgggtaagtagagaactttcagttctttcttattagtaaacttgctaatggttccatttatcatctggctgtcttatttctgaattcttacattccaaaaatgtcttgattttaacctcatacttaattcatgatttgtataagtataggatcaaaaaccatgtttcctcataactttgcaggcattgctgcatgattttctagcagtttgctgacgagcagtctcttaccagtctgattcttgttgatgacccctagaagctttgggtatttttttcgtcattggaattccacagtatcagcaataggcatctagttgtgtttcatgtctttttcccgtccccatctgtgtgacattcaattgactctttcattctgaagacccttgcctttctttgggtcagggcctttgagtagttctttatttttcccctccccttctctttgtgtcaattgaggattgtgtgtaaatgcaacagaaaatttgactaaacattggctttacaaattcgtttttgtttttttttttaattctcatgaaacaagatgtccaggtaagtagttgctggcattgatttggtggtcctaggatgtcaagactgagagtttttcctcatggttacaagaagactgctgcatccagcatcatatctgcattctagggaggcagaaagagaaagcaacaaggagaaaaggacagagcctatactgggaaagcacaactttcccagaagtcccccacagacttccacttatgtcatatcagctccccttctataaggaaggctggttaaatgtcgtttttaatctggtcacactgccactctaaacaaaattagggttcttttagtaaggaaaaagagaagagtaggtagcaggtaggcaagtagataactagcagcatctgccacactgttttccattctctatgagagatgttctctaactattctctacaactcttaacttgcctctcattttctacctctgtgtccttttctttgtgtgtggtgcgggggggtacagaggctcactctgttgcccaggctggagtgcagtggcgtgatctcggctcactgcaacctctttcttccaggttcaagtgattctcctgtctcagcctcctgagtagctgggattacaggcgcctgccaccatgcccggctaatttttgtatttttggtagagacggggtttcaccatgttggctaggctggtctccaactcctgacctcaggtgattcacctgccttgtcctcccaaagtgttgggattataggtgtgagacaccacgcctgaccctccttgtcattttattatatgttcaggacatgtattcagtcttatcttccatatcatcatttttgtttttagctatttgtattctgttatataccctatccatccaatattttttatttcatttccttttattgtatttttaatttccaaaaatcttgtcttttcttcaatgtctctgattcttgaagttcttttctgcttctcagaattatctttttcttcctctctgcattttggttcttctattttatgctgttggtatttttcaagtatttggtgattctcagagagacattcatatctgtgagtgaagaactagatttattagtacagagaattagcatggatttcctttgcagttcttacggggcactattatttttgaagtgtgttcaatttgttagtcgcttttcttctgtacatcggaagattgagttgagtctttatgccatggagtatgttatagctaacagccagagtgaaactacagatgaagaaaaattcatgtacttttcattcagtcggtttttcaaaaaatgagtatgtctgctatatgccaagcactgatctatgccctggagatgcaaagatggactgttggattataagatactcaactagaataggaaatgaaggaagaagagcaaggtttggaagaaggtgatggtaagaaatcagagttaaatcctgtctttcagaggattttggatatgataagttttaggttctgaggggatatctaaattgagatgtgtccagtaggattggatatagaaatctgaaactcaagtgttttggagtagagatgtgaattctggagtcagcaacataaaggtggtaattgaaaccattagattggttgacattaccctgcaatgagctgaggatgggaccctggaaaaaaagagttttttactttttttttgtctgtttgagacggcacaggaaaagttactgctttaatgcagggaggaagccctgcattctctatgggggccaggatcatgggggtggccagtgccacaaatggtcaccatacaggccagggaggagccagggcccaccaataatccctggaacatccctggatgctagcagttttttactttctaaatttttttttttttttttaagagacaaggttgcctaggctggagtatagtggggtgatcatagcttactgtaacctccaactcctgggctcaagtgatcctcctgcctctgcctcctgagtagctggggctacaggtgcaagccaccatgcctggctaaatttattttgtggaaatgaggtctcatgttacccaggctggtctcaagctcctgtcctcaagtgatcctcctgctttagcttcccagagtgctgggattacaggtgtgagccatcaaaaagcaattttgaaggactgagcagaagaagagaacccatagagggagatagggaagaggtaaagcaggagagctcagggtcacagggggaatggaacgtatttcttaatctatccagttggttgaaagagctcatttggtattactgactcacttgggataaccatcccattgttactagtagatgtgatcattcacaaaacagccattctttttttttttttttgttgagacagagtctcattctgtcacctaggctagagtgcagtggctcaatcttggctcactgcaacctctgcctcctgggttcaagcgattctcctcccccagcctcctgagtagctgggatttacaggcacccgccaccatgcccagctaatttttgtatttttagtagagatgaggtttcaccatgttggtcaggctggtctcgagctcctgacgttgtgatccgcccaccttggcctcccaaagtgctgagactacaggtgtgagccaccaccttttttttttttaactttaaaatttttctttaaaattttccccttcatggcatttttattttctttttagaatattttaatgattttgaattttacttttattaatagcccttacctaccctacatatttcataagtacctgtagaaaaccttatagtagctggagcatggtggctcatacctgtaataccagcactttaaaaggatgctgagtggggaggatcacttgagcccaggagtctgagaccagcctgggcaacatagagacccagtttctaggaaaaaaaaataaaaattagtggtcgtgtgcacctgtagtcctagctattctagaggctgaggtaggaggatcacgttagcccaggaggttgaggctgcagtgatgcggtgaactgtgattgtgtcactgcacttcagcatggaaagcagagcaagaccctgtctcaaaaaaaaaaaaaaaaaagaaacaaccttgtagccctactttcttggactcatcagggtattccacagtcttgctgcaacaggggaatagtaattcctcctgccattatcttagttgacttttggaacagttctgttaagtagggagaatttcccccattgacaagtgaggaagctaaggctttggaagatggaagttgctacagtgaggtagttgctgagccagaactggaattcagacctgtgatctaggatgatctaagattcctcgtcttaagactgtgatcttttccactgtaccaactgcctttgcaggatgtctgctgggttcccttacctcctgaaagataggatttgactctgatttgttctgttgccctttccaaatttcttttgcagttagtttgttaaaggtatattgctgccttctcaactatctatgtcaaagattttaaaaggtcagaggttagccttcaggacatctatttacttacctaccttaacaattcctactgtagagcaggacatttaaaggacaagaaaggctttatttctgccttgtctctctccatgcatgcattcttatagcatgacaaagttggcagtatacaagttttggaagcaggcctgagttcaaatcccaatgttctataatatggacatgatttgtgattgaataaaaaaaatttttaaatgtgcggcatttgtgagataattggaaattttaacgtaattgaatatctaatatcaagcagtcactactttttttcgagtgtgacgatgtgggtagtttaagaaaaaggccttatcttttagaaataaatacggaaacatttgtggataaaacgttgggctgttatttgcttacaaaagttgtgggagtagatggggtgtggattggatggttgttgggacaggatgattagtacctaattctgtctgcacttacgtatgattgaaattctccctaggatgtagaactaaaaaagaaaaaaaaaatcccaatactctctgtcttaagttaggtaatctactcaacctctctgagcttcaatttccttatctgtaaaattggaaagattataactatgttgcaggtttgctgaaaattaaagtaacatatatgaaaacatctggcataaagcctgatgttagtaggtgctcaaccaatggttgctgttttgttgtttttactatttttggagacttggaaaacattaaatcagttgttatctctgagcctgggggtccatgtttcctcagacagggacacatctccactactaatagggtagttcttactatgtttcccaagagcattttccttacccttgctttctccttttccaaagctaccttaaataaagggaggtttattataaaggaatttgagagtccataaaacagtatcaagagatgcaggttggtcttttagtgaagcagaactggaacgcttcagcatccaaggtagctactctgccttttctgcttcatcttttctttctgtagatcaaaggttggcaaactttttttgtaaagggccagttaataaatattttaatttgtatagcttcatacagactctgttgcaacgacttaactctgcagttctaatgcaaaagagccatacaaaaacaatagttgtgtctgtgttccaatgaatctgtacttataaaaaagggcagggaatggatttggcccatggaccatagttttcccatgtcagctctagacttctgcagatggctccaattacatgtattccatcacagcagactccaggtggcgctgtcagtcctcaagttcacatcacctagtaaatttagtacttgtaactaactagctctcttccaattccagattcctagggaaaggacttcagttgtgtcaggtgtcactatccaactgtgttgccttaagggcggaaatgtgtggctagcagccctctcagcaggggctgtgggtagtctctcctgagaagaaggagcaaagggtatgggtgatgggcaactcttaaagaaaaaaggtatggggatgggctgggtatgtgccccagggttccccatagatccaggaagatcacctgtttattctgcttttatttcttataatctgtatttttttatgttgaggaacttatttttaacaattaatttgagtatgaactctaataaaaagctgactgtaatgcatagtttaaagtttaaaccttgccgagcaataacaatctctagatgtctgttgtttcactctaatacttactgtggaattacacctgagttgttttccttcttttttatgagcctaggagatcagccataacctaggagtttgct

SEQ ID NO: 15482 - DNA, 36099 bp, Homo sapiens
acagaactgctaatatagaggaacccgatgaattcaggatgacctagtcgctattttttgaggcatatatctataattggatctaatttcggtaaagtgccaagtgtgaagctttgtttaccttgctttagtgttgggtttgaaagcctgttctgtccatttgttagaatgattttaggtattcggaatttattgtctttcgaaaaacgccctggaaaacagtacaaatagcagcctttggctgttttacaacttagttttggctaagcagcaaggttagtgttattgttagagggccttttgtttgttttctactctcatttgcagagtagtcatattattctagtctaattagaaaactctgaagacagaaacttttttttttgagacggagtgtcgctgttgtcggcccgggctggagtgcaatggcgcgatctcggctcactgcaacctccgcctcccaggttccagcaattctcctgcctcagcctccggattagctgagaatacaggcgcctgccaccacgcccggccgaaacatttttattaagctaagaaatttaaaatagctaggccggacgcggtgcatcacgcctgtaatcccagcactttgggaggccgagacgggtggatcacttgaggtcatgagtttgagaccatcctggccaacatggtgaaaccccgtctctactaaaaatacaaaaattagcggggcatcgtggcgctcgcctgtaatcccaggtacctggaaggctgaggcaggagaatcgcttgaaccccggaggcggaggttgcagtgagccgagatcatgccattgcactccagcatgagcgacagagacagactccttctcaaaaaaaaagaaagaaaaaacagattttaaaataattaaataggccaggctcagtggctcacgcctgtaatcctagcaccttgggaggctgaggtgggtggatcgcctgaggtcaggagttcgagaccagcctggccaacgtagtgaaaccctgtccctactaaaaaaatacaaaaaattagctggacgtggtggcgggcgctggtaatcccagctactagggaggctgaggcaggagaatcgcttagaacccaggaggcagaggttgcagtgagccgagatcgtgccatttcactgcagcctgggcatccagagcaaaactccgtctcagaaaaaaaaaaaaagtaaatagcatggttaatgttactgggttttaaatattaaaaacataggaaagaaaatacttccactccagcctgggtgacagagcaagactccgtctcaaaaaaaaaaaaaaaaaaaaaaagaaaatacttctaagtaatcttaaagtgtaaaagataatgggtaacataacattgctacaaatatagcttatcctctagtgctcatcacaagtgtttgtgtaatagaatatgaacttgagtctgtgacggcagaattgtcatgtacatttgaatgtctaatactgttttaaagagaatagcttttgtttcgatatgacttagcaattaagcctgaagttaactgttttcattgttgtcaaatttattgctagtagtgttacgtttatagtaattttcatcttttcaagttaccaatgcatggaaatgtgaatttctgtccttttaggaagtggtattttatcttttttttttttttttttttgagacggagtctcactttgtcgccctgtctggagtgcagtggcgtgatctcagctcagtggaacctctgcctcccgggttcaagtgatttttctgcctcagcctcccgagtagctggggttacaggccctcaccaccatgcctggcttatttttgtggagatggggtttcaccacgttggccaggctggtcttgaactcctgaccttgtgatctgcacgcctcggtctcccaaagtgttgggattacaggcgtgagccatggccccctgccttattttttaatacaattaaaagaacccagtaatcctactcctagacctgtgtcccacagaaaaaagtgttaaacatgagcgtgtagtactagggcattcgttgtagtactatccgtagtggcaaaacgctggaagcaaattaaatgcccattaatagggtaattgatgacttcagatatttccatactgtggaatattatgcagtcattaaaaagaatgttacaactaattgcttttcctctcagaagcccctctctctcactagagaaagctgttctcctttctttcttctgcctattaaacctccattcctaaactcagaaagaaaaaaaaaaaaagagaatgttacgactaattgacttggagggacttccatggtgtacatttaaataaaaggtagatgtgaagtggggtatattatgtgatcttaatttcataacacaaaggaaaacatatagatccgtagataaggatatatggatatggaggagagaaaaggaaaagactcaaaactcacagaatttttgaagaaatgtatagctaaaaatctaagaaggctacagtcaaggccttgaggccagaagacaccccatcaaaactgagtaaaactagcccagtgtgggacgcagaaattctagtatgctaccaaaattacttacggattgctaccagttccttagaaggaaaactgaggactaatatttgtattttcagtatagtttagaattcttaaaaaatgagcaaacaggctgtacttggtggctcatgcctgtaatgccaggacttgtggaaactgaggtgagaggataacttgagtccagaggtttgagaccagtctgggcaacatgttggagccccatttctacaaaaaacacaaaaattagccagacgtggtggcacgcgcctgtcttcccagctactggggaggatcatctgagcctgggggaagttgaggctccagtgagccatgatcatgccactggactccagcaggggcagagtgagactttgtctgaaaaaaacaaaaaatgaatgagcaactaactctggctttcatgatttgtgcttataaatctttttatttatttatttatttatttatttatttatttatttatttattttgagacggagtcttgctctgtcgcccaggctggagcgcagtggcgcgatctcggctcactgcaacctccgcctcccgggttcacgccattctccagcctgagcctccggagtagctgggactacaggcgcctgccaccacgcccagctaattttttgtatttttagtagagacggggtttcaccgtgttagccaggatggtttcaatctcctgaccttgtgatccgcccgactcagcctcccaaagtgctgggattacaggcgagccactgtacccagcctataaattttttttataatgccctgattcccattatttgatgtatttggataaatatgtcatcctgtaaattgaaggattaaactgataagagcagaaaacagaaattagtacactagttgatctggctcagatatagtgcctatgtatcaggtgctccatgaatatttgttggatgaataaatgatcataaaactatataaaaatgaagaaataacagaataaaataatttgttctatataaatcctatgaatgagattgagtgggctaatagaatcctttccatctcaaaatgttctggaaagtcttgagtaaaagactcatcaaaaaaataattctgctttgtgcagaaagaagggttgctgacctttgaaggtgctttttgagtctttaacattctttagtagtatattccccaaagttaagaaattctagttagattttaaaaaattgagttaacatttaaaaaacagttttgttgaggtataatacacgtaccataaaatttactcaatttaagtacaaagtttgatcagttttagtaaatttatatagttgcacagctgtcatcagaggctgcttttaaaacatgtccatcactccagaagggttcctgtgtcaatggaattgctgggttatattgtttaagtatttgtttaaaaaaacagaaacaaatctgcctaacttctgcaggctatatacgagttaacatttccatgagcaatgcatgagggttgtgatttttccacatccctgtcaacacttggtttgtcagtttgtttttatttagctgttgtagtggatgggtagtgatggtgtatggtggttttaatttgtatttccttcatgaataatgatattgaagattttttatatgtttattttccacccgtatctctttggtgaaatgtctttataaatttttgtgaatttttaaatcaagatcattaaccaaatgagcccctcatttgggctcaagtgatccttccacctcaacctcccgagtagctgggaccacaggtgcaggccacgcttggctaatttttgtatattttgtagaggcggggttttgccatgttgcccaggctggtcttaaactcctgaactcaagcaattggcctgcctcacataagtattctcttttattttgaggattaatttttgttgttgtgaaatatatcctacctgtaaaagagtgcttaaaatgtcgtatgtgtgctttaaaggataatataatggaaacttgtgttcctactgcccaggttaggaaatgggttattaataactttgaaacctcctaaatgcctctctcctactgcattttccttcctccacatcagatgtagtgtttcttcaattttatattaatattttgtactttttatagttttaccatatatgtttatatatatccttaatatattagtttttaaaatttgttattaaccttcagtttattcattatttcaacactgtatagtatcttattgtagtaaagtatgtcaattaacttatccattccactagatggagatcgggattatttctggtttttagttattaaaaacaatgctgctgctgggtgcagtggcttacgcctgtaatcctagcactttgggaggccgaggctgcggatcatgaggtcaagagatcgagatcatcctggccaacatggtgcaactccgtctctactaaaaatacaaaaattagcaggatgcggtgctgcgcgcctgtagtccctgctactcgggaggctgaggcgggagaatcacttgaacccaggaggcggaggttgcagtgagccgagattgtgccactgcacttcagcttggcagagcgagacttcgtctcaaaaaaaaaaaaaaaaaaagctgctataaatatggccaagactaaggaaaggtaagtgaggtgcttagggttcacattttatggagtaagagtaagtaccttcttaaggtttataccctaggttcttcacatgcctcactttagtcctagccctgagcattattatgtaggtcttctgatgcaatatctaagagtttctctaaggtatacctagaaatagattgctaggtaatggagtaactttattacttacaggaaactatatggtggttgtaacaatttatgcttctgccaccagtcatggtggatatgaaattatgtcttaatgtgataatttacattgcaatttttttttttttttttttttttttttttgagacagagtcttgctctgtcacccaggctggagtgcagtggcgtgatcttggctcactgcaacctctgcctcctgggctcaagtgatccttccacctcagcctcccgagtagctgagaccacaggcgcaggccacacttggctaatttttgtatattctgtagaggcggggtttcgtcatgttacccaggctggtcttaaactcctgaactcaagcaatcggcctgcctcagcctaccgaagtgctgggattagaggtgtgagccaccacacctggctgtttgtttgttttgagcctgttcctcaggctggagtgcagtggtccaatcatggcttgctgcaactccgcttcctgggcttaagagatcctcccacctcagccttctgagtagctaggactaagggcacctgccactatgcctggctaatttctaaagttttttttatagaggcagagtctcgctgttttgcccaagctgttctcaaatttctaggctcgtgtgatcctcctgcctcagcctcccaaagtgctgggattataggtgtgagccaccacacctggctgatctatctgtcttaaactggagaattgcatttttttctacctcctttcttttttttaaaaaaactgaatttccatctgttacccctccctttctgctcctcttatttcatgccttggaagttatactttgccttcctttaatgagtaccaaagaaattaaaaaatacatgtttactgtaagtccaggcctaaatgttgctactacagggaccatcaaatgctttactaccatctattgccatctgcaaatgtatgccattgttgtttagttttgtagttcttaatgtattttaattaaacaccacaaattatgctttttgtttgttttattcagtcagtagatgcttagaatacttgcttattttaccaattcctttgcttattccactcctttgttctgggattatttttctttttcctaatatattttcattaaaagtttatttggtgagaatctaaaaactctcaaattctgaaagttttaaaaatttgcctttgttgttgaaaattagttttgatgggtgagagaatctagatcaggtgttagcaaacctttttttgtaaagggccagatagtaaatattgtgggctttgtgggccatagagtctctctgacaactactcagcaatgctgttgtaggacaaaagcaaccatagacattatgtaaacatgagtgtgggtatgttctcacaaattttgtttatagacactgaaatttgactcaattttcatgtgttaaaaattattattttttgaatttttttaaccatataaaaatgtaaaaatcattcgtagcttgtagaccaaataaacaggatggatttgacctgtgggccatagtttgctgacctctggtctaaattaacattcattttacttagtacctgacactggagtaattattcttatgatgtcttattgtgatattgtcttccatttttaattgttgaagagccagctgtcagtcttttttgtttttctttttcttcttcttttttttttgaaatggagttttgctcttatcgcccaagctggagtgcagtggtgtgatcttggcccactgcaacctctgccttctgggttcaagcgattttcctgcctcagcctcccaagtagctgggattacaggtgcctgccaccacacccagctaatttttgtatttttagtagagatggggcttcaccatgttggccaggctggtgttgaactcctaacctcaggtgatccacctgccttggcctcccaaagtgctgcaattacaggcatgaggcacggcgtctggcctttctttcctttttttttttttttgagacgtagtcttgctctgttgcccaggccggggggcgatggtacgatcttggctcattgcaacctctgcttcccaagttcaagccattctcctgcctcagcctcccaagtagctgggactataggcacgtgccaccatgccgagctaatttttgtatatttagtagagacggggtttcaccatgttgtccaggctggtcttgaactcctgacctcaagtgatcctctcgccttggcctctcaaataactgtcctttctttgttggtaatctggtgatatgttttcttgtttggctgcttttaagagctgcttcttgtctctggtgcagttcgctatgatgtatctaagtatgtatttattttcatttaacctggtcaggatttgttgagtatccagaaactaaggattggtgtttctcattacatctggaaaaatttgagccattatttttgcttatattgtggtatgtcataggaagttgagaaaagaaaaattcatttgatggttttctatgaggttatagtggaaaataactatctcccttttagaattgagtgctagacagtttctgtgtagatgatctcataagcttccttttatcaaacagcgatcacttttttggtttggctgctgagaagtatggcatcaagtataatactcatatgaggtgtttaagaactgagtatatttcttatgcacattttactatatactataattatacattaaaaatgcacattgtaaatattataaatatgtgttatacattgttaatagtttggatagcaaaagtatgacttgacatttgttttttaaaccatatttaaagtaactctatcacaatatggatttaatggattaattgcataattggtgagctactgattattcttgttatttggatgcttctttaagttagcaagtttatattgtggtgcttcaatatagactacttatttcatttcagagaactcaatttcctgtatctactgagtctcaaaaaccccggcagaaaaaaggtctgtatgcagtttcatggtatgtgtatgtttgcacagacagatttctcttttatttatttatttatttttttttttggaggcagagtctcactgtcacccaggctggagtgcagtagcacaatcttggctcactgcaacctttgcctctggggctcaagcaattctcctgcctcagcctcccgagtagctgggattacaggtgcacgccaccacacctggctaacttttgtgttttagtagagatgaggtttcactgtgtttgccaggctggtctcgaactcctgacctcaggtgatctgcccaccttggcctcccaaagtgttgggattacaggcgtgagccgccacgcctggccagatttctctctcttgttgattcttttatctattctatattatttcaaaatgagtgttgggaaaagaagtaatagtctaaatgttctgtcacatctagcttttatttaatagagttattagatattaggaggttggtttgacctggaaattatttaaatggggtttgattattatgtaagtgtgtactaattttctgcttctggaaaaaccactttgtgaagttccaggtatctttttgctttgttggtttctagtttaattctattgtgggtagagaacattctttatatggtttgttttatggcccacaatgtggcctgtgttggtgcatgtcccatgtacacttggaaataatgtgtattctgctcttgtaggatgtagcattctgtaaatgtcaattaggtcaagttggttgatagtgttctgtatatacttacaattacagatattcatattcttactgatgtagttactgattggaagggtgatagaagagtgttgaagtgtgcaaatgtaattgtggatttgtttctactttcagttctatcaatttttgatttgtgtattttgaagatctgttgttggatgcatatacatttaggattgtctgatttcttggtaaattgacccgtttgtctttatataatattcctcttcaatttctgataatattccttgtttgaagtctactttgcctgataatattttagttttagttatttatttagctattttagttttgctttggccagtctttgaatggtatcaacatataattttcgtagagtaaaattccctttttttagtacaaattctgagtttcgacaaatgaaactagccatgtaaccactagtagcaccataatcaagttataaaagtttaattactcccccaaaagtcacctttactttgtagtaaaccacttcttccattcccaattgcgggcagccattaatctgtttctttcttcctagttttgcctttcttggaatgccaaataaatggaatcatacattattattattttgagagagagggtctcgctctgtcacccaagctagagtgcagtggtgtgattatagctcactgcaacctgaaactcctgggttcaaatggttttccccagtagctgggtctacaggtgcatgccgccatgcctggctaatttttatgtattttttttgtagaaatgggggtctggctctgttgcccaggctggttttgaactcctggcttcaagtgatactccatcttcggcctcctgaagtactggcattacaggcatgagctattgcacctgggttatgtaaatttttcagtggcttttaaacctcatataatgtttgtttgttggtttgtttttgaggcggaggctcgctctgtcacccaggctggagtgcagtggtgcagtctcagctcactgcaacctccacctcctgggttcaagtgattctgctgtctcagcctcccaagtagctgggattatcggcatgaaccaccatgcctggctaatttttttatttttagtacagatggggtttcaccacgttggccaggctggtcttgaactcctgacctcaagtgatccacctgctttggccccccaaagtactgggattacaggcatgagccactgcatccagcccaatatagggaggtattaagaaaagagaagaactatcatccttaagtattaacgggactttaacaaattaaaaaagtagtactttgaataaaaagctgtcacattttactgtgaaatccttagactttttttatacctctagttcaggttttttcagctttggcatgaatgatattttgagcaagataaatctttgttggagttgtcctgtatattgtaggatggttaacaacatccctggcttctacctggtagatgacagtagcacttaattgtaacaaccaaaagtgtctccagatgttgccagttattccttctggggcaaaattgttcccacttgagaaccactgctctggttaagtagtgtaatacttggaaatagaaggcagaaagttggtaagtgcataaagaattcacacagaagttggattagcaagctgagagacgttatttgaacaagtagcaattggaggcattttgactgagaatggatgttgtgcctctccctcactctttcctcctcagcttgagaggtccatattctctcaaagtttgactctttagttttgagggtgatgactgccaactgtggaagggataaacagatttctgtttggtatttttgtccaaatatatcaggactttttcaagaacaggcaatgaaattattgatcagaactacttggtggttctgagaaaataatatgctacatgaggctactgaagtcctcttccttttgccccatgatgtaaccttaggtgactttcttctggctttcagttgaagatcttacccatcattgaggtgagcgaactgatttactgcttgagtctattttcttccttaaaggagtcttcattgaaaactttacccattttggggtggccatagctgaggatgagttttgtccacaacctgagacaacatactcactatgtaaaaaacctgatctcagcttgatatctggttttagactaattgtttaatagaataatttattattgtaaaatatatataaaatttaccatttttaagtgtgtaagtcagtggcattaagtacatttacaaagttgtgcagccatcaccactgtccatttctagaagtgtttcatcattccaaacagaaacactgtacccattaaacaataaatctccacatccccttgcctccccagatcctggtaatctccattctattttctgtatctatgaatttgactattctaggtttttcatgtaaggtgaatcatacaatatttgcccttttctgcctggcttattccactcagcattttcaagattcattcatgttgtagcatgtgtcagaatttcattcctttttaaggctgaataatattctagtgtatgtatatatcacattttgtttatctgtctgttgatgggcatttgggttgttttccttagagtctttatatgtcagtaattcttaaagaatttaaaagttgtagaaactaggaattttgtagatattctagaaatatgtcatttcctgtactgtatataataatttattctacagactaattactgtgtatatatttggttctcagacgtgattttgattttgtagatgctgtacatgctcttcacttcattaatcttttccttttgctaattttggttcttgtgtatacagaattatagagttacaaggtaatttagttgttacctaattcaccctaaagtctacatgaaaccactgtcacagtctttgataagtagttaccaaatctcactatttctactgtgatagtgaatgactttcattgattagctttctgaaagaatagtttatcttacttgtcttggtatcctcacctctgagtctatttgtctattgtaatctggcttttgctccaccgctccactgattaaatggatgagctaagcatttttttttttttccactgcaacctctgcctcccgggttcaagtgattctcttgcctcagcttcccgtgtagctggtattacaggtgcccaccaccatgcctggctaattttttgtctttttagtagaaacggggtttcactatgttggccagactggtatcgagctcctgacttcatgatccaccccaaagcctcccaaagttctgggattacaggtgtgagccaccgtgcttggcccaattctgtttaatttttgaggaacaatgttaacttctaatttaaatggaaggtagtatatatctaatttttccctattatttttaatttcaatgctagtaaatctttaaatctgaaatacacactcttgaattttgacagatatgtatactcatgtacatatttatattcctgtaatcatcagatcaaattaaacatttttatcacttagaaagtttcctcatgcctttttccagtaagtcttctgcttcacttcgccagatgcaaccaccattctgatttctgcctgtataaattgattttgaactttcctataataagttgtgcttgaacttcacacaaagggagccatacagtatctactatttagcttttggcagctttcatacaacatgttgttttggagattcatccgtgttgttatatgtatcagtagttcttttatttaaaaaatgctgtttagtattcagttgcatgaatataccaccgtttgtccattctcctgttaatgagtatttgcaatgtttccagtttttgagtactgtgaaagtttctatgaacatttatttatttagagatggagtctcgctttattgcccaggctggagtgcagtggtgcgatctcagctcactgtaacctccgcctcctgggttcaatcgattcttcagcttcagcctcctgagtagctgggactataggtgtgtgccaccatgcccggctaatttttctatttttagtagagacgggatttcaccatattagccaggctggtcttgaattccttacctcatgatccgcccgcctcagcctcccatagtgctgggattacaggcatgagccactgcacccggcctgaacatttatttactggttttttttgtgtgtgcatgtgtgtgcaagttttcacttgaataagtgcctagggagtggaattgcttggtcatatgtgaactgtttgttttaactttataataaactgccgaagtattttccaaagtggttgtacagttttacccgaccgccagcaacgtgtgaggattctgtttggctacattcttgccaacatttgttactatcagtctttttcatattagacttgctggtgggtatattgtgttttattgtgattttaatttgcattacactaatgactagtgatgttgaacaccttttcatatacttattggtcatatcttttgtgtagtgtctgctcaagttttttgcctatttttaaatttcttttttccttattattgatttgtgagacttcttaatatattctgaatgtacgtcctttgtctgttatatatgtggtaagtatttccccccagcctgtgttttactactttcattttattaaggtatcttttgatgatcaaaagttttaattttgatgaaggccaatttactattatttttcttttgttattaatgccttctctgtcttgtctaggaaatcttgatccttaccccagactgagttgtgtgtcctctcccttttctgcattaatattgcagaaattaattttttggttttagaaaatgtctaatttggctcaatcagtaatttttgatatctttctattgaaatatatatacagaaaagtacatacataaatcataattgtactgtgcagtgaatttttacaaagtaaacatatccatgtaatcaccatctagattaaggtatagaatattatcagtgccctccaggccgcctccttattccctaccagtcattaaccacccctcccaaaggtagtaacttgtatttaacttctatcttctacatcagttttgcctgcttttgaatttaatgtaaatggaatcatgcagtgtgtactttttaatatctaacttcgttgctcagaattatgtttgtgagattcatttatgttgttgcatgtagtagtggttggttgttttcttccttgttatatatattccattgtggggctctacctaagtctattcattttatacttgatgaacatttgggatatttttattgtgatgtattatgaataatgccaccatgaagagtcttgtacatgttttttggtacacatacatacttaggagtaggattttcagggtcaccaggaaggatatatttaggctcagtgaatactagcaagcaatttttaaaatgcggtcaatataatccccatgtgtaaaataaaggtgtacaaacgcacacacacacacttgctcatatgcttatatgtgcatagaaattccttgaaaatactcaagaaatgcttcacctctggtaagggataggaatggaatgggtcttttgtttagtatcctatgtgccctttgaattttgttttactgtaagtatgtatttttaagaaaaccaactagttatttttaaaaatcatttgaaagtcttcctactttgatatatgaaaaacactggttttaaaaaaaataatagaaaagctttaaaatcattattatttttttgagacggagtcttgctctgtcgccaggctggagtgcagtggtgcgatttccgctcaccacaacctttgcctcccggattcaagcaattctcctgcctcagcctcccaagtagctgggactacaggtgtgtgccaccaggcccagctaatttttttttttttttgtatttttaatagagatggggtttcaccatgttggccaggatggtctcaatctcttgacctcgtgatctgcctgcctcggcctcccaaagtgctgggattacaggcgtgagccactgtgcctggccgctttaaaatcattaatgttgcgttgctcagttatgtctaattgacagcccaaacatttacattgtaatattagaaaatcctttatgattgggcagaaacttggtttaatgtgtcaccttggagacctgggttatagtcctgcctcttccattaactacttgttgaatgtggacaatttacttaacctttagggccttaatttcctcctttataatgtgagaatgttctctgaattgcataactcactggccttacgtgactattcagtggaataataagagagaaaaactttgagatacatgcacacacacccttaagaaggatataattgttaaattttgctttgaggaaataaaataatctaagctataaagtaaaaccataattagctaatcttttatatgacttttttcttcctcatttcaagctaatgagaagcaaacaaactggatagcagcaatataattaaaaaattataggccagcttctagcatgtattcttgagtcaatactgactcagcccagtctcttcctcttccttcatcatcatttatgtacctgaacagagtagatgtttctcttgatcctgggcctgttcgccctcagatccattccttgccttctcttctctttttggtatagtgaggagctgactctttttttttttttttttttttttgagacggagtctcgctctgtcgcccaggctggagtgcagtggcgggatctcggctcactgcaagctccgccttccgggttcacgccattctcctgcctcagcctcccaagtagctgggactacaggcgcccgccactacgcccggctaattttttttgtatttttagtagagacggggtttcacctttttttagccgggatggtctcgatctcctgacctcgtgatccgcccgcctcggcctcccaaagtgctgggattacaggcgtgagccatcgcgcccggccgaggagctgactcttgcagcctccttttcttcccaggcttccgtgtcagcagtttctggctggattagcaagtggaggaactggcaggagattagaaggcaagaggaaagagaagacagggcttccctccccgaccttcaggcctcagagtcgtagtggttttttgctcatgcagacttctgatttgtctcaccattccctgttgggcctctcatttcttccattgcctgttctctgcattaaagtccttgtgtttcaaatcctcaagtggctttttgttaggctttgactgatacagggctcaaaatgatagtaatgaaaatgtcttacatttatattcttttcaagatttgttatctcttttgataccccaaatatcctattgaggtagaaaagtgttataattcctgtttggcatgaggaaattaacatttattgaatgactattttcagattctttggattttcgggtgaaaattttaggggggataaatggaggcccagagaagtgaaataacttgccctaggccccatagaaggctggtattgaatcaagattgaaattctgcatgtgaaaacttttacgtgctacatgtctgctagtcctggaagaaatcctttctttgatgagtattttttttaaaggctttacttgcaatatatttacaaaagccttagttatttagtaaatttttcaatgaaaaatctgaaccataataattttctgcttagtacttatatagctagcatactatccctagcattaatcaaagtgtcatgtaaaggtttgatttttgagcctaagcagaatttgaaattcttctaagagaatttagcacctagggcaaactacaggggagaattcttgaggtgtcatgtttattcacttctggaattgtttaaaatatgtcaggtgcatccttaaagggagaaagaagggggaagagatgttacaaaagagtagaatggggcaagagaagtggcaagggagtattgttgctaggttgccagccttctgcccccactgtcttggtgatggtggaggggtagtgtggcagctgggatatgaatgaggtcttttttataactcactaaaagccattaccttgtcttcatctcgtcagctggctacctgacctctgtggtaacataggctcctgaaatgtagcattggagatgatcactgtgctttattgcaaaataggggagactctgctctgcatttacatgcttatgttttgtggaggatctttcaactagtaattctcataatacctgtgaaagcatataagaaccagtatctccatttttagggggagttggagtgagcaatgatttggaataccagaaattcaacttatatatttacaggtaaaattctaattgtaaattcaggattcatagattctagggatttctgaggtatccagaattccttcatctttgatgataagtagataataatggtaataaaaataacagcaacaggcccagcacagtgacccacacctgtaatcccagcactttgggagactgaggcaggtggatcacttgaggtcaggagttcaagaccagcctggcggacatggcaaaaccccatttctactaaaaatgcaaaaattagctgagcatagtggcatgtgcctgtaatcccagctactcagtaggctgagtcataagaatcatttgaatctgggaggtggagattgcggtgagctaagatcgcgccactgcactccggcctttatgacagaactcgactccatctcaaaaaaacaaaacaaaacaaaacaaaacaaaaacaaaatgcaaaaaaacagcaacaataataggtaacatttctttaaggcctactatgtaccaggcactatttgaacctctttatatattaggtaatacgatacaactctatgagaatgagtattttatttcctgacccttctatttaaaagtaaaaccccccacccggcactgtttctctttcctgctttatttttctccatagaaaaatatcactcataagtgtaacatactttattatctgtcctgtgtggtagtagcccctgccctcaattataaactccatgaaatcagggagtcagttttgttcactgctgtattcccagtgcctagaacagtgcctggaatcatggtaggtacccagcgaatattggttgaatgaatgagtcttggttttacagatgaggaaactataaatttcccaggtcacacatttggtaataggacagttgtgtacactgaaatgttctctaaaatatttgatggaacgaaaattagcttttggacagctacatctccaagagtgtgaaatgaccttcagcactggatttggtggattttcctttttctaatccctagagttccatttaatgagcgtttgggttcttgagctaccttacaaattgaacacttttttctccagctttcactcaagaaacacaaaacatggcttgtcctttttttttttttttttttttttgagactgggtctcactctgtcacccaggttggagtgcagtgcacaatcatggttcattgcaacctctgcctcccaggctcaagcaatcctcctaactcagcctcctgagtagctgggactacaggcttgtgcctccactcctggctaatttttttgtattttttgtagagatggggtttgtccaggctggccttgaagtgctggactcaagtgatccgtccacctgggcctcccaaagtgctggggttacaggcgtaaaccactatagctagccctgattgtcttttattgtgagattttaataacagctaagacttgaaaattaacattttataaattttcttttagactacttagtgatatactaagtatctaaggtttgtaatacttagtataaactcaaaagggttcagtgcctcattctcttttactctttccctttagtagataggtgacagaggactgggtcatgcagttgagacttggtccaagatgacttagtaagctacttgtcccagaactatttatttatttacttatttttgagatggagtctcgctctgtcgcccaggctggagtgcagtggtgtgatcttggctcactgcaacccccgtctcctgggttcaagcgattcttttgcctcagcctcccgagtagctgggattataggtgcccgccaccactcccggctaattttttgtatttttagtagagacttggtttcattgtgttagccaggattgtttcgatctcctgacctcatgatccacctgcgtggacctcccaaaatgctaggattacaggcgtgagtcaccacccccggaccctggaactatttatgacggtgcactttatgcacttaacacactcacatgtctttaagcttggtgactcgtgtggctttttcgaaggagatttgattctggaagtggttaagtaggatgtgaatggctaaggtctggtcattggtgaagcctaggggaagaaaagaaaggaaacacaagtcttagaagaatttcagatcggccccaacgactagaagggtggttctactaagaaaatgtgtgtagtcagaaaatgaagagtcagttgcttaaaattttactttttttcttgttcctggcatgtaaagtcatatccatactttctgttataatttcttcttacaaattccattgataatccctattcttggatagcaatgagcagcattacttcttttttatttttttaaaaaaattaaattttttgttgaaatgagggtcctgctgtattgcccaggctggtatcaaatttctgggctcaactgatcctcctgcctcagcctcccaaagcgctgggattacagttgtgagccagtgtgtctggttgtaccttttaatttttgtgttcaggcaacattaactctgagtcacagtaagctttttttttcttcctgtcatattatggacatagaagttttttggttttctttagattgtttctccttaggttgcagaacatcaagaaatggattacagtcattttcctctcttccccatgctcttccctttcttttccttttttcttttctttttttttttttggagacagaatcttgctctttggccgaggctggagtacagtgtcatgatcttggctcactgtaacctccccgcaccaggttcaagtgattctggtgcccaagcctccctagtagctgggatgtcaggatgcgccaccacaccctgctaatttttgtatttttttgtagagatggggtttcaccatgttgtccaggctgacctcaaactcctggactcaaatgatctgccctcctcggtctcccaaagtgctgggattataggcatgagccaccacatctggcctcttttccatttttaaaaaggactgtctccaacatattaaaattcacaaaaaataatataaacacacatgtactcactggctaggcttaataaaaaacatttagtcatgtttactttaaagctttttatttttttgagaaataggcattaaagagttgaagtctcctttctgtcttttcataattctgttcttccctcttccttccttgagatcttcactattcttgggttaatttggatctttctactccttgttaccacagaaaagtaattcttaatgaatttgaccatattttaaacttctgatttcagtgggcaggtaactcattttatggtttctgtattgtgagccattttcaatgactcaactagatttttttcatcgttgacttctcatttctgggcaacagcataatgttctcatttgagctatttctaaagattgtgtttaactatttaaaatatttgtggtactctgatcatcagatgtgatttttttttttttttgagacggagtctcactctttcaccaggctggagtgcagtggcgcgatctcggctcactgtaacctccttctcccaggttcaagtgatgctcctgcctcagcctcccaagtagctgggactattggtgcgggttaccacacccggctaattttttgtatttttagtagagacagggtttcaccatgtttgctaggatggtctcgatcttctgacctcgtgatctgcctgccttggcctcccaaagtgctgggattacaggcgtgagccactgcacctggccagaagtgatattaactatcttatatgtatatttctgttgcgggaagtcaggggccccaaacggagggaccggctggagctgtggcagaggaacgtaaattgtgattatttcatggacacttaccagttcccaaataatattcttataatttcttacacctgtctttaatctcttaatcctgttatcttcgtaagctgaggatgtacctcacctcagggccactatgataattgtgttaactgtacaaattgattgtaaaacgtgtgtttgaacaatatgaaatcagtgcaccttgaacagaataacagcaattttagggaacaagggaagacaaccataaggtctgactgcctgtggggttgggcaaaatagagccatatttttcttctttgcagagagcctataaacggacatgcaagtagggaagatatcgctaaattcttttcctagcaaggaattttaataatactctggagaaggaatgcattccttggaggaggtctatagggcatgtctgtcttatgctgttgacataaggactgaaatacaccctggtctcctgcagtaccctcaggcttattagggtggggaaaaaaccccaccctggtaaatttgaggtcagatcagttttctgctctcaaaccctgttttctgttgtttaagatgtttatcaagacaatttgtgcaccgctgaacatagactcttatcagtaattttgcttttgccttttgccttgtgatctttgttggacccttatcaggagtttctgattttgcccttgtcctgtttcctcagaagcatgtgatctttgttctcctttttgccctttgaggcatgtgatctttgtgacctactcactgttcttaggccccctccccttttgaaatccttaataaacacttgcttattttgcagctcaggtgggcatcacggtcctaccgatatatgtgaggcccagctgtgaaattcctctcttcgtactcttatttcttagccggctgacgcttatagaaaatagaaagaacctacattgaaatattgggggcaggttcccctgatatatttccttagtgacattcctgcaatctcctttagaaagtctttctgttcaccttctataaccagggaaggagagattgagaagagacgaaggatgattttatgtttttcagtcccagtcattatttgatgagaaactgatattacaagctttaaaaactcaagatatgtattcaacatgtagtagtagaacaagtatcttagtttaatagtctataaatttttgatgcactataatatattattgtagtcagtagcatcaaaattttaatgtgatattgcagtatgtttatggttagtttagacatgaggacagtgctaaaggagaaaatctaatgactgtgttgtttgttttgtcaaaatatgctgcctagctccagagtttcctattttggagaagcagaactggttgattcatcttcattatatccggaaagattatgaagcctgcaaggtaagagattgccataataataaaaatgagaggcaggatgttgggtaggcaactaacagtgcctgctaaacagagtgtggcagtttatatctcagtgataaaacatgaattccttcttccccatacttcatacactggttatcttttgctatggtagtgatgtttaacatacaacctcaatatttcagtggcccccaacaaacaaatattaattgctcatgggctttcagatcagctgtgggttggctgggtttgactgcaggctgtgggtcaggtttaggtgtgttccatgtgtcttctcatgtcaagagcaaacaactctcttggacatgttggtcttctggtggaggcagatgttcaactcagcatattaacttttttatctttggatagatgaaaaatggtattttgtcgagtttttttttttttttttttttttttgagatggagtctcactgtcacctaggctggagtgcagtggcatgatcttggctcattgcagcctttgtctcccaggttcaagcaattcttctgcctcagcctccccagtagatgggactacagatgagtgtcaccatgcccagctaattttttgtatttttagtagagatggggtttcaccatattggccaggctggtctcgaactcctgaccttgtgatctgcccgccttggcctcccaaagtgctgggattacaggcgtgagccaccgtgcccagccctgagttttattttttaatttctctcttactgcaaggttgatcatcatgtgtatatttaaaaaccatttgtatttccctttctctgtatctttggtgacataccatatgtgttacaaacttgcaggcagacagtggtagtactaacatgcagaatgtatccttggtgtcatcttttttggtatccagagctttgtgacccatctaaggtttttaatttatacccatggcatttatacctatggcaatgcacagaactaattcatactggtatgacaaagattcataccagtttttttttttctttttttaagtggagttttgctcttattgcccaggctagagtgcagtggcgcaatctcggctcactgcaacccccgctttccagtttcaagcaattctcctgcctcagcctcccaagtcgctgggattacaggtgcccgccaccatgcccagctaatttttttttttttttttgtatttctagtagaggtggagtttcaccatgttggtcaggctggtctcaaactgctgacctcgtaatccacctgcctcagcctcccaaagtgctgggattacaggcgtgagccaccgcacccggcccataccagttttttttgacaccgctgatccgaaggcagataccagtatgaatctttttttttttgagatggagttttgctcttgtcgccaagggtggagtgcaatggcgtgacctcggctcaccacaacctccgcctcctgggttcaagcgattgtcctgcctcagcctcctgagtagctgggattacaggcatgtgccaccacgcctggctaattttttgtgtttttagtagagatggggtttttccatgttggtcaggctggtctcaaactcccgacctcaggtgatctgcccgcttcggccacccaaagtgctgggattacatgcgtgagccaccgcgcctggccaccagtatgaatcttgaaaggttctctttctttttcatctgtgataatacttggaaatcttatcacacttttcttagcttgcctagttagattttagacaggggttggcaaactttttctgtaatgggccaacaatattttagggtttgtaggccacatacagtctctacatcatatttgttatcttattttttataaccctttagaaataaaaaaaccactgttagcttgagagctgtacaaaaatatacagggcctgtaagccctgtagtttgcaaatccctgttctagaagaagtaatcacaacaagggagttgaaattttaagaaactgaatgaactaatactttactaggcattattaatactctaggtttttttacatatgattcttgtccacgtctgctttttcattactatttgttttcttttttttttcagacagagtctcactctgttgcccaggctggagtgcagtggcgctatcttggctcactgcaacctccgcctcctgggttcaagcgattctccttcctcagcctcctgagtagctgggattacagacacgcaccactactgcccggctaatttttgtatttttagtagagatggggtttcaccatattggttaggctgatcttgaactcctgacctcataatctgcctgccttggtctcccaaagttttgggattacaagcatgagccaccgcacctggcctgtccatgtccactttttcttaaagacacctgaagaaacttaaccactgctcagaagcatttttctccctctttcaggctgttatcaaagaacagcttcaagagactcagggattgtgtgaatatgctatctatgtccaaggtaagacacatacttcttgtcttcttgctagagaaatacacttttcctaggttcttgaaaaagatcaggcaattgaagaaacaagttcaagtacagtcatgcaccacttaacaatggagatatgttctaagaaatgtgttgttaggcaattttgtcattgtgtgaacattacatggagtgtacttacacaaacatagatggatgatatagtgtactatacacatgatatagtctgttgctcccaggctacaaacctgtatgagcaggtgttataccgaatactgtaggcagttgtaaaacagtggtaagtgtatctaaacatagaaaaggtactgtaaaaatatggtataaaagataaaaaatagtatacctgtatagagtacttaccatggatggactggaagttgctctgggtgagttagtggtgagtgaatgtgaaggtctaggacattattgtatactaatgtagactttatgttgtatactaatgtagactttataaacactgtacacttagcctacactaaatttatttaaaaatattttttctacaatgataaattaactttagcttactataactttttactttataaactttaaaactttttggctcttttggggtaatacttaaaacacacaacaacattgtacatttgtacaaaaatagtttctttaggtccttattctataagcttttttctttttctttcttttttttttttggtagagagacagagtctcactttgttgcccaggctggtcttgaactcctgggctcaagcagttctcctgcctcagcctctcaaagtgctgggattataggcatgagctacgacacctggccctttatgctattcttaaaactttttatttttttacttttaaacttttttgttaaaaactacgatacacacactactacagtggtggtactaacatgtggaatgtgtccttgctgtcttttttggcattcagagctttgtgacccatctaaggtctttgtgacacacacacacacacacacacacacacacacacacgcacacgcacgcacgcactggtctaggcctacactgagtcaagattataaatatcactgtcttccacctccttatggaaggtcttcagtggcaataacatacatggagctgtcatctcctataacaataggaataccttctggaatacctcctgaaggatctgcctgaggcagttattcttttttttagtaagtggaaggagtacactctaaaataaagattaaaatgtatagcgtagtaaatacataaaccagtaatgtagtcatttattatcaagtattaagttctatatatatgtaattgtatatgctgtacttctatgtgactggcagcacagtaggtttgtttataccagcatcactacagataggtaagtaatgcattgcactgttttgattgctatgacgtcactgggcaataggaatttttcctcttcattataatcttaagtgatcatcatcatttatacagctgtcgaccaaaatgtcattacaggtgcatgagtttaaatgttccagaaaggttttattcagtattaatctttttatggaatctgaatataattactgtgttggatttgacttcagaaatgactagtaatgttaaaaaattgctatgattacccattttttagtttctggctagtgttttttggaatggatgcttaggattcctgcctaatgcagtgatttcagggccaaaagatgcttttggaaggattgcttgtaatcaagctaaaagagatgaagaagagcttgaggatttctgtaaggtgaatcaggatgaggggaagaagcctggaaataaacaagataaagcagagcataaattcagctcattagaaaccaaagataaggaccactcacttactttttttttttttttttttttttgagacagagtcttgctctgttgcccaggctggagtgcagtggtgcgatcccagctcactgcaacctctgccttccaggttcaagcgatcctcctgcctcagcccccctattagctgggattacaggcacatgccaccatgtccagctagtttttgtatttttagtagagacaaggttttgccatattggccaggctggtctcgaactcctgacctcaggtgatccacctgccttggcctaccaaagtgctgggattacaggcatgaaccactgcacctggcccactgacttaaattttcctctttagtggcataagtagcattcttagtttttccaggaactttctttttgactcttgggtgtaaataaatggttttgtttaccattcattgcatttgtagtcttcagattaacatataattttctgacataattgttaagatattgacaaatttaggacatcatggcaaaaaatgctcttattcccagtgtcacaagtatcagactttcagtgcctgataaattcttctggaaacataggcctaggaaaaacctctggttctaattggttgttacactgacaactgaagtcttaaatgttactttatcctttgccagaatctccatgttgaatttgaggtattgattccatttgccccatttgggggttcgctctgaaaactatcagttggaagtaaattatgataaatgaagcatctgatggggaagccccaaaatgttgttaatgtgaagagtttgtgtgataatttgcaaaggaactgattatctatgtgatggatcctgggagtagagagagaagtaggtaggtttgagctaccttgctaaaagacagttgagcttgtcagcagttttggttgttgtttcagcctgtccaaagccatatctgattgttttaaggatacagttgtccaaaggatttacttgatgtggtttcccagttttctcttctccaatttttctgaccccaggctccattcttcccagaacatggttttacttttttttgtattttctgtttcttggcagcattgatatttcgcctagaaggaaatatccaagaatccctagaactcttccagacatgtgcagttcttagtcctcagagtgctgataacctcaagcaggtggccagatctttgtgagtattggcaacctggaggccctagggcactcacagagaacagtgtaaaatgcattcctaggtccagcctgctgctggcagctgcatcagcctgatacacaagtgggggaatggtttaataggtacagtgggattcactctgaagagcatggattaagtttgaaatttgagaaaatgagataactagtgttaaggaactaagcattttaaacactgtgcattctagtttgatgggggaccaatattgtttatcatgtaaatagagacaccttgtaccctaagtcttctaaacttattggcaatccttggaatttttctcatctactcttctaacacttagtatttgtcacacagtaagtttttagtaaggacagagagttcctgacttctgatggttcaacttacataatttttcaactttacaatgatgtaaaattgttatgtattcagtagaaactgtacttcaagtatccatacagccattccgtttttcattttcagtatagtattcagtaaattacatgagatattcagcattttattataaagttggcattgtgttagatggttttgcctaactgtcagcaaatgtagttaagaaagtggagataggaactccatggaacagagtaagtgttctgagcatgcttaagataggctaggctatctatgatgtctggtagagtagatgtattacatgcatttttgaattacagtgttttcaatttacaatgggtttactgggatgtaaccccatcataagttgaggagcatctctatttgttgagtgaatgtcctaaagattcctagatggaaagaatctcaagtgtttataaactactaggtactcccttttcagtcctttgttccatggagttcctatctcccctttcttagccacattgccattcatacctgtgttgtttttgcatagagcttggttttccctgtttctctctaaactcaggatccaatatcaaggaaagagacttagtcttggaaggaaaggatgtgtccctaatgggtgatgataaatgatggtagttactgcttaacatggtatatcattaggcttatttcttttttggtctgcatttatagtacattgtagaagaaaaattccacaagactctcactaaaattggtatagaatgagaccaaggccttggaacagctgccagtgcaatccctactaagagagcttctgctgttagtgtatagcagcttcactgaccaaaccagcacaaccacctcatagagaaaaggcttctagaattctctgctggatgaaatatgattaaaatgtgggactagtagggttagtcttctaagaattttgaggtaataattatggaaaatatatcttttacagatttcttttgggaaaacataaagctgccattgaagtatataatgaagcagctaaactcaaccagaaagattgggtaagtagagaactttcagttctttcttattagtaaacttgctaatggttccatttatcatctggctgtcttatttctgaattcttacattccaaaaatgtcttgattttaacctcatacttaattcatgatttgtataagtataggatcaaaaaccatgtttcctcataactttgcaggcattgctgcatgattttctagcagtttgctgacgagcagtctcttaccagtctgattcttgttgatgacccctagaagctttgggtatttttttcgtcattggaattccacagtatcagcaataggcatctagttgtgtttcatgtctttttcccgtccccatctgtgtgacattcaattgactctttcattctgaagacccttgcctttctttgggtcagggcctttgagtagttctttatttttcccctccccttctctttgtgtcaattgaggattgtgtgtaaatgcaacagaaaatttgactaaacattggctttacaaattcgtttttgtttttttttttaattctcatgaaacaagatgtccaggtaagtagttgctggcattgatttggtggtcctaggatgtcaagactgagagtttttcctcatggttacaagaagactgctgcatccagcatcatatctgcattctagggaggcagaaagagaaagcaacaaggagaaaaggacagagcctatactgggaaagcacaactttcccagaagtcccccacagacttccacttatgtcatatcagctccccttctataaggaaggctggttaaatgtcgtttttaatctggtcacactgccactctaaacaaaattagggttcttttagtaaggaaaaagagaagagtaggtagcaggtaggcaagtagataactagcagcatctgccacactgttttccattctctatgagagatgttctctaactattctctacaactcttaacttgcctctcattttctacctctgtgtccttttctttgtgtgtggtgcgggggggtacagaggctcactctgttgcccaggctggagtgcagtggcgtgatctcggctcactgcaacctctttcttccaggttcaagtgattctcctgtctcagcctcctgagtagctgggattacaggcgcctgccaccatgcccggctaatttttgtatttttggtagagacggggtttcaccatgttggctaggctggtctccaactcctgacctcaggtgattcacctgccttgtcctcccaaagtgttgggattataggtgtgagacaccacgcctgaccctccttgtcattttattatatgttcaggacatgtattcagtcttatcttccatatcatcatttttgtttttagctatttgtattctgttatataccctatccatccaatattttttatttcatttccttttattgtatttttaatttccaaaaatcttgtcttttcttcaatgtctctgattcttgaagttcttttctgcttctcagaattatctttttcttcctctctgcattttggttcttctattttatgctgttggtatttttcaagtatttggtgattctcagagagacattcatatctgtgagtgaagaactagatttattagtacagagaattagcatggatttcctttgcagttcttacggggcactattatttttgaagtgtgttcaatttgttagtcgcttttcttctgtacatcggaagattgagttgagtctttatgccatggagtatgttatagctaacagccagagtgaaactacagatgaagaaaaattcatgtacttttcattcagtcggtttttcaaaaaatgagtatgtctgctatatgccaagcactgatctatgccctggagatgcaaagatggactgttggattataagatactcaactagaataggaaatgaaggaagaagagcaaggtttggaagaaggtgatggtaagaaatcagagttaaatcctgtctttcagaggattttggatatgataagttttaggttctgaggggatatctaaattgagatgtgtccagtaggattggatatagaaatctgaaactcaagtgttttggagtagagatgtgaattctggagtcagcaacataaaggtggtaattgaaaccattagattggttgacattaccctgcaatgagctgaggatgggaccctggaaaaaaagagttttttactttttttttgtctgtttgagacggcacaggaaaagttactgctttaatgcagggaggaagccctgcattctctatgggggccaggatcatgggggtggccagtgccacaaatggtcaccatacaggccagggaggagccagggcccaccaataatccctggaacatccctggatgctagcagttttttactttctaaatttttttttttttttttaagagacaaggttgcctaggctggagtatagtggggtgatcatagcttactgtaacctccaactcctgggctcaagtgatcctcctgcctctgcctcctgagtagctggggctacaggtgcaagccaccatgcctggctaaatttattttgtggaaatgaggtctcatgttacccaggctggtctcaagctcctgtcctcaagtgatcctcctgctttagcttcccagagtgctgggattacaggtgtgagccatcaaaaagcaattttgaaggactgagcagaagaagagaacccatagagggagatagggaagaggtaaagcaggagagctcagggtcacagggggaatggaacgtatttcttaatctatccagttggttgaaagagctcatttggtattactgactcacttgggataaccatcccattgttactagtagatgtgatcattcacaaaacagccattctttttttttttttttgttgagacagagtctcattctgtcacctaggctagagtgcagtggctcaatcttggctcactgcaacctctgcctcctgggttcaagcgattctcctcccccagcctcctgagtagctgggatttacaggcacccgccaccatgcccagctaatttttgtatttttagtagagatgaggtttcaccatgttggtcaggctggtctcgagctcctgacgttgtgatccgcccaccttggcctcccaaagtgctgagactacaggtgtgagccaccaccttttttttttttaactttaaaatttttctttaaaattttccccttcatggcatttttattttctttttagaatattttaatgattttgaattttacttttattaatagcccttacctaccctacatatttcataagtacctgtagaaaaccttatagtagctggagcatggtggctcatacctgtaataccagcactttaaaaggatgctgagtggggaggatcacttgagcccaggagtctgagaccagcctgggcaacatagagacccagtttctaggaaaaaaaaataaaaattagtggtcgtgtgcacctgtagtcctagctattctagaggctgaggtaggaggatcacgttagcccaggaggttgaggctgcagtgatgcggtgaactgtgattgtgtcactgcacttcagcatggaaagcagagcaagaccctgtctcaaaaaaaaaaaaaaaaaagaaacaaccttgtagccctactttcttggactcatcagggtattccacagtcttgctgcaacaggggaatagtaattcctcctgccattatcttagttgacttttggaacagttctgttaagtagggagaatttcccccattgacaagtgaggaagctaaggctttggaagatggaagttgctacagtgaggtagttgctgagccagaactggaattcagacctgtgatctaggatgatctaagattcctcgtcttaagactgtgatcttttccactgtaccaactgcctttgcaggatgtctgctgggttcccttacctcctgaaagataggatttgactctgatttgttctgttgccctttccaaatttcttttgcagttagtttgttaaaggtatattgctgccttctcaactatctatgtcaaagattttaaaaggtcagaggttagccttcaggacatctatttacttacctaccttaacaattcctactgtagagcaggacatttaaaggacaagaaaggctttatttctgccttgtctctctccatgcatgcattcttatagcatgacaaagttggcagtatacaagttttggaagcaggcctgagttcaaatcccaatgttctataatatggacatgatttgtgattgaataaaaaaaatttttaaatgtgcggcatttgtgagataattggaaattttaacgtaattgaatatctaatatcaagcagtcactactttttttcgagtgtgacgatgtgggtagtttaagaaaaaggccttatcttttagaaataaatacggaaacatttgtggataaaacgttgggctgttatttgcttacaaaagttgtgggagtagatggggtgtggattggatggttgttgggacaggatgattagtacctaattctgtctgcacttacgtatgattgaaattctccctaggatgtagaactaaaaaagaaaaaaaaaatcccaatactctctgtcttaagttaggtaatctactcaacctctctgagcttcaatttccttatctgtaaaattggaaagattataactatgttgcaggtttgctgaaaattaaagtaacatatatgaaaacatctggcataaagcctgatgttagtaggtgctcaaccaatggttgctgttttgttgtttttactatttttggagacttggaaaacattaaatcagttgttatctctgagcctgggggtccatgtttcctcagacagggacacatctccactactaatagggtagttcttactatgtttcccaagagcattttccttacccttgctttctccttttccaaagctaccttaaataaagggaggtttattataaaggaatttgagagtccataaaacagtatcaagagatgcaggttggtcttttagtgaagcagaactggaacgcttcagcatccaaggtagctactctgccttttctgcttcatcttttctttctgtagatcaaaggttggcaaactttttttgtaaagggccagttaataaatattttaatttgtatagcttcatacagactctgttgcaacgacttaactctgcagttctaatgcaaaagagccatacaaaaacaatagttgtgtctgtgttccaatgaatctgtacttataaaaaagggcagggaatggatttggcccatggaccatagttttcccatgtcagctctagacttctgcagatggctccaattacatgtattccatcacagcagactccaggtggcgctgtcagtcctcaagttcacatcacctagtaaatttagtacttgtaactaactagctctcttccaattccagattcctagggaaaggacttcagttgtgtcaggtgtcactatccaactgtgttgccttaagggcggaaatgtgtggctagcagccctctcagcaggggctgtgggtagtctctcctgagaagaaggagcaaagggtatgggtgatgggcaactcttaaagaaaaaaggtatggggatgggctgggtatgtgccccagggttccccatagatccaggaagatcacctgtttattctgcttttatttcttataatctgtatttttttatgttgaggaacttatttttaacaattaatttgagtatgaactctaataaaaagctgactgtaatgcatagtttaaagtttaaaccttgccgagcaataacaatctctagatgtctgttgtttcactctaatacttactgtggaattacacctgagttgttttccttcttttttatgagcctaggagatcagccataacctaggagtttgctacatatacctgaagcagttcaacaagg

SEQ ID NO: 15483 - DNA, 41801 bp, Homo sapiens
gacttccggccgcgcagcggtgggctgagctaaaatggctgaggagagagtcgcgacggtgagcgccgagattctctttagttgcccggccgcagggcaaggcaagctggcgggtggcttttgtcccatgcagcggttcctggagagaggcggagctgggtgccgagcgtctcagggtgggcggggcgacacggtcccctttttactgtcccgggaactggtcgcctggggcaagtctggatacttagcagcacaggtcctgttctaggactgtagtccctcttggggtgcgctggacggagaagggagacttttcaccagtaatggctcttaccgtagtgccatctttttctgtctcgggggtttggaaggtaatgactagcacttgtgtagacagttcctgttaatcccgtgaattgggaatttaacatgcctggaagcttgcagcgtcactgccttctgccagtggagcgggactgtgttttttctgtggtgattaagtttaggaaagtacggttttggaattcatctgaaggctgagttgggcgttcactccacagaactgctaatatagaggaacccgatgaattcaggatgacctagtcgctattttttgaggcatatatctataattggatctaatttcggtaaagtgccaagtgtgaagctttgtttaccttgctttagtgttgggtttgaaagcctgttctgtccatttgttagaatgattttaggtattcggaatttattgtctttcgaaaaacgccctggaaaacagtacaaatagcagcctttggctgttttacaacttagttttggctaagcagcaaggttagtgttattgttagagggccttttgtttgttttctactctcatttgcagagtagtcatattattctagtctaattagaaaactctgaagacagaaacttttttttttgagacggagtgtcgctgttgtcggcccgggctggagtgcaatggcgcgatctcggctcactgcaacctccgcctcccaggttccagcaattctcctgcctcagcctccggattagctgagaatacaggcgcctgccaccacgcccggccgaaacatttttattaagctaagaaatttaaaatagctaggccggacgcggtgcatcacgcctgtaatcccagcactttgggaggccgagacgggtggatcacttgaggtcatgagtttgagaccatcctggccaacatggtgaaaccccgtctctactaaaaatacaaaaattagcggggcatcgtggcgctcgcctgtaatcccaggtacctggaaggctgaggcaggagaatcgcttgaaccccggaggcggaggttgcagtgagccgagatcatgccattgcactccagcatgagcgacagagacagactccttctcaaaaaaaaagaaagaaaaaacagattttaaaataattaaataggccaggctcagtggctcacgcctgtaatcctagcaccttgggaggctgaggtgggtggatcgcctgaggtcaggagttcgagaccagcctggccaacgtagtgaaaccctgtccctactaaaaaaatacaaaaaattagctggacgtggtggcgggcgctggtaatcccagctactagggaggctgaggcaggagaatcgcttagaacccaggaggcagaggttgcagtgagccgagatcgtgccatttcactgcagcctgggcatccagagcaaaactccgtctcagaaaaaaaaaaaaagtaaatagcatggttaatgttactgggttttaaatattaaaaacataggaaagaaaatacttccactccagcctgggtgacagagcaagactccgtctcaaaaaaaaaaaaaaaaaaaaaaagaaaatacttctaagtaatcttaaagtgtaaaagataatgggtaacataacattgctacaaatatagcttatcctctagtgctcatcacaagtgtttgtgtaatagaatatgaacttgagtctgtgacggcagaattgtcatgtacatttgaatgtctaatactgttttaaagagaatagcttttgtttcgatatgacttagcaattaagcctgaagttaactgttttcattgttgtcaaatttattgctagtagtgttacgtttatagtaattttcatcttttcaagttaccaatgcatggaaatgtgaatttctgtccttttaggaagtggtattttatcttttttttttttttttttttgagacggagtctcactttgtcgccctgtctggagtgcagtggcgtgatctcagctcagtggaacctctgcctcccgggttcaagtgatttttctgcctcagcctcccgagtagctggggttacaggccctcaccaccatgcctggcttatttttgtggagatggggtttcaccacgttggccaggctggtcttgaactcctgaccttgtgatctgcacgcctcggtctcccaaagtgttgggattacaggcgtgagccatggccccctgccttattttttaatacaattaaaagaacccagtaatcctactcctagacctgtgtcccacagaaaaaagtgttaaacatgagcgtgtagtactagggcattcgttgtagtactatccgtagtggcaaaacgctggaagcaaattaaatgcccattaatagggtaattgatgacttcagatatttccatactgtggaatattatgcagtcattaaaaagaatgttacaactaattgcttttcctctcagaagcccctctctctcactagagaaagctgttctcctttctttcttctgcctattaaacctccattcctaaactcagaaagaaaaaaaaaaaaagagaatgttacgactaattgacttggagggacttccatggtgtacatttaaataaaaggtagatgtgaagtggggtatattatgtgatcttaatttcataacacaaaggaaaacatatagatccgtagataaggatatatggatatggaggagagaaaaggaaaagactcaaaactcacagaatttttgaagaaatgtatagctaaaaatctaagaaggctacagtcaaggccttgaggccagaagacaccccatcaaaactgagtaaaactagcccagtgtgggacgcagaaattctagtatgctaccaaaattacttacggattgctaccagttccttagaaggaaaactgaggactaatatttgtattttcagtatagtttagaattcttaaaaaatgagcaaacaggctgtacttggtggctcatgcctgtaatgccaggacttgtggaaactgaggtgagaggataacttgagtccagaggtttgagaccagtctgggcaacatgttggagccccatttctacaaaaaacacaaaaattagccagacgtggtggcacgcgcctgtcttcccagctactggggaggatcatctgagcctgggggaagttgaggctccagtgagccatgatcatgccactggactccagcaggggcagagtgagactttgtctgaaaaaaacaaaaaatgaatgagcaactaactctggctttcatgatttgtgcttataaatctttttatttatttatttatttatttatttatttatttatttatttattttgagacggagtcttgctctgtcgcccaggctggagcgcagtggcgcgatctcggctcactgcaacctccgcctcccgggttcacgccattctccagcctgagcctccggagtagctgggactacaggcgcctgccaccacgcccagctaattttttgtatttttagtagagacggggtttcaccgtgttagccaggatggtttcaatctcctgaccttgtgatccgcccgactcagcctcccaaagtgctgggattacaggcgagccactgtacccagcctataaattttttttataatgccctgattcccattatttgatgtatttggataaatatgtcatcctgtaaattgaaggattaaactgataagagcagaaaacagaaattagtacactagttgatctggctcagatatagtgcctatgtatcaggtgctccatgaatatttgttggatgaataaatgatcataaaactatataaaaatgaagaaataacagaataaaataatttgttctatataaatcctatgaatgagattgagtgggctaatagaatcctttccatctcaaaatgttctggaaagtcttgagtaaaagactcatcaaaaaaataattctgctttgtgcagaaagaagggttgctgacctttgaaggtgctttttgagtctttaacattctttagtagtatattccccaaagttaagaaattctagttagattttaaaaaattgagttaacatttaaaaaacagttttgttgaggtataatacacgtaccataaaatttactcaatttaagtacaaagtttgatcagttttagtaaatttatatagttgcacagctgtcatcagaggctgcttttaaaacatgtccatcactccagaagggttcctgtgtcaatggaattgctgggttatattgtttaagtatttgtttaaaaaaacagaaacaaatctgcctaacttctgcaggctatatacgagttaacatttccatgagcaatgcatgagggttgtgatttttccacatccctgtcaacacttggtttgtcagtttgtttttatttagctgttgtagtggatgggtagtgatggtgtatggtggttttaatttgtatttccttcatgaataatgatattgaagattttttatatgtttattttccacccgtatctctttggtgaaatgtctttataaatttttgtgaatttttaaatcaagatcattaaccaaatgagcccctcatttgggctcaagtgatccttccacctcaacctcccgagtagctgggaccacaggtgcaggccacgcttggctaatttttgtatattttgtagaggcggggttttgccatgttgcccaggctggtcttaaactcctgaactcaagcaattggcctgcctcacataagtattctcttttattttgaggattaatttttgttgttgtgaaatatatcctacctgtaaaagagtgcttaaaatgtcgtatgtgtgctttaaaggataatataatggaaacttgtgttcctactgcccaggttaggaaatgggttattaataactttgaaacctcctaaatgcctctctcctactgcattttccttcctccacatcagatgtagtgtttcttcaattttatattaatattttgtactttttatagttttaccatatatgtttatatatatccttaatatattagtttttaaaatttgttattaaccttcagtttattcattatttcaacactgtatagtatcttattgtagtaaagtatgtcaattaacttatccattccactagatggagatcgggattatttctggtttttagttattaaaaacaatgctgctgctgggtgcagtggcttacgcctgtaatcctagcactttgggaggccgaggctgcggatcatgaggtcaagagatcgagatcatcctggccaacatggtgcaactccgtctctactaaaaatacaaaaattagcaggatgcggtgctgcgcgcctgtagtccctgctactcgggaggctgaggcgggagaatcacttgaacccaggaggcggaggttgcagtgagccgagattgtgccactgcacttcagcttggcagagcgagacttcgtctcaaaaaaaaaaaaaaaaaaagctgctataaatatggccaagactaaggaaaggtaagtgaggtgcttagggttcacattttatggagtaagagtaagtaccttcttaaggtttataccctaggttcttcacatgcctcactttagtcctagccctgagcattattatgtaggtcttctgatgcaatatctaagagtttctctaaggtatacctagaaatagattgctaggtaatggagtaactttattacttacaggaaactatatggtggttgtaacaatttatgcttctgccaccagtcatggtggatatgaaattatgtcttaatgtgataatttacattgcaatttttttttttttttttttttttttttttgagacagagtcttgctctgtcacccaggctggagtgcagtggcgtgatcttggctcactgcaacctctgcctcctgggctcaagtgatccttccacctcagcctcccgagtagctgagaccacaggcgcaggccacacttggctaatttttgtatattctgtagaggcggggtttcgtcatgttacccaggctggtcttaaactcctgaactcaagcaatcggcctgcctcagcctaccgaagtgctgggattagaggtgtgagccaccacacctggctgtttgtttgttttgagcctgttcctcaggctggagtgcagtggtccaatcatggcttgctgcaactccgcttcctgggcttaagagatcctcccacctcagccttctgagtagctaggactaagggcacctgccactatgcctggctaatttctaaagttttttttatagaggcagagtctcgctgttttgcccaagctgttctcaaatttctaggctcgtgtgatcctcctgcctcagcctcccaaagtgctgggattataggtgtgagccaccacacctggctgatctatctgtcttaaactggagaattgcatttttttctacctcctttcttttttttaaaaaaactgaatttccatctgttacccctccctttctgctcctcttatttcatgccttggaagttatactttgccttcctttaatgagtaccaaagaaattaaaaaatacatgtttactgtaagtccaggcctaaatgttgctactacagggaccatcaaatgctttactaccatctattgccatctgcaaatgtatgccattgttgtttagttttgtagttcttaatgtattttaattaaacaccacaaattatgctttttgtttgttttattcagtcagtagatgcttagaatacttgcttattttaccaattcctttgcttattccactcctttgttctgggattatttttctttttcctaatatattttcattaaaagtttatttggtgagaatctaaaaactctcaaattctgaaagttttaaaaatttgcctttgttgttgaaaattagttttgatgggtgagagaatctagatcaggtgttagcaaacctttttttgtaaagggccagatagtaaatattgtgggctttgtgggccatagagtctctctgacaactactcagcaatgctgttgtaggacaaaagcaaccatagacattatgtaaacatgagtgtgggtatgttctcacaaattttgtttatagacactgaaatttgactcaattttcatgtgttaaaaattattattttttgaatttttttaaccatataaaaatgtaaaaatcattcgtagcttgtagaccaaataaacaggatggatttgacctgtgggccatagtttgctgacctctggtctaaattaacattcattttacttagtacctgacactggagtaattattcttatgatgtcttattgtgatattgtcttccatttttaattgttgaagagccagctgtcagtcttttttgtttttctttttcttcttcttttttttttgaaatggagttttgctcttatcgcccaagctggagtgcagtggtgtgatcttggcccactgcaacctctgccttctgggttcaagcgattttcctgcctcagcctcccaagtagctgggattacaggtgcctgccaccacacccagctaatttttgtatttttagtagagatggggcttcaccatgttggccaggctggtgttgaactcctaacctcaggtgatccacctgccttggcctcccaaagtgctgcaattacaggcatgaggcacggcgtctggcctttctttcctttttttttttttttgagacgtagtcttgctctgttgcccaggccggggggcgatggtacgatcttggctcattgcaacctctgcttcccaagttcaagccattctcctgcctcagcctcccaagtagctgggactataggcacgtgccaccatgccgagctaatttttgtatatttagtagagacggggtttcaccatgttgtccaggctggtcttgaactcctgacctcaagtgatcctctcgccttggcctctcaaataactgtcctttctttgttggtaatctggtgatatgttttcttgtttggctgcttttaagagctgcttcttgtctctggtgcagttcgctatgatgtatctaagtatgtatttattttcatttaacctggtcaggatttgttgagtatccagaaactaaggattggtgtttctcattacatctggaaaaatttgagccattatttttgcttatattgtggtatgtcataggaagttgagaaaagaaaaattcatttgatggttttctatgaggttatagtggaaaataactatctcccttttagaattgagtgctagacagtttctgtgtagatgatctcataagcttccttttatcaaacagcgatcacttttttggtttggctgctgagaagtatggcatcaagtataatactcatatgaggtgtttaagaactgagtatatttcttatgcacattttactatatactataattatacattaaaaatgcacattgtaaatattataaatatgtgttatacattgttaatagtttggatagcaaaagtatgacttgacatttgttttttaaaccatatttaaagtaactctatcacaatatggatttaatggattaattgcataattggtgagctactgattattcttgttatttggatgcttctttaagttagcaagtttatattgtggtgcttcaatatagactacttatttcatttcagagaactcaatttcctgtatctactgagtctcaaaaaccccggcagaaaaaaggtctgtatgcagtttcatggtatgtgtatgtttgcacagacagatttctcttttatttatttatttatttttttttttggaggcagagtctcactgtcacccaggctggagtgcagtagcacaatcttggctcactgcaacctttgcctctggggctcaagcaattctcctgcctcagcctcccgagtagctgggattacaggtgcacgccaccacacctggctaacttttgtgttttagtagagatgaggtttcactgtgtttgccaggctggtctcgaactcctgacctcaggtgatctgcccaccttggcctcccaaagtgttgggattacaggcgtgagccgccacgcctggccagatttctctctcttgttgattcttttatctattctatattatttcaaaatgagtgttgggaaaagaagtaatagtctaaatgttctgtcacatctagcttttatttaatagagttattagatattaggaggttggtttgacctggaaattatttaaatggggtttgattattatgtaagtgtgtactaattttctgcttctggaaaaaccactttgtgaagttccaggtatctttttgctttgttggtttctagtttaattctattgtgggtagagaacattctttatatggtttgttttatggcccacaatgtggcctgtgttggtgcatgtcccatgtacacttggaaataatgtgtattctgctcttgtaggatgtagcattctgtaaatgtcaattaggtcaagttggttgatagtgttctgtatatacttacaattacagatattcatattcttactgatgtagttactgattggaagggtgatagaagagtgttgaagtgtgcaaatgtaattgtggatttgtttctactttcagttctatcaatttttgatttgtgtattttgaagatctgttgttggatgcatatacatttaggattgtctgatttcttggtaaattgacccgtttgtctttatataatattcctcttcaatttctgataatattccttgtttgaagtctactttgcctgataatattttagttttagttatttatttagctattttagttttgctttggccagtctttgaatggtatcaacatataattttcgtagagtaaaattccctttttttagtacaaattctgagtttcgacaaatgaaactagccatgtaaccactagtagcaccataatcaagttataaaagtttaattactcccccaaaagtcacctttactttgtagtaaaccacttcttccattcccaattgcgggcagccattaatctgtttctttcttcctagttttgcctttcttggaatgccaaataaatggaatcatacattattattattttgagagagagggtctcgctctgtcacccaagctagagtgcagtggtgtgattatagctcactgcaacctgaaactcctgggttcaaatggttttccccagtagctgggtctacaggtgcatgccgccatgcctggctaatttttatgtattttttttgtagaaatgggggtctggctctgttgcccaggctggttttgaactcctggcttcaagtgatactccatcttcggcctcctgaagtactggcattacaggcatgagctattgcacctgggttatgtaaatttttcagtggcttttaaacctcatataatgtttgtttgttggtttgtttttgaggcggaggctcgctctgtcacccaggctggagtgcagtggtgcagtctcagctcactgcaacctccacctcctgggttcaagtgattctgctgtctcagcctcccaagtagctgggattatcggcatgaaccaccatgcctggctaatttttttatttttagtacagatggggtttcaccacgttggccaggctggtcttgaactcctgacctcaagtgatccacctgctttggccccccaaagtactgggattacaggcatgagccactgcatccagcccaatatagggaggtattaagaaaagagaagaactatcatccttaagtattaacgggactttaacaaattaaaaaagtagtactttgaataaaaagctgtcacattttactgtgaaatccttagactttttttatacctctagttcaggttttttcagctttggcatgaatgatattttgagcaagataaatctttgttggagttgtcctgtatattgtaggatggttaacaacatccctggcttctacctggtagatgacagtagcacttaattgtaacaaccaaaagtgtctccagatgttgccagttattccttctggggcaaaattgttcccacttgagaaccactgctctggttaagtagtgtaatacttggaaatagaaggcagaaagttggtaagtgcataaagaattcacacagaagttggattagcaagctgagagacgttatttgaacaagtagcaattggaggcattttgactgagaatggatgttgtgcctctccctcactctttcctcctcagcttgagaggtccatattctctcaaagtttgactctttagttttgagggtgatgactgccaactgtggaagggataaacagatttctgtttggtatttttgtccaaatatatcaggactttttcaagaacaggcaatgaaattattgatcagaactacttggtggttctgagaaaataatatgctacatgaggctactgaagtcctcttccttttgccccatgatgtaaccttaggtgactttcttctggctttcagttgaagatcttacccatcattgaggtgagcgaactgatttactgcttgagtctattttcttccttaaaggagtcttcattgaaaactttacccattttggggtggccatagctgaggatgagttttgtccacaacctgagacaacatactcactatgtaaaaaacctgatctcagcttgatatctggttttagactaattgtttaatagaataatttattattgtaaaatatatataaaatttaccatttttaagtgtgtaagtcagtggcattaagtacatttacaaagttgtgcagccatcaccactgtccatttctagaagtgtttcatcattccaaacagaaacactgtacccattaaacaataaatctccacatccccttgcctccccagatcctggtaatctccattctattttctgtatctatgaatttgactattctaggtttttcatgtaaggtgaatcatacaatatttgcccttttctgcctggcttattccactcagcattttcaagattcattcatgttgtagcatgtgtcagaatttcattcctttttaaggctgaataatattctagtgtatgtatatatcacattttgtttatctgtctgttgatgggcatttgggttgttttccttagagtctttatatgtcagtaattcttaaagaatttaaaagttgtagaaactaggaattttgtagatattctagaaatatgtcatttcctgtactgtatataataatttattctacagactaattactgtgtatatatttggttctcagacgtgattttgattttgtagatgctgtacatgctcttcacttcattaatcttttccttttgctaattttggttcttgtgtatacagaattatagagttacaaggtaatttagttgttacctaattcaccctaaagtctacatgaaaccactgtcacagtctttgataagtagttaccaaatctcactatttctactgtgatagtgaatgactttcattgattagctttctgaaagaatagtttatcttacttgtcttggtatcctcacctctgagtctatttgtctattgtaatctggcttttgctccaccgctccactgattaaatggatgagctaagcatttttttttttttccactgcaacctctgcctcccgggttcaagtgattctcttgcctcagcttcccgtgtagctggtattacaggtgcccaccaccatgcctggctaattttttgtctttttagtagaaacggggtttcactatgttggccagactggtatcgagctcctgacttcatgatccaccccaaagcctcccaaagttctgggattacaggtgtgagccaccgtgcttggcccaattctgtttaatttttgaggaacaatgttaacttctaatttaaatggaaggtagtatatatctaatttttccctattatttttaatttcaatgctagtaaatctttaaatctgaaatacacactcttgaattttgacagatatgtatactcatgtacatatttatattcctgtaatcatcagatcaaattaaacatttttatcacttagaaagtttcctcatgcctttttccagtaagtcttctgcttcacttcgccagatgcaaccaccattctgatttctgcctgtataaattgattttgaactttcctataataagttgtgcttgaacttcacacaaagggagccatacagtatctactatttagcttttggcagctttcatacaacatgttgttttggagattcatccgtgttgttatatgtatcagtagttcttttatttaaaaaatgctgtttagtattcagttgcatgaatataccaccgtttgtccattctcctgttaatgagtatttgcaatgtttccagtttttgagtactgtgaaagtttctatgaacatttatttatttagagatggagtctcgctttattgcccaggctggagtgcagtggtgcgatctcagctcactgtaacctccgcctcctgggttcaatcgattcttcagcttcagcctcctgagtagctgggactataggtgtgtgccaccatgcccggctaatttttctatttttagtagagacgggatttcaccatattagccaggctggtcttgaattccttacctcatgatccgcccgcctcagcctcccatagtgctgggattacaggcatgagccactgcacccggcctgaacatttatttactggttttttttgtgtgtgcatgtgtgtgcaagttttcacttgaataagtgcctagggagtggaattgcttggtcatatgtgaactgtttgttttaactttataataaactgccgaagtattttccaaagtggttgtacagttttacccgaccgccagcaacgtgtgaggattctgtttggctacattcttgccaacatttgttactatcagtctttttcatattagacttgctggtgggtatattgtgttttattgtgattttaatttgcattacactaatgactagtgatgttgaacaccttttcatatacttattggtcatatcttttgtgtagtgtctgctcaagttttttgcctatttttaaatttcttttttccttattattgatttgtgagacttcttaatatattctgaatgtacgtcctttgtctgttatatatgtggtaagtatttccccccagcctgtgttttactactttcattttattaaggtatcttttgatgatcaaaagttttaattttgatgaaggccaatttactattatttttcttttgttattaatgccttctctgtcttgtctaggaaatcttgatccttaccccagactgagttgtgtgtcctctcccttttctgcattaatattgcagaaattaattttttggttttagaaaatgtctaatttggctcaatcagtaatttttgatatctttctattgaaatatatatacagaaaagtacatacataaatcataattgtactgtgcagtgaatttttacaaagtaaacatatccatgtaatcaccatctagattaaggtatagaatattatcagtgccctccaggccgcctccttattccctaccagtcattaaccacccctcccaaaggtagtaacttgtatttaacttctatcttctacatcagttttgcctgcttttgaatttaatgtaaatggaatcatgcagtgtgtactttttaatatctaacttcgttgctcagaattatgtttgtgagattcatttatgttgttgcatgtagtagtggttggttgttttcttccttgttatatatattccattgtggggctctacctaagtctattcattttatacttgatgaacatttgggatatttttattgtgatgtattatgaataatgccaccatgaagagtcttgtacatgttttttggtacacatacatacttaggagtaggattttcagggtcaccaggaaggatatatttaggctcagtgaatactagcaagcaatttttaaaatgcggtcaatataatccccatgtgtaaaataaaggtgtacaaacgcacacacacacacttgctcatatgcttatatgtgcatagaaattccttgaaaatactcaagaaatgcttcacctctggtaagggataggaatggaatgggtcttttgtttagtatcctatgtgccctttgaattttgttttactgtaagtatgtatttttaagaaaaccaactagttatttttaaaaatcatttgaaagtcttcctactttgatatatgaaaaacactggttttaaaaaaaataatagaaaagctttaaaatcattattatttttttgagacggagtcttgctctgtcgccaggctggagtgcagtggtgcgatttccgctcaccacaacctttgcctcccggattcaagcaattctcctgcctcagcctcccaagtagctgggactacaggtgtgtgccaccaggcccagctaatttttttttttttttgtatttttaatagagatggggtttcaccatgttggccaggatggtctcaatctcttgacctcgtgatctgcctgcctcggcctcccaaagtgctgggattacaggcgtgagccactgtgcctggccgctttaaaatcattaatgttgcgttgctcagttatgtctaattgacagcccaaacatttacattgtaatattagaaaatcctttatgattgggcagaaacttggtttaatgtgtcaccttggagacctgggttatagtcctgcctcttccattaactacttgttgaatgtggacaatttacttaacctttagggccttaatttcctcctttataatgtgagaatgttctctgaattgcataactcactggccttacgtgactattcagtggaataataagagagaaaaactttgagatacatgcacacacacccttaagaaggatataattgttaaattttgctttgaggaaataaaataatctaagctataaagtaaaaccataattagctaatcttttatatgacttttttcttcctcatttcaagctaatgagaagcaaacaaactggatagcagcaatataattaaaaaattataggccagcttctagcatgtattcttgagtcaatactgactcagcccagtctcttcctcttccttcatcatcatttatgtacctgaacagagtagatgtttctcttgatcctgggcctgttcgccctcagatccattccttgccttctcttctctttttggtatagtgaggagctgactctttttttttttttttttttttttgagacggagtctcgctctgtcgcccaggctggagtgcagtggcgggatctcggctcactgcaagctccgccttccgggttcacgccattctcctgcctcagcctcccaagtagctgggactacaggcgcccgccactacgcccggctaattttttttgtatttttagtagagacggggtttcacctttttttagccgggatggtctcgatctcctgacctcgtgatccgcccgcctcggcctcccaaagtgctgggattacaggcgtgagccatcgcgcccggccgaggagctgactcttgcagcctccttttcttcccaggcttccgtgtcagcagtttctggctggattagcaagtggaggaactggcaggagattagaaggcaagaggaaagagaagacagggcttccctccccgaccttcaggcctcagagtcgtagtggttttttgctcatgcagacttctgatttgtctcaccattccctgttgggcctctcatttcttccattgcctgttctctgcattaaagtccttgtgtttcaaatcctcaagtggctttttgttaggctttgactgatacagggctcaaaatgatagtaatgaaaatgtcttacatttatattcttttcaagatttgttatctcttttgataccccaaatatcctattgaggtagaaaagtgttataattcctgtttggcatgaggaaattaacatttattgaatgactattttcagattctttggattttcgggtgaaaattttaggggggataaatggaggcccagagaagtgaaataacttgccctaggccccatagaaggctggtattgaatcaagattgaaattctgcatgtgaaaacttttacgtgctacatgtctgctagtcctggaagaaatcctttctttgatgagtattttttttaaaggctttacttgcaatatatttacaaaagccttagttatttagtaaatttttcaatgaaaaatctgaaccataataattttctgcttagtacttatatagctagcatactatccctagcattaatcaaagtgtcatgtaaaggtttgatttttgagcctaagcagaatttgaaattcttctaagagaatttagcacctagggcaaactacaggggagaattcttgaggtgtcatgtttattcacttctggaattgtttaaaatatgtcaggtgcatccttaaagggagaaagaagggggaagagatgttacaaaagagtagaatggggcaagagaagtggcaagggagtattgttgctaggttgccagccttctgcccccactgtcttggtgatggtggaggggtagtgtggcagctgggatatgaatgaggtcttttttataactcactaaaagccattaccttgtcttcatctcgtcagctggctacctgacctctgtggtaacataggctcctgaaatgtagcattggagatgatcactgtgctttattgcaaaataggggagactctgctctgcatttacatgcttatgttttgtggaggatctttcaactagtaattctcataatacctgtgaaagcatataagaaccagtatctccatttttagggggagttggagtgagcaatgatttggaataccagaaattcaacttatatatttacaggtaaaattctaattgtaaattcaggattcatagattctagggatttctgaggtatccagaattccttcatctttgatgataagtagataataatggtaataaaaataacagcaacaggcccagcacagtgacccacacctgtaatcccagcactttgggagactgaggcaggtggatcacttgaggtcaggagttcaagaccagcctggcggacatggcaaaaccccatttctactaaaaatgcaaaaattagctgagcatagtggcatgtgcctgtaatcccagctactcagtaggctgagtcataagaatcatttgaatctgggaggtggagattgcggtgagctaagatcgcgccactgcactccggcctttatgacagaactcgactccatctcaaaaaaacaaaacaaaacaaaacaaaacaaaaacaaaatgcaaaaaaacagcaacaataataggtaacatttctttaaggcctactatgtaccaggcactatttgaacctctttatatattaggtaatacgatacaactctatgagaatgagtattttatttcctgacccttctatttaaaagtaaaaccccccacccggcactgtttctctttcctgctttatttttctccatagaaaaatatcactcataagtgtaacatactttattatctgtcctgtgtggtagtagcccctgccctcaattataaactccatgaaatcagggagtcagttttgttcactgctgtattcccagtgcctagaacagtgcctggaatcatggtaggtacccagcgaatattggttgaatgaatgagtcttggttttacagatgaggaaactataaatttcccaggtcacacatttggtaataggacagttgtgtacactgaaatgttctctaaaatatttgatggaacgaaaattagcttttggacagctacatctccaagagtgtgaaatgaccttcagcactggatttggtggattttcctttttctaatccctagagttccatttaatgagcgtttgggttcttgagctaccttacaaattgaacacttttttctccagctttcactcaagaaacacaaaacatggcttgtcctttttttttttttttttttttttgagactgggtctcactctgtcacccaggttggagtgcagtgcacaatcatggttcattgcaacctctgcctcccaggctcaagcaatcctcctaactcagcctcctgagtagctgggactacaggcttgtgcctccactcctggctaatttttttgtattttttgtagagatggggtttgtccaggctggccttgaagtgctggactcaagtgatccgtccacctgggcctcccaaagtgctggggttacaggcgtaaaccactatagctagccctgattgtcttttattgtgagattttaataacagctaagacttgaaaattaacattttataaattttcttttagactacttagtgatatactaagtatctaaggtttgtaatacttagtataaactcaaaagggttcagtgcctcattctcttttactctttccctttagtagataggtgacagaggactgggtcatgcagttgagacttggtccaagatgacttagtaagctacttgtcccagaactatttatttatttacttatttttgagatggagtctcgctctgtcgcccaggctggagtgcagtggtgtgatcttggctcactgcaacccccgtctcctgggttcaagcgattcttttgcctcagcctcccgagtagctgggattataggtgcccgccaccactcccggctaattttttgtatttttagtagagacttggtttcattgtgttagccaggattgtttcgatctcctgacctcatgatccacctgcgtggacctcccaaaatgctaggattacaggcgtgagtcaccacccccggaccctggaactatttatgacggtgcactttatgcacttaacacactcacatgtctttaagcttggtgactcgtgtggctttttcgaaggagatttgattctggaagtggttaagtaggatgtgaatggctaaggtctggtcattggtgaagcctaggggaagaaaagaaaggaaacacaagtcttagaagaatttcagatcggccccaacgactagaagggtggttctactaagaaaatgtgtgtagtcagaaaatgaagagtcagttgcttaaaattttactttttttcttgttcctggcatgtaaagtcatatccatactttctgttataatttcttcttacaaattccattgataatccctattcttggatagcaatgagcagcattacttcttttttatttttttaaaaaaattaaattttttgttgaaatgagggtcctgctgtattgcccaggctggtatcaaatttctgggctcaactgatcctcctgcctcagcctcccaaagcgctgggattacagttgtgagccagtgtgtctggttgtaccttttaatttttgtgttcaggcaacattaactctgagtcacagtaagctttttttttcttcctgtcatattatggacatagaagttttttggttttctttagattgtttctccttaggttgcagaacatcaagaaatggattacagtcattttcctctcttccccatgctcttccctttcttttccttttttcttttctttttttttttttggagacagaatcttgctctttggccgaggctggagtacagtgtcatgatcttggctcactgtaacctccccgcaccaggttcaagtgattctggtgcccaagcctccctagtagctgggatgtcaggatgcgccaccacaccctgctaatttttgtatttttttgtagagatggggtttcaccatgttgtccaggctgacctcaaactcctggactcaaatgatctgccctcctcggtctcccaaagtgctgggattataggcatgagccaccacatctggcctcttttccatttttaaaaaggactgtctccaacatattaaaattcacaaaaaataatataaacacacatgtactcactggctaggcttaataaaaaacatttagtcatgtttactttaaagctttttatttttttgagaaataggcattaaagagttgaagtctcctttctgtcttttcataattctgttcttccctcttccttccttgagatcttcactattcttgggttaatttggatctttctactccttgttaccacagaaaagtaattcttaatgaatttgaccatattttaaacttctgatttcagtgggcaggtaactcattttatggtttctgtattgtgagccattttcaatgactcaactagatttttttcatcgttgacttctcatttctgggcaacagcataatgttctcatttgagctatttctaaagattgtgtttaactatttaaaatatttgtggtactctgatcatcagatgtgatttttttttttttttgagacggagtctcactctttcaccaggctggagtgcagtggcgcgatctcggctcactgtaacctccttctcccaggttcaagtgatgctcctgcctcagcctcccaagtagctgggactattggtgcgggttaccacacccggctaattttttgtatttttagtagagacagggtttcaccatgtttgctaggatggtctcgatcttctgacctcgtgatctgcctgccttggcctcccaaagtgctgggattacaggcgtgagccactgcacctggccagaagtgatattaactatcttatatgtatatttctgttgcgggaagtcaggggccccaaacggagggaccggctggagctgtggcagaggaacgtaaattgtgattatttcatggacacttaccagttcccaaataatattcttataatttcttacacctgtctttaatctcttaatcctgttatcttcgtaagctgaggatgtacctcacctcagggccactatgataattgtgttaactgtacaaattgattgtaaaacgtgtgtttgaacaatatgaaatcagtgcaccttgaacagaataacagcaattttagggaacaagggaagacaaccataaggtctgactgcctgtggggttgggcaaaatagagccatatttttcttctttgcagagagcctataaacggacatgcaagtagggaagatatcgctaaattcttttcctagcaaggaattttaataatactctggagaaggaatgcattccttggaggaggtctatagggcatgtctgtcttatgctgttgacataaggactgaaatacaccctggtctcctgcagtaccctcaggcttattagggtggggaaaaaaccccaccctggtaaatttgaggtcagatcagttttctgctctcaaaccctgttttctgttgtttaagatgtttatcaagacaatttgtgcaccgctgaacatagactcttatcagtaattttgcttttgccttttgccttgtgatctttgttggacccttatcaggagtttctgattttgcccttgtcctgtttcctcagaagcatgtgatctttgttctcctttttgccctttgaggcatgtgatctttgtgacctactcactgttcttaggccccctccccttttgaaatccttaataaacacttgcttattttgcagctcaggtgggcatcacggtcctaccgatatatgtgaggcccagctgtgaaattcctctcttcgtactcttatttcttagccggctgacgcttatagaaaatagaaagaacctacattgaaatattgggggcaggttcccctgatatatttccttagtgacattcctgcaatctcctttagaaagtctttctgttcaccttctataaccagggaaggagagattgagaagagacgaaggatgattttatgtttttcagtcccagtcattatttgatgagaaactgatattacaagctttaaaaactcaagatatgtattcaacatgtagtagtagaacaagtatcttagtttaatagtctataaatttttgatgcactataatatattattgtagtcagtagcatcaaaattttaatgtgatattgcagtatgtttatggttagtttagacatgaggacagtgctaaaggagaaaatctaatgactgtgttgtttgttttgtcaaaatatgctgcctagctccagagtttcctattttggagaagcagaactggttgattcatcttcattatatccggaaagattatgaagcctgcaaggtaagagattgccataataataaaaatgagaggcaggatgttgggtaggcaactaacagtgcctgctaaacagagtgtggcagtttatatctcagtgataaaacatgaattccttcttccccatacttcatacactggttatcttttgctatggtagtgatgtttaacatacaacctcaatatttcagtggcccccaacaaacaaatattaattgctcatgggctttcagatcagctgtgggttggctgggtttgactgcaggctgtgggtcaggtttaggtgtgttccatgtgtcttctcatgtcaagagcaaacaactctcttggacatgttggtcttctggtggaggcagatgttcaactcagcatattaacttttttatctttggatagatgaaaaatggtattttgtcgagtttttttttttttttttttttttttgagatggagtctcactgtcacctaggctggagtgcagtggcatgatcttggctcattgcagcctttgtctcccaggttcaagcaattcttctgcctcagcctccccagtagatgggactacagatgagtgtcaccatgcccagctaattttttgtatttttagtagagatggggtttcaccatattggccaggctggtctcgaactcctgaccttgtgatctgcccgccttggcctcccaaagtgctgggattacaggcgtgagccaccgtgcccagccctgagttttattttttaatttctctcttactgcaaggttgatcatcatgtgtatatttaaaaaccatttgtatttccctttctctgtatctttggtgacataccatatgtgttacaaacttgcaggcagacagtggtagtactaacatgcagaatgtatccttggtgtcatcttttttggtatccagagctttgtgacccatctaaggtttttaatttatacccatggcatttatacctatggcaatgcacagaactaattcatactggtatgacaaagattcataccagtttttttttttctttttttaagtggagttttgctcttattgcccaggctagagtgcagtggcgcaatctcggctcactgcaacccccgctttccagtttcaagcaattctcctgcctcagcctcccaagtcgctgggattacaggtgcccgccaccatgcccagctaatttttttttttttttttgtatttctagtagaggtggagtttcaccatgttggtcaggctggtctcaaactgctgacctcgtaatccacctgcctcagcctcccaaagtgctgggattacaggcgtgagccaccgcacccggcccataccagttttttttgacaccgctgatccgaaggcagataccagtatgaatctttttttttttgagatggagttttgctcttgtcgccaagggtggagtgcaatggcgtgacctcggctcaccacaacctccgcctcctgggttcaagcgattgtcctgcctcagcctcctgagtagctgggattacaggcatgtgccaccacgcctggctaattttttgtgtttttagtagagatggggtttttccatgttggtcaggctggtctcaaactcccgacctcaggtgatctgcccgcttcggccacccaaagtgctgggattacatgcgtgagccaccgcgcctggccaccagtatgaatcttgaaaggttctctttctttttcatctgtgataatacttggaaatcttatcacacttttcttagcttgcctagttagattttagacaggggttggcaaactttttctgtaatgggccaacaatattttagggtttgtaggccacatacagtctctacatcatatttgttatcttattttttataaccctttagaaataaaaaaaccactgttagcttgagagctgtacaaaaatatacagggcctgtaagccctgtagtttgcaaatccctgttctagaagaagtaatcacaacaagggagttgaaattttaagaaactgaatgaactaatactttactaggcattattaatactctaggtttttttacatatgattcttgtccacgtctgctttttcattactatttgttttcttttttttttcagacagagtctcactctgttgcccaggctggagtgcagtggcgctatcttggctcactgcaacctccgcctcctgggttcaagcgattctccttcctcagcctcctgagtagctgggattacagacacgcaccactactgcccggctaatttttgtatttttagtagagatggggtttcaccatattggttaggctgatcttgaactcctgacctcataatctgcctgccttggtctcccaaagttttgggattacaagcatgagccaccgcacctggcctgtccatgtccactttttcttaaagacacctgaagaaacttaaccactgctcagaagcatttttctccctctttcaggctgttatcaaagaacagcttcaagagactcagggattgtgtgaatatgctatctatgtccaaggtaagacacatacttcttgtcttcttgctagagaaatacacttttcctaggttcttgaaaaagatcaggcaattgaagaaacaagttcaagtacagtcatgcaccacttaacaatggagatatgttctaagaaatgtgttgttaggcaattttgtcattgtgtgaacattacatggagtgtacttacacaaacatagatggatgatatagtgtactatacacatgatatagtctgttgctcccaggctacaaacctgtatgagcaggtgttataccgaatactgtaggcagttgtaaaacagtggtaagtgtatctaaacatagaaaaggtactgtaaaaatatggtataaaagataaaaaatagtatacctgtatagagtacttaccatggatggactggaagttgctctgggtgagttagtggtgagtgaatgtgaaggtctaggacattattgtatactaatgtagactttatgttgtatactaatgtagactttataaacactgtacacttagcctacactaaatttatttaaaaatattttttctacaatgataaattaactttagcttactataactttttactttataaactttaaaactttttggctcttttggggtaatacttaaaacacacaacaacattgtacatttgtacaaaaatagtttctttaggtccttattctataagcttttttctttttctttcttttttttttttggtagagagacagagtctcactttgttgcccaggctggtcttgaactcctgggctcaagcagttctcctgcctcagcctctcaaagtgctgggattataggcatgagctacgacacctggccctttatgctattcttaaaactttttatttttttacttttaaacttttttgttaaaaactacgatacacacactactacagtggtggtactaacatgtggaatgtgtccttgctgtcttttttggcattcagagctttgtgacccatctaaggtctttgtgacacacacacacacacacacacacacacacacacacgcacacgcacgcacgcactggtctaggcctacactgagtcaagattataaatatcactgtcttccacctccttatggaaggtcttcagtggcaataacatacatggagctgtcatctcctataacaataggaataccttctggaatacctcctgaaggatctgcctgaggcagttattcttttttttagtaagtggaaggagtacactctaaaataaagattaaaatgtatagcgtagtaaatacataaaccagtaatgtagtcatttattatcaagtattaagttctatatatatgtaattgtatatgctgtacttctatgtgactggcagcacagtaggtttgtttataccagcatcactacagataggtaagtaatgcattgcactgttttgattgctatgacgtcactgggcaataggaatttttcctcttcattataatcttaagtgatcatcatcatttatacagctgtcgaccaaaatgtcattacaggtgcatgagtttaaatgttccagaaaggttttattcagtattaatctttttatggaatctgaatataattactgtgttggatttgacttcagaaatgactagtaatgttaaaaaattgctatgattacccattttttagtttctggctagtgttttttggaatggatgcttaggattcctgcctaatgcagtgatttcagggccaaaagatgcttttggaaggattgcttgtaatcaagctaaaagagatgaagaagagcttgaggatttctgtaaggtgaatcaggatgaggggaagaagcctggaaataaacaagataaagcagagcataaattcagctcattagaaaccaaagataaggaccactcacttactttttttttttttttttttttttgagacagagtcttgctctgttgcccaggctggagtgcagtggtgcgatcccagctcactgcaacctctgccttccaggttcaagcgatcctcctgcctcagcccccctattagctgggattacaggcacatgccaccatgtccagctagtttttgtatttttagtagagacaaggttttgccatattggccaggctggtctcgaactcctgacctcaggtgatccacctgccttggcctaccaaagtgctgggattacaggcatgaaccactgcacctggcccactgacttaaattttcctctttagtggcataagtagcattcttagtttttccaggaactttctttttgactcttgggtgtaaataaatggttttgtttaccattcattgcatttgtagtcttcagattaacatataattttctgacataattgttaagatattgacaaatttaggacatcatggcaaaaaatgctcttattcccagtgtcacaagtatcagactttcagtgcctgataaattcttctggaaacataggcctaggaaaaacctctggttctaattggttgttacactgacaactgaagtcttaaatgttactttatcctttgccagaatctccatgttgaatttgaggtattgattccatttgccccatttgggggttcgctctgaaaactatcagttggaagtaaattatgataaatgaagcatctgatggggaagccccaaaatgttgttaatgtgaagagtttgtgtgataatttgcaaaggaactgattatctatgtgatggatcctgggagtagagagagaagtaggtaggtttgagctaccttgctaaaagacagttgagcttgtcagcagttttggttgttgtttcagcctgtccaaagccatatctgattgttttaaggatacagttgtccaaaggatttacttgatgtggtttcccagttttctcttctccaatttttctgaccccaggctccattcttcccagaacatggttttacttttttttgtattttctgtttcttggcagcattgatatttcgcctagaaggaaatatccaagaatccctagaactcttccagacatgtgcagttcttagtcctcagagtgctgataacctcaagcaggtggccagatctttgtgagtattggcaacctggaggccctagggcactcacagagaacagtgtaaaatgcattcctaggtccagcctgctgctggcagctgcatcagcctgatacacaagtgggggaatggtttaataggtacagtgggattcactctgaagagcatggattaagtttgaaatttgagaaaatgagataactagtgttaaggaactaagcattttaaacactgtgcattctagtttgatgggggaccaatattgtttatcatgtaaatagagacaccttgtaccctaagtcttctaaacttattggcaatccttggaatttttctcatctactcttctaacacttagtatttgtcacacagtaagtttttagtaaggacagagagttcctgacttctgatggttcaacttacataatttttcaactttacaatgatgtaaaattgttatgtattcagtagaaactgtacttcaagtatccatacagccattccgtttttcattttcagtatagtattcagtaaattacatgagatattcagcattttattataaagttggcattgtgttagatggttttgcctaactgtcagcaaatgtagttaagaaagtggagataggaactccatggaacagagtaagtgttctgagcatgcttaagataggctaggctatctatgatgtctggtagagtagatgtattacatgcatttttgaattacagtgttttcaatttacaatgggtttactgggatgtaaccccatcataagttgaggagcatctctatttgttgagtgaatgtcctaaagattcctagatggaaagaatctcaagtgtttataaactactaggtactcccttttcagtcctttgttccatggagttcctatctcccctttcttagccacattgccattcatacctgtgttgtttttgcatagagcttggttttccctgtttctctctaaactcaggatccaatatcaaggaaagagacttagtcttggaaggaaaggatgtgtccctaatgggtgatgataaatgatggtagttactgcttaacatggtatatcattaggcttatttcttttttggtctgcatttatagtacattgtagaagaaaaattccacaagactctcactaaaattggtatagaatgagaccaaggccttggaacagctgccagtgcaatccctactaagagagcttctgctgttagtgtatagcagcttcactgaccaaaccagcacaaccacctcatagagaaaaggcttctagaattctctgctggatgaaatatgattaaaatgtgggactagtagggttagtcttctaagaattttgaggtaataattatggaaaatatatcttttacagatttcttttgggaaaacataaagctgccattgaagtatataatgaagcagctaaactcaaccagaaagattgggtaagtagagaactttcagttctttcttattagtaaacttgctaatggttccatttatcatctggctgtcttatttctgaattcttacattccaaaaatgtcttgattttaacctcatacttaattcatgatttgtataagtataggatcaaaaaccatgtttcctcataactttgcaggcattgctgcatgattttctagcagtttgctgacgagcagtctcttaccagtctgattcttgttgatgacccctagaagctttgggtatttttttcgtcattggaattccacagtatcagcaataggcatctagttgtgtttcatgtctttttcccgtccccatctgtgtgacattcaattgactctttcattctgaagacccttgcctttctttgggtcagggcctttgagtagttctttatttttcccctccccttctctttgtgtcaattgaggattgtgtgtaaatgcaacagaaaatttgactaaacattggctttacaaattcgtttttgtttttttttttaattctcatgaaacaagatgtccaggtaagtagttgctggcattgatttggtggtcctaggatgtcaagactgagagtttttcctcatggttacaagaagactgctgcatccagcatcatatctgcattctagggaggcagaaagagaaagcaacaaggagaaaaggacagagcctatactgggaaagcacaactttcccagaagtcccccacagacttccacttatgtcatatcagctccccttctataaggaaggctggttaaatgtcgtttttaatctggtcacactgccactctaaacaaaattagggttcttttagtaaggaaaaagagaagagtaggtagcaggtaggcaagtagataactagcagcatctgccacactgttttccattctctatgagagatgttctctaactattctctacaactcttaacttgcctctcattttctacctctgtgtccttttctttgtgtgtggtgcgggggggtacagaggctcactctgttgcccaggctggagtgcagtggcgtgatctcggctcactgcaacctctttcttccaggttcaagtgattctcctgtctcagcctcctgagtagctgggattacaggcgcctgccaccatgcccggctaatttttgtatttttggtagagacggggtttcaccatgttggctaggctggtctccaactcctgacctcaggtgattcacctgccttgtcctcccaaagtgttgggattataggtgtgagacaccacgcctgaccctccttgtcattttattatatgttcaggacatgtattcagtcttatcttccatatcatcatttttgtttttagctatttgtattctgttatataccctatccatccaatattttttatttcatttccttttattgtatttttaatttccaaaaatcttgtcttttcttcaatgtctctgattcttgaagttcttttctgcttctcagaattatctttttcttcctctctgcattttggttcttctattttatgctgttggtatttttcaagtatttggtgattctcagagagacattcatatctgtgagtgaagaactagatttattagtacagagaattagcatggatttcctttgcagttcttacggggcactattatttttgaagtgtgttcaatttgttagtcgcttttcttctgtacatcggaagattgagttgagtctttatgccatggagtatgttatagctaacagccagagtgaaactacagatgaagaaaaattcatgtacttttcattcagtcggtttttcaaaaaatgagtatgtctgctatatgccaagcactgatctatgccctggagatgcaaagatggactgttggattataagatactcaactagaataggaaatgaaggaagaagagcaaggtttggaagaaggtgatggtaagaaatcagagttaaatcctgtctttcagaggattttggatatgataagttttaggttctgaggggatatctaaattgagatgtgtccagtaggattggatatagaaatctgaaactcaagtgttttggagtagagatgtgaattctggagtcagcaacataaaggtggtaattgaaaccattagattggttgacattaccctgcaatgagctgaggatgggaccctggaaaaaaagagttttttactttttttttgtctgtttgagacggcacaggaaaagttactgctttaatgcagggaggaagccctgcattctctatgggggccaggatcatgggggtggccagtgccacaaatggtcaccatacaggccagggaggagccagggcccaccaataatccctggaacatccctggatgctagcagttttttactttctaaatttttttttttttttttaagagacaaggttgcctaggctggagtatagtggggtgatcatagcttactgtaacctccaactcctgggctcaagtgatcctcctgcctctgcctcctgagtagctggggctacaggtgcaagccaccatgcctggctaaatttattttgtggaaatgaggtctcatgttacccaggctggtctcaagctcctgtcctcaagtgatcctcctgctttagcttcccagagtgctgggattacaggtgtgagccatcaaaaagcaattttgaaggactgagcagaagaagagaacccatagagggagatagggaagaggtaaagcaggagagctcagggtcacagggggaatggaacgtatttcttaatctatccagttggttgaaagagctcatttggtattactgactcacttgggataaccatcccattgttactagtagatgtgatcattcacaaaacagccattctttttttttttttttgttgagacagagtctcattctgtcacctaggctagagtgcagtggctcaatcttggctcactgcaacctctgcctcctgggttcaagcgattctcctcccccagcctcctgagtagctgggatttacaggcacccgccaccatgcccagctaatttttgtatttttagtagagatgaggtttcaccatgttggtcaggctggtctcgagctcctgacgttgtgatccgcccaccttggcctcccaaagtgctgagactacaggtgtgagccaccaccttttttttttttaactttaaaatttttctttaaaattttccccttcatggcatttttattttctttttagaatattttaatgattttgaattttacttttattaatagcccttacctaccctacatatttcataagtacctgtagaaaaccttatagtagctggagcatggtggctcatacctgtaataccagcactttaaaaggatgctgagtggggaggatcacttgagcccaggagtctgagaccagcctgggcaacatagagacccagtttctaggaaaaaaaaataaaaattagtggtcgtgtgcacctgtagtcctagctattctagaggctgaggtaggaggatcacgttagcccaggaggttgaggctgcagtgatgcggtgaactgtgattgtgtcactgcacttcagcatggaaagcagagcaagaccctgtctcaaaaaaaaaaaaaaaaaagaaacaaccttgtagccctactttcttggactcatcagggtattccacagtcttgctgcaacaggggaatagtaattcctcctgccattatcttagttgacttttggaacagttctgttaagtagggagaatttcccccattgacaagtgaggaagctaaggctttggaagatggaagttgctacagtgaggtagttgctgagccagaactggaattcagacctgtgatctaggatgatctaagattcctcgtcttaagactgtgatcttttccactgtaccaactgcctttgcaggatgtctgctgggttcccttacctcctgaaagataggatttgactctgatttgttctgttgccctttccaaatttcttttgcagttagtttgttaaaggtatattgctgccttctcaactatctatgtcaaagattttaaaaggtcagaggttagccttcaggacatctatttacttacctaccttaacaattcctactgtagagcaggacatttaaaggacaagaaaggctttatttctgccttgtctctctccatgcatgcattcttatagcatgacaaagttggcagtatacaagttttggaagcaggcctgagttcaaatcccaatgttctataatatggacatgatttgtgattgaataaaaaaaatttttaaatgtgcggcatttgtgagataattggaaattttaacgtaattgaatatctaatatcaagcagtcactactttttttcgagtgtgacgatgtgggtagtttaagaaaaaggccttatcttttagaaataaatacggaaacatttgtggataaaacgttgggctgttatttgcttacaaaagttgtgggagtagatggggtgtggattggatggttgttgggacaggatgattagtacctaattctgtctgcacttacgtatgattgaaattctccctaggatgtagaactaaaaaagaaaaaaaaaatcccaatactctctgtcttaagttaggtaatctactcaacctctctgagcttcaatttccttatctgtaaaattggaaagattataactatgttgcaggtttgctgaaaattaaagtaacatatatgaaaacatctggcataaagcctgatgttagtaggtgctcaaccaatggttgctgttttgttgtttttactatttttggagacttggaaaacattaaatcagttgttatctctgagcctgggggtccatgtttcctcagacagggacacatctccactactaatagggtagttcttactatgtttcccaagagcattttccttacccttgctttctccttttccaaagctaccttaaataaagggaggtttattataaaggaatttgagagtccataaaacagtatcaagagatgcaggttggtcttttagtgaagcagaactggaacgcttcagcatccaaggtagctactctgccttttctgcttcatcttttctttctgtagatcaaaggttggcaaactttttttgtaaagggccagttaataaatattttaatttgtatagcttcatacagactctgttgcaacgacttaactctgcagttctaatgcaaaagagccatacaaaaacaatagttgtgtctgtgttccaatgaatctgtacttataaaaaagggcagggaatggatttggcccatggaccatagttttcccatgtcagctctagacttctgcagatggctccaattacatgtattccatcacagcagactccaggtggcgctgtcagtcctcaagttcacatcacctagtaaatttagtacttgtaactaactagctctcttccaattccagattcctagggaaaggacttcagttgtgtcaggtgtcactatccaactgtgttgccttaagggcggaaatgtgtggctagcagccctctcagcaggggctgtgggtagtctctcctgagaagaaggagcaaagggtatgggtgatgggcaactcttaaagaaaaaaggtatggggatgggctgggtatgtgccccagggttccccatagatccaggaagatcacctgtttattctgcttttatttcttataatctgtatttttttatgttgaggaacttatttttaacaattaatttgagtatgaactctaataaaaagctgactgtaatgcatagtttaaagtttaaaccttgccgagcaataacaatctctagatgtctgttgtttcactctaatacttactgtggaattacacctgagttgttttccttcttttttatgagcctaggagatcagccataacctaggagtttgctacatatacctgaagcagttcaacaaggtaatttatagaagtggtgatagatttcactgagggtgcacttgttgcagaagttgttacattgctcatttggtattatccctagtgcttgcagaggtttttggaactgaaaattgaaagtacctttatacatttttttctgttttaattctcacttgtcattattcatctgttgttttctgcttgtaataagaacatggaaagttctagaaatatgagggaatggcagtttttctcctttcttctttttctctacctccagttaaatttcccagtttagaaacagatgcttaataaaacatacatatcaaaaagtggacccttaagtcttaaaggtgtgatcatgaccatgtgagctatctccatgccctgacggcaacttagtttttagggtcattgaaaataaattttaaattttaagtggatctgatttctgagttttcagttttaattttatagttattttccatgatgagaaattatatttcactgtgattaagctatagactcctatatcagagaagacaagttgagcttacctcaaatttggtactcaggtaagaaaaagtatatatcataattgaggagtagacaaaattactgagagctctaaaacttagtgatgagagcgttgggtagtttccttcatagagctcacagttagtgattgtgaagttttattctcctttctccgatgccaccaggactgagaatctgaattggttagtacccatttgacaatgtttagtttgtgtcaatttgcagactggtgtaactagtatcccacactggtgtgaaaaaaaatatgcacattagcagttggggtgtaaaagtaacttttctcctgagataacaatatatatacataaaatacatttagtgggccccttaggttttgtagatggatctatagttttatatacttggttaggagatttttctcttcagagacaatttcaaacaggcacatttctattcacaggattattctgagtcaggggaaaagaaggatttgtctttggttggatctgtgctgagaagaaatatatttagattttactgtacagctaacaggctaggcaaatacaatacctggcatttatataaatgcttgttgaatctgtgaatgactaaacaaagcccttttgtttactaggagaaggtaagctcctccagagcaaggagttggttttataaactcaaatatatttagcatctagaacagcaagcagttgggtgaataaatgagaacaatctatttattcatttatcatcacattgatggggaaacctggcccaccatagggaaggttgtgcacttggtcagtgttacagctgggatttagtttagtgtagtactctacactgtactatgatggcccttttgacttatgaagtatgagtcataggtgtgaatatcaggcagaaaacattcagaaagattaatcgtcttgtataaattcttccaagtggctccagaagcagatatcccatgttgccagctgtcttttcaacaaggacagttttggtatgttttggtctttgggtagtgggggctgtttgctgaaatgtgatgttcctatgtcaatacagcagaaagtgtctttacattagccatataaaggtatagttcgttcagtggtagtgatttggttttctttattttgttaaacttgtcaggcacaagaccagttgcacaatgccctgaatcttaataggcacgatctgacttatataatgctggggaagatccacttgctggagggagacttggacaaggccattgaagtctacaagaaagcagtggagtaagtgtatctgtttcctttaaaacagtgagaaactaaaaaaattgagtggatatgtgaactcccaagcctaaaagagtgaatatgtttgattaattacttactgtatgagttaaaggttaagctgaagtttaagagctcccagtagcttcaataaggtagactgtgtttctttcttacctataaggatgactgctgctttaggttagctgggcagctctattctacaaggtcagccagggatccaggtttcttccttattaactcaccattccttaggctgttgtctttacctgcatggttgatgctgaatgtaacatccacatccaggctgtggtggaaggagatggtttgggaagctaagcatggaataagcatctggctatatatatatatatatatagagagagagagagagagagagagagacatgatcttactccatcactcaggctggagtgcagtggagaacacagctcactgcagcctcaacctcttgggctaaagcaatcttcctacctcagcctcccaagtagttgggactacaggcatgtgccaccatgcccagctaatttaaaaaaaaaaactgtttttgtgttgacagggtcttgctgtgttgcccaggctggtcttaaacttctgggctcaagcgatcctcctgcctcagccttccaaagtgctggaattacaggtgtgagccactgcacctggccttggtaataagttttaaatgacccagaaattgcacacatcgttcctgcttacattccatggttcaaaactacatgatagttacaagggaagtgggcagacatgcactcaagaagaaggaaataacagatttaagagttggccgacagtctgccattttggtatcatatgttaataacagatcttctgttttcagagatattattagggacagaaatctcctgattcagtaaaaaacaaaacaaaacaaaacaaaacatttggccttattagcatgagaccagtatcttttttcccccttccccattttcccttccccttccccgttttccccttccctttccccgttttcccttcccccttttctcttccccctttccctttcccccttcccccttcccccttcctcttccccttcctccttccctcttcccccatcccccttcccccatccccctttccccatccccctttccccatccccctttccccatccccctttccccatccccctttccccatccccctttccccatccccctttccccatcccccttccccctttccccttccccctttccccttcctcctttcccttccccctttccccttttcccatctcccttcccctttcccctccctctctcccttccttcctttttctctcttttctttccatcctttccctccctcccattcccatctttctttgtttctttcttttcttcctttcttccttcctttctttccttcctttcatttatttcaacagtctcgctctgtcgcccaggggtgagtgcagtggcgcgatctcgcctcactgcaacctctgcctcctgggttcaagcgattctcatgcctcagcctcctgagtagctgggactgcacgagcacgccaccacccctggctaatgtttgtatttttagcagagacagggtttcaccatgttggtcaggctggtctcgaattcctggcctcaagtgatctgcttgccttggtctcccatagtgctgggattgcaggcgtgaaccactgcgcccagccttgtgttgttacttttaaatgggatagctgtagcaaaatgccttgtctcatttgtttggtcccttaatagaatgtctggtctgtggttcaaggcttattattcctaataattagattctgaactaaacttagatttctattaatttgttaatcatctttgtcttctaccatggtagtaaattttctggttatatcagtcacagcactgctttctgaattttcttcaaccatattttgtgtctaaaacagaaaaatcccttggtttgttaagctacagaacagacttttgtcatcaagaggctgtatatttgggcaagtagtaaggagccatgtaacatgttcagtgcctctgtggtgctaggtagtagccctgatccctgacccctgccttctagaggttagctctttgagaatagcatacataaatcccaaggggaacattcttccagtaactgatcaaggactttggtcactaaatttcctaagggagaaatgtggacagctaaaatctgaagccttactgagaagatagagaccattgttcatgacctacagctttgaagagagtagtcatgttgtagtggggaagccaatattgctagaattacagaagttacctggctttggggagggaagtgatcaaagtggatgtttattatggcagaaagtgaaaggcggattcccagttgaattgagaaagctctgtttggtcagctcaggcctcccctggctggggctttgcatcttctggttcaggtcttcctataggtaaccagtgccctatatcattccttagaagcagaagacattgttcatagccctttggtgttttactgttgaaactgtctgatgatcctatggtcagatcatctcaactcagtgttgccttggttttgtgacaaagacaaatactagtgagggattgagcaggcaatccctgatgtgagtattttacttacatcagtgtttactcccaaaggtcagtagcaccttctttcctaggattggtatgtatcttccttcttttgtttagtttggctacttggtatagctctttgtttaagtggagagaacagcattaggggccttgggatcctaaattacatagaaaattatgctgcctggcattgtgagcacaatgaggatagaaaaaaaattccacaagagaggactggtgaaactgtgtgtgttctaggctgacttggtttataaagcattgttctttaattttatcagtgtgaccaagacagtcatgcaaaacattctataggttctttcttaggacttttaccctaagaaaggaatctgaattctaagcctcatttttcttgctgagcagttctccttatcaccagggttgagatgacctacttttgatggcaattcccaaattgccttcaggtatttccacggggaggaagaggctcagtggggtctgtcaagtattgcacgagggcatattactgtgcatgtgtcttcgtgtttctcatctacatcttgtttccctctgagcatctctatgttgcaggttctcaccagaaaatacagagcttcttacaactttaggattactctacttacag

SEQ ID NO: 15484 - DNA, 51902 bp, Homo sapiens
aaaccgccgacttccggccgcgcagcggtgggctgagctaaaatggctgaggagagagtcgcgacggtgagcgccgagattctctttagttgcccggccgcagggcaaggcaagctggcgggtggcttttgtcccatgcagcggttcctggagagaggcggagctgggtgccgagcgtctcagggtgggcggggcgacacggtcccctttttactgtcccgggaactggtcgcctggggcaagtctggatacttagcagcacaggtcctgttctaggactgtagtccctcttggggtgcgctggacggagaagggagacttttcaccagtaatggctcttaccgtagtgccatctttttctgtctcgggggtttggaaggtaatgactagcacttgtgtagacagttcctgttaatcccgtgaattgggaatttaacatgcctggaagcttgcagcgtcactgccttctgccagtggagcgggactgtgttttttctgtggtgattaagtttaggaaagtacggttttggaattcatctgaaggctgagttgggcgttcactccacagaactgctaatatagaggaacccgatgaattcaggatgacctagtcgctattttttgaggcatatatctataattggatctaatttcggtaaagtgccaagtgtgaagctttgtttaccttgctttagtgttgggtttgaaagcctgttctgtccatttgttagaatgattttaggtattcggaatttattgtctttcgaaaaacgccctggaaaacagtacaaatagcagcctttggctgttttacaacttagttttggctaagcagcaaggttagtgttattgttagagggccttttgtttgttttctactctcatttgcagagtagtcatattattctagtctaattagaaaactctgaagacagaaacttttttttttgagacggagtgtcgctgttgtcggcccgggctggagtgcaatggcgcgatctcggctcactgcaacctccgcctcccaggttccagcaattctcctgcctcagcctccggattagctgagaatacaggcgcctgccaccacgcccggccgaaacatttttattaagctaagaaatttaaaatagctaggccggacgcggtgcatcacgcctgtaatcccagcactttgggaggccgagacgggtggatcacttgaggtcatgagtttgagaccatcctggccaacatggtgaaaccccgtctctactaaaaatacaaaaattagcggggcatcgtggcgctcgcctgtaatcccaggtacctggaaggctgaggcaggagaatcgcttgaaccccggaggcggaggttgcagtgagccgagatcatgccattgcactccagcatgagcgacagagacagactccttctcaaaaaaaaagaaagaaaaaacagattttaaaataattaaataggccaggctcagtggctcacgcctgtaatcctagcaccttgggaggctgaggtgggtggatcgcctgaggtcaggagttcgagaccagcctggccaacgtagtgaaaccctgtccctactaaaaaaatacaaaaaattagctggacgtggtggcgggcgctggtaatcccagctactagggaggctgaggcaggagaatcgcttagaacccaggaggcagaggttgcagtgagccgagatcgtgccatttcactgcagcctgggcatccagagcaaaactccgtctcagaaaaaaaaaaaaagtaaatagcatggttaatgttactgggttttaaatattaaaaacataggaaagaaaatacttccactccagcctgggtgacagagcaagactccgtctcaaaaaaaaaaaaaaaaaaaaaaagaaaatacttctaagtaatcttaaagtgtaaaagataatgggtaacataacattgctacaaatatagcttatcctctagtgctcatcacaagtgtttgtgtaatagaatatgaacttgagtctgtgacggcagaattgtcatgtacatttgaatgtctaatactgttttaaagagaatagcttttgtttcgatatgacttagcaattaagcctgaagttaactgttttcattgttgtcaaatttattgctagtagtgttacgtttatagtaattttcatcttttcaagttaccaatgcatggaaatgtgaatttctgtccttttaggaagtggtattttatcttttttttttttttttttttgagacggagtctcactttgtcgccctgtctggagtgcagtggcgtgatctcagctcagtggaacctctgcctcccgggttcaagtgatttttctgcctcagcctcccgagtagctggggttacaggccctcaccaccatgcctggcttatttttgtggagatggggtttcaccacgttggccaggctggtcttgaactcctgaccttgtgatctgcacgcctcggtctcccaaagtgttgggattacaggcgtgagccatggccccctgccttattttttaatacaattaaaagaacccagtaatcctactcctagacctgtgtcccacagaaaaaagtgttaaacatgagcgtgtagtactagggcattcgttgtagtactatccgtagtggcaaaacgctggaagcaaattaaatgcccattaatagggtaattgatgacttcagatatttccatactgtggaatattatgcagtcattaaaaagaatgttacaactaattgcttttcctctcagaagcccctctctctcactagagaaagctgttctcctttctttcttctgcctattaaacctccattcctaaactcagaaagaaaaaaaaaaaaagagaatgttacgactaattgacttggagggacttccatggtgtacatttaaataaaaggtagatgtgaagtggggtatattatgtgatcttaatttcataacacaaaggaaaacatatagatccgtagataaggatatatggatatggaggagagaaaaggaaaagactcaaaactcacagaatttttgaagaaatgtatagctaaaaatctaagaaggctacagtcaaggccttgaggccagaagacaccccatcaaaactgagtaaaactagcccagtgtgggacgcagaaattctagtatgctaccaaaattacttacggattgctaccagttccttagaaggaaaactgaggactaatatttgtattttcagtatagtttagaattcttaaaaaatgagcaaacaggctgtacttggtggctcatgcctgtaatgccaggacttgtggaaactgaggtgagaggataacttgagtccagaggtttgagaccagtctgggcaacatgttggagccccatttctacaaaaaacacaaaaattagccagacgtggtggcacgcgcctgtcttcccagctactggggaggatcatctgagcctgggggaagttgaggctccagtgagccatgatcatgccactggactccagcaggggcagagtgagactttgtctgaaaaaaacaaaaaatgaatgagcaactaactctggctttcatgatttgtgcttataaatctttttatttatttatttatttatttatttatttatttatttatttattttgagacggagtcttgctctgtcgcccaggctggagcgcagtggcgcgatctcggctcactgcaacctccgcctcccgggttcacgccattctccagcctgagcctccggagtagctgggactacaggcgcctgccaccacgcccagctaattttttgtatttttagtagagacggggtttcaccgtgttagccaggatggtttcaatctcctgaccttgtgatccgcccgactcagcctcccaaagtgctgggattacaggcgagccactgtacccagcctataaattttttttataatgccctgattcccattatttgatgtatttggataaatatgtcatcctgtaaattgaaggattaaactgataagagcagaaaacagaaattagtacactagttgatctggctcagatatagtgcctatgtatcaggtgctccatgaatatttgttggatgaataaatgatcataaaactatataaaaatgaagaaataacagaataaaataatttgttctatataaatcctatgaatgagattgagtgggctaatagaatcctttccatctcaaaatgttctggaaagtcttgagtaaaagactcatcaaaaaaataattctgctttgtgcagaaagaagggttgctgacctttgaaggtgctttttgagtctttaacattctttagtagtatattccccaaagttaagaaattctagttagattttaaaaaattgagttaacatttaaaaaacagttttgttgaggtataatacacgtaccataaaatttactcaatttaagtacaaagtttgatcagttttagtaaatttatatagttgcacagctgtcatcagaggctgcttttaaaacatgtccatcactccagaagggttcctgtgtcaatggaattgctgggttatattgtttaagtatttgtttaaaaaaacagaaacaaatctgcctaacttctgcaggctatatacgagttaacatttccatgagcaatgcatgagggttgtgatttttccacatccctgtcaacacttggtttgtcagtttgtttttatttagctgttgtagtggatgggtagtgatggtgtatggtggttttaatttgtatttccttcatgaataatgatattgaagattttttatatgtttattttccacccgtatctctttggtgaaatgtctttataaatttttgtgaatttttaaatcaagatcattaaccaaatgagcccctcatttgggctcaagtgatccttccacctcaacctcccgagtagctgggaccacaggtgcaggccacgcttggctaatttttgtatattttgtagaggcggggttttgccatgttgcccaggctggtcttaaactcctgaactcaagcaattggcctgcctcacataagtattctcttttattttgaggattaatttttgttgttgtgaaatatatcctacctgtaaaagagtgcttaaaatgtcgtatgtgtgctttaaaggataatataatggaaacttgtgttcctactgcccaggttaggaaatgggttattaataactttgaaacctcctaaatgcctctctcctactgcattttccttcctccacatcagatgtagtgtttcttcaattttatattaatattttgtactttttatagttttaccatatatgtttatatatatccttaatatattagtttttaaaatttgttattaaccttcagtttattcattatttcaacactgtatagtatcttattgtagtaaagtatgtcaattaacttatccattccactagatggagatcgggattatttctggtttttagttattaaaaacaatgctgctgctgggtgcagtggcttacgcctgtaatcctagcactttgggaggccgaggctgcggatcatgaggtcaagagatcgagatcatcctggccaacatggtgcaactccgtctctactaaaaatacaaaaattagcaggatgcggtgctgcgcgcctgtagtccctgctactcgggaggctgaggcgggagaatcacttgaacccaggaggcggaggttgcagtgagccgagattgtgccactgcacttcagcttggcagagcgagacttcgtctcaaaaaaaaaaaaaaaaaaagctgctataaatatggccaagactaaggaaaggtaagtgaggtgcttagggttcacattttatggagtaagagtaagtaccttcttaaggtttataccctaggttcttcacatgcctcactttagtcctagccctgagcattattatgtaggtcttctgatgcaatatctaagagtttctctaaggtatacctagaaatagattgctaggtaatggagtaactttattacttacaggaaactatatggtggttgtaacaatttatgcttctgccaccagtcatggtggatatgaaattatgtcttaatgtgataatttacattgcaatttttttttttttttttttttttttttttgagacagagtcttgctctgtcacccaggctggagtgcagtggcgtgatcttggctcactgcaacctctgcctcctgggctcaagtgatccttccacctcagcctcccgagtagctgagaccacaggcgcaggccacacttggctaatttttgtatattctgtagaggcggggtttcgtcatgttacccaggctggtcttaaactcctgaactcaagcaatcggcctgcctcagcctaccgaagtgctgggattagaggtgtgagccaccacacctggctgtttgtttgttttgagcctgttcctcaggctggagtgcagtggtccaatcatggcttgctgcaactccgcttcctgggcttaagagatcctcccacctcagccttctgagtagctaggactaagggcacctgccactatgcctggctaatttctaaagttttttttatagaggcagagtctcgctgttttgcccaagctgttctcaaatttctaggctcgtgtgatcctcctgcctcagcctcccaaagtgctgggattataggtgtgagccaccacacctggctgatctatctgtcttaaactggagaattgcatttttttctacctcctttcttttttttaaaaaaactgaatttccatctgttacccctccctttctgctcctcttatttcatgccttggaagttatactttgccttcctttaatgagtaccaaagaaattaaaaaatacatgtttactgtaagtccaggcctaaatgttgctactacagggaccatcaaatgctttactaccatctattgccatctgcaaatgtatgccattgttgtttagttttgtagttcttaatgtattttaattaaacaccacaaattatgctttttgtttgttttattcagtcagtagatgcttagaatacttgcttattttaccaattcctttgcttattccactcctttgttctgggattatttttctttttcctaatatattttcattaaaagtttatttggtgagaatctaaaaactctcaaattctgaaagttttaaaaatttgcctttgttgttgaaaattagttttgatgggtgagagaatctagatcaggtgttagcaaacctttttttgtaaagggccagatagtaaatattgtgggctttgtgggccatagagtctctctgacaactactcagcaatgctgttgtaggacaaaagcaaccatagacattatgtaaacatgagtgtgggtatgttctcacaaattttgtttatagacactgaaatttgactcaattttcatgtgttaaaaattattattttttgaatttttttaaccatataaaaatgtaaaaatcattcgtagcttgtagaccaaataaacaggatggatttgacctgtgggccatagtttgctgacctctggtctaaattaacattcattttacttagtacctgacactggagtaattattcttatgatgtcttattgtgatattgtcttccatttttaattgttgaagagccagctgtcagtcttttttgtttttctttttcttcttcttttttttttgaaatggagttttgctcttatcgcccaagctggagtgcagtggtgtgatcttggcccactgcaacctctgccttctgggttcaagcgattttcctgcctcagcctcccaagtagctgggattacaggtgcctgccaccacacccagctaatttttgtatttttagtagagatggggcttcaccatgttggccaggctggtgttgaactcctaacctcaggtgatccacctgccttggcctcccaaagtgctgcaattacaggcatgaggcacggcgtctggcctttctttcctttttttttttttttgagacgtagtcttgctctgttgcccaggccggggggcgatggtacgatcttggctcattgcaacctctgcttcccaagttcaagccattctcctgcctcagcctcccaagtagctgggactataggcacgtgccaccatgccgagctaatttttgtatatttagtagagacggggtttcaccatgttgtccaggctggtcttgaactcctgacctcaagtgatcctctcgccttggcctctcaaataactgtcctttctttgttggtaatctggtgatatgttttcttgtttggctgcttttaagagctgcttcttgtctctggtgcagttcgctatgatgtatctaagtatgtatttattttcatttaacctggtcaggatttgttgagtatccagaaactaaggattggtgtttctcattacatctggaaaaatttgagccattatttttgcttatattgtggtatgtcataggaagttgagaaaagaaaaattcatttgatggttttctatgaggttatagtggaaaataactatctcccttttagaattgagtgctagacagtttctgtgtagatgatctcataagcttccttttatcaaacagcgatcacttttttggtttggctgctgagaagtatggcatcaagtataatactcatatgaggtgtttaagaactgagtatatttcttatgcacattttactatatactataattatacattaaaaatgcacattgtaaatattataaatatgtgttatacattgttaatagtttggatagcaaaagtatgacttgacatttgttttttaaaccatatttaaagtaactctatcacaatatggatttaatggattaattgcataattggtgagctactgattattcttgttatttggatgcttctttaagttagcaagtttatattgtggtgcttcaatatagactacttatttcatttcagagaactcaatttcctgtatctactgagtctcaaaaaccccggcagaaaaaaggtctgtatgcagtttcatggtatgtgtatgtttgcacagacagatttctcttttatttatttatttatttttttttttggaggcagagtctcactgtcacccaggctggagtgcagtagcacaatcttggctcactgcaacctttgcctctggggctcaagcaattctcctgcctcagcctcccgagtagctgggattacaggtgcacgccaccacacctggctaacttttgtgttttagtagagatgaggtttcactgtgtttgccaggctggtctcgaactcctgacctcaggtgatctgcccaccttggcctcccaaagtgttgggattacaggcgtgagccgccacgcctggccagatttctctctcttgttgattcttttatctattctatattatttcaaaatgagtgttgggaaaagaagtaatagtctaaatgttctgtcacatctagcttttatttaatagagttattagatattaggaggttggtttgacctggaaattatttaaatggggtttgattattatgtaagtgtgtactaattttctgcttctggaaaaaccactttgtgaagttccaggtatctttttgctttgttggtttctagtttaattctattgtgggtagagaacattctttatatggtttgttttatggcccacaatgtggcctgtgttggtgcatgtcccatgtacacttggaaataatgtgtattctgctcttgtaggatgtagcattctgtaaatgtcaattaggtcaagttggttgatagtgttctgtatatacttacaattacagatattcatattcttactgatgtagttactgattggaagggtgatagaagagtgttgaagtgtgcaaatgtaattgtggatttgtttctactttcagttctatcaatttttgatttgtgtattttgaagatctgttgttggatgcatatacatttaggattgtctgatttcttggtaaattgacccgtttgtctttatataatattcctcttcaatttctgataatattccttgtttgaagtctactttgcctgataatattttagttttagttatttatttagctattttagttttgctttggccagtctttgaatggtatcaacatataattttcgtagagtaaaattccctttttttagtacaaattctgagtttcgacaaatgaaactagccatgtaaccactagtagcaccataatcaagttataaaagtttaattactcccccaaaagtcacctttactttgtagtaaaccacttcttccattcccaattgcgggcagccattaatctgtttctttcttcctagttttgcctttcttggaatgccaaataaatggaatcatacattattattattttgagagagagggtctcgctctgtcacccaagctagagtgcagtggtgtgattatagctcactgcaacctgaaactcctgggttcaaatggttttccccagtagctgggtctacaggtgcatgccgccatgcctggctaatttttatgtattttttttgtagaaatgggggtctggctctgttgcccaggctggttttgaactcctggcttcaagtgatactccatcttcggcctcctgaagtactggcattacaggcatgagctattgcacctgggttatgtaaatttttcagtggcttttaaacctcatataatgtttgtttgttggtttgtttttgaggcggaggctcgctctgtcacccaggctggagtgcagtggtgcagtctcagctcactgcaacctccacctcctgggttcaagtgattctgctgtctcagcctcccaagtagctgggattatcggcatgaaccaccatgcctggctaatttttttatttttagtacagatggggtttcaccacgttggccaggctggtcttgaactcctgacctcaagtgatccacctgctttggccccccaaagtactgggattacaggcatgagccactgcatccagcccaatatagggaggtattaagaaaagagaagaactatcatccttaagtattaacgggactttaacaaattaaaaaagtagtactttgaataaaaagctgtcacattttactgtgaaatccttagactttttttatacctctagttcaggttttttcagctttggcatgaatgatattttgagcaagataaatctttgttggagttgtcctgtatattgtaggatggttaacaacatccctggcttctacctggtagatgacagtagcacttaattgtaacaaccaaaagtgtctccagatgttgccagttattccttctggggcaaaattgttcccacttgagaaccactgctctggttaagtagtgtaatacttggaaatagaaggcagaaagttggtaagtgcataaagaattcacacagaagttggattagcaagctgagagacgttatttgaacaagtagcaattggaggcattttgactgagaatggatgttgtgcctctccctcactctttcctcctcagcttgagaggtccatattctctcaaagtttgactctttagttttgagggtgatgactgccaactgtggaagggataaacagatttctgtttggtatttttgtccaaatatatcaggactttttcaagaacaggcaatgaaattattgatcagaactacttggtggttctgagaaaataatatgctacatgaggctactgaagtcctcttccttttgccccatgatgtaaccttaggtgactttcttctggctttcagttgaagatcttacccatcattgaggtgagcgaactgatttactgcttgagtctattttcttccttaaaggagtcttcattgaaaactttacccattttggggtggccatagctgaggatgagttttgtccacaacctgagacaacatactcactatgtaaaaaacctgatctcagcttgatatctggttttagactaattgtttaatagaataatttattattgtaaaatatatataaaatttaccatttttaagtgtgtaagtcagtggcattaagtacatttacaaagttgtgcagccatcaccactgtccatttctagaagtgtttcatcattccaaacagaaacactgtacccattaaacaataaatctccacatccccttgcctccccagatcctggtaatctccattctattttctgtatctatgaatttgactattctaggtttttcatgtaaggtgaatcatacaatatttgcccttttctgcctggcttattccactcagcattttcaagattcattcatgttgtagcatgtgtcagaatttcattcctttttaaggctgaataatattctagtgtatgtatatatcacattttgtttatctgtctgttgatgggcatttgggttgttttccttagagtctttatatgtcagtaattcttaaagaatttaaaagttgtagaaactaggaattttgtagatattctagaaatatgtcatttcctgtactgtatataataatttattctacagactaattactgtgtatatatttggttctcagacgtgattttgattttgtagatgctgtacatgctcttcacttcattaatcttttccttttgctaattttggttcttgtgtatacagaattatagagttacaaggtaatttagttgttacctaattcaccctaaagtctacatgaaaccactgtcacagtctttgataagtagttaccaaatctcactatttctactgtgatagtgaatgactttcattgattagctttctgaaagaatagtttatcttacttgtcttggtatcctcacctctgagtctatttgtctattgtaatctggcttttgctccaccgctccactgattaaatggatgagctaagcatttttttttttttccactgcaacctctgcctcccgggttcaagtgattctcttgcctcagcttcccgtgtagctggtattacaggtgcccaccaccatgcctggctaattttttgtctttttagtagaaacggggtttcactatgttggccagactggtatcgagctcctgacttcatgatccaccccaaagcctcccaaagttctgggattacaggtgtgagccaccgtgcttggcccaattctgtttaatttttgaggaacaatgttaacttctaatttaaatggaaggtagtatatatctaatttttccctattatttttaatttcaatgctagtaaatctttaaatctgaaatacacactcttgaattttgacagatatgtatactcatgtacatatttatattcctgtaatcatcagatcaaattaaacatttttatcacttagaaagtttcctcatgcctttttccagtaagtcttctgcttcacttcgccagatgcaaccaccattctgatttctgcctgtataaattgattttgaactttcctataataagttgtgcttgaacttcacacaaagggagccatacagtatctactatttagcttttggcagctttcatacaacatgttgttttggagattcatccgtgttgttatatgtatcagtagttcttttatttaaaaaatgctgtttagtattcagttgcatgaatataccaccgtttgtccattctcctgttaatgagtatttgcaatgtttccagtttttgagtactgtgaaagtttctatgaacatttatttatttagagatggagtctcgctttattgcccaggctggagtgcagtggtgcgatctcagctcactgtaacctccgcctcctgggttcaatcgattcttcagcttcagcctcctgagtagctgggactataggtgtgtgccaccatgcccggctaatttttctatttttagtagagacgggatttcaccatattagccaggctggtcttgaattccttacctcatgatccgcccgcctcagcctcccatagtgctgggattacaggcatgagccactgcacccggcctgaacatttatttactggttttttttgtgtgtgcatgtgtgtgcaagttttcacttgaataagtgcctagggagtggaattgcttggtcatatgtgaactgtttgttttaactttataataaactgccgaagtattttccaaagtggttgtacagttttacccgaccgccagcaacgtgtgaggattctgtttggctacattcttgccaacatttgttactatcagtctttttcatattagacttgctggtgggtatattgtgttttattgtgattttaatttgcattacactaatgactagtgatgttgaacaccttttcatatacttattggtcatatcttttgtgtagtgtctgctcaagttttttgcctatttttaaatttcttttttccttattattgatttgtgagacttcttaatatattctgaatgtacgtcctttgtctgttatatatgtggtaagtatttccccccagcctgtgttttactactttcattttattaaggtatcttttgatgatcaaaagttttaattttgatgaaggccaatttactattatttttcttttgttattaatgccttctctgtcttgtctaggaaatcttgatccttaccccagactgagttgtgtgtcctctcccttttctgcattaatattgcagaaattaattttttggttttagaaaatgtctaatttggctcaatcagtaatttttgatatctttctattgaaatatatatacagaaaagtacatacataaatcataattgtactgtgcagtgaatttttacaaagtaaacatatccatgtaatcaccatctagattaaggtatagaatattatcagtgccctccaggccgcctccttattccctaccagtcattaaccacccctcccaaaggtagtaacttgtatttaacttctatcttctacatcagttttgcctgcttttgaatttaatgtaaatggaatcatgcagtgtgtactttttaatatctaacttcgttgctcagaattatgtttgtgagattcatttatgttgttgcatgtagtagtggttggttgttttcttccttgttatatatattccattgtggggctctacctaagtctattcattttatacttgatgaacatttgggatatttttattgtgatgtattatgaataatgccaccatgaagagtcttgtacatgttttttggtacacatacatacttaggagtaggattttcagggtcaccaggaaggatatatttaggctcagtgaatactagcaagcaatttttaaaatgcggtcaatataatccccatgtgtaaaataaaggtgtacaaacgcacacacacacacttgctcatatgcttatatgtgcatagaaattccttgaaaatactcaagaaatgcttcacctctggtaagggataggaatggaatgggtcttttgtttagtatcctatgtgccctttgaattttgttttactgtaagtatgtatttttaagaaaaccaactagttatttttaaaaatcatttgaaagtcttcctactttgatatatgaaaaacactggttttaaaaaaaataatagaaaagctttaaaatcattattatttttttgagacggagtcttgctctgtcgccaggctggagtgcagtggtgcgatttccgctcaccacaacctttgcctcccggattcaagcaattctcctgcctcagcctcccaagtagctgggactacaggtgtgtgccaccaggcccagctaatttttttttttttttgtatttttaatagagatggggtttcaccatgttggccaggatggtctcaatctcttgacctcgtgatctgcctgcctcggcctcccaaagtgctgggattacaggcgtgagccactgtgcctggccgctttaaaatcattaatgttgcgttgctcagttatgtctaattgacagcccaaacatttacattgtaatattagaaaatcctttatgattgggcagaaacttggtttaatgtgtcaccttggagacctgggttatagtcctgcctcttccattaactacttgttgaatgtggacaatttacttaacctttagggccttaatttcctcctttataatgtgagaatgttctctgaattgcataactcactggccttacgtgactattcagtggaataataagagagaaaaactttgagatacatgcacacacacccttaagaaggatataattgttaaattttgctttgaggaaataaaataatctaagctataaagtaaaaccataattagctaatcttttatatgacttttttcttcctcatttcaagctaatgagaagcaaacaaactggatagcagcaatataattaaaaaattataggccagcttctagcatgtattcttgagtcaatactgactcagcccagtctcttcctcttccttcatcatcatttatgtacctgaacagagtagatgtttctcttgatcctgggcctgttcgccctcagatccattccttgccttctcttctctttttggtatagtgaggagctgactctttttttttttttttttttttttgagacggagtctcgctctgtcgcccaggctggagtgcagtggcgggatctcggctcactgcaagctccgccttccgggttcacgccattctcctgcctcagcctcccaagtagctgggactacaggcgcccgccactacgcccggctaattttttttgtatttttagtagagacggggtttcacctttttttagccgggatggtctcgatctcctgacctcgtgatccgcccgcctcggcctcccaaagtgctgggattacaggcgtgagccatcgcgcccggccgaggagctgactcttgcagcctccttttcttcccaggcttccgtgtcagcagtttctggctggattagcaagtggaggaactggcaggagattagaaggcaagaggaaagagaagacagggcttccctccccgaccttcaggcctcagagtcgtagtggttttttgctcatgcagacttctgatttgtctcaccattccctgttgggcctctcatttcttccattgcctgttctctgcattaaagtccttgtgtttcaaatcctcaagtggctttttgttaggctttgactgatacagggctcaaaatgatagtaatgaaaatgtcttacatttatattcttttcaagatttgttatctcttttgataccccaaatatcctattgaggtagaaaagtgttataattcctgtttggcatgaggaaattaacatttattgaatgactattttcagattctttggattttcgggtgaaaattttaggggggataaatggaggcccagagaagtgaaataacttgccctaggccccatagaaggctggtattgaatcaagattgaaattctgcatgtgaaaacttttacgtgctacatgtctgctagtcctggaagaaatcctttctttgatgagtattttttttaaaggctttacttgcaatatatttacaaaagccttagttatttagtaaatttttcaatgaaaaatctgaaccataataattttctgcttagtacttatatagctagcatactatccctagcattaatcaaagtgtcatgtaaaggtttgatttttgagcctaagcagaatttgaaattcttctaagagaatttagcacctagggcaaactacaggggagaattcttgaggtgtcatgtttattcacttctggaattgtttaaaatatgtcaggtgcatccttaaagggagaaagaagggggaagagatgttacaaaagagtagaatggggcaagagaagtggcaagggagtattgttgctaggttgccagccttctgcccccactgtcttggtgatggtggaggggtagtgtggcagctgggatatgaatgaggtcttttttataactcactaaaagccattaccttgtcttcatctcgtcagctggctacctgacctctgtggtaacataggctcctgaaatgtagcattggagatgatcactgtgctttattgcaaaataggggagactctgctctgcatttacatgcttatgttttgtggaggatctttcaactagtaattctcataatacctgtgaaagcatataagaaccagtatctccatttttagggggagttggagtgagcaatgatttggaataccagaaattcaacttatatatttacaggtaaaattctaattgtaaattcaggattcatagattctagggatttctgaggtatccagaattccttcatctttgatgataagtagataataatggtaataaaaataacagcaacaggcccagcacagtgacccacacctgtaatcccagcactttgggagactgaggcaggtggatcacttgaggtcaggagttcaagaccagcctggcggacatggcaaaaccccatttctactaaaaatgcaaaaattagctgagcatagtggcatgtgcctgtaatcccagctactcagtaggctgagtcataagaatcatttgaatctgggaggtggagattgcggtgagctaagatcgcgccactgcactccggcctttatgacagaactcgactccatctcaaaaaaacaaaacaaaacaaaacaaaacaaaaacaaaatgcaaaaaaacagcaacaataataggtaacatttctttaaggcctactatgtaccaggcactatttgaacctctttatatattaggtaatacgatacaactctatgagaatgagtattttatttcctgacccttctatttaaaagtaaaaccccccacccggcactgtttctctttcctgctttatttttctccatagaaaaatatcactcataagtgtaacatactttattatctgtcctgtgtggtagtagcccctgccctcaattataaactccatgaaatcagggagtcagttttgttcactgctgtattcccagtgcctagaacagtgcctggaatcatggtaggtacccagcgaatattggttgaatgaatgagtcttggttttacagatgaggaaactataaatttcccaggtcacacatttggtaataggacagttgtgtacactgaaatgttctctaaaatatttgatggaacgaaaattagcttttggacagctacatctccaagagtgtgaaatgaccttcagcactggatttggtggattttcctttttctaatccctagagttccatttaatgagcgtttgggttcttgagctaccttacaaattgaacacttttttctccagctttcactcaagaaacacaaaacatggcttgtcctttttttttttttttttttttttgagactgggtctcactctgtcacccaggttggagtgcagtgcacaatcatggttcattgcaacctctgcctcccaggctcaagcaatcctcctaactcagcctcctgagtagctgggactacaggcttgtgcctccactcctggctaatttttttgtattttttgtagagatggggtttgtccaggctggccttgaagtgctggactcaagtgatccgtccacctgggcctcccaaagtgctggggttacaggcgtaaaccactatagctagccctgattgtcttttattgtgagattttaataacagctaagacttgaaaattaacattttataaattttcttttagactacttagtgatatactaagtatctaaggtttgtaatacttagtataaactcaaaagggttcagtgcctcattctcttttactctttccctttagtagataggtgacagaggactgggtcatgcagttgagacttggtccaagatgacttagtaagctacttgtcccagaactatttatttatttacttatttttgagatggagtctcgctctgtcgcccaggctggagtgcagtggtgtgatcttggctcactgcaacccccgtctcctgggttcaagcgattcttttgcctcagcctcccgagtagctgggattataggtgcccgccaccactcccggctaattttttgtatttttagtagagacttggtttcattgtgttagccaggattgtttcgatctcctgacctcatgatccacctgcgtggacctcccaaaatgctaggattacaggcgtgagtcaccacccccggaccctggaactatttatgacggtgcactttatgcacttaacacactcacatgtctttaagcttggtgactcgtgtggctttttcgaaggagatttgattctggaagtggttaagtaggatgtgaatggctaaggtctggtcattggtgaagcctaggggaagaaaagaaaggaaacacaagtcttagaagaatttcagatcggccccaacgactagaagggtggttctactaagaaaatgtgtgtagtcagaaaatgaagagtcagttgcttaaaattttactttttttcttgttcctggcatgtaaagtcatatccatactttctgttataatttcttcttacaaattccattgataatccctattcttggatagcaatgagcagcattacttcttttttatttttttaaaaaaattaaattttttgttgaaatgagggtcctgctgtattgcccaggctggtatcaaatttctgggctcaactgatcctcctgcctcagcctcccaaagcgctgggattacagttgtgagccagtgtgtctggttgtaccttttaatttttgtgttcaggcaacattaactctgagtcacagtaagctttttttttcttcctgtcatattatggacatagaagttttttggttttctttagattgtttctccttaggttgcagaacatcaagaaatggattacagtcattttcctctcttccccatgctcttccctttcttttccttttttcttttctttttttttttttggagacagaatcttgctctttggccgaggctggagtacagtgtcatgatcttggctcactgtaacctccccgcaccaggttcaagtgattctggtgcccaagcctccctagtagctgggatgtcaggatgcgccaccacaccctgctaatttttgtatttttttgtagagatggggtttcaccatgttgtccaggctgacctcaaactcctggactcaaatgatctgccctcctcggtctcccaaagtgctgggattataggcatgagccaccacatctggcctcttttccatttttaaaaaggactgtctccaacatattaaaattcacaaaaaataatataaacacacatgtactcactggctaggcttaataaaaaacatttagtcatgtttactttaaagctttttatttttttgagaaataggcattaaagagttgaagtctcctttctgtcttttcataattctgttcttccctcttccttccttgagatcttcactattcttgggttaatttggatctttctactccttgttaccacagaaaagtaattcttaatgaatttgaccatattttaaacttctgatttcagtgggcaggtaactcattttatggtttctgtattgtgagccattttcaatgactcaactagatttttttcatcgttgacttctcatttctgggcaacagcataatgttctcatttgagctatttctaaagattgtgtttaactatttaaaatatttgtggtactctgatcatcagatgtgatttttttttttttttgagacggagtctcactctttcaccaggctggagtgcagtggcgcgatctcggctcactgtaacctccttctcccaggttcaagtgatgctcctgcctcagcctcccaagtagctgggactattggtgcgggttaccacacccggctaattttttgtatttttagtagagacagggtttcaccatgtttgctaggatggtctcgatcttctgacctcgtgatctgcctgccttggcctcccaaagtgctgggattacaggcgtgagccactgcacctggccagaagtgatattaactatcttatatgtatatttctgttgcgggaagtcaggggccccaaacggagggaccggctggagctgtggcagaggaacgtaaattgtgattatttcatggacacttaccagttcccaaataatattcttataatttcttacacctgtctttaatctcttaatcctgttatcttcgtaagctgaggatgtacctcacctcagggccactatgataattgtgttaactgtacaaattgattgtaaaacgtgtgtttgaacaatatgaaatcagtgcaccttgaacagaataacagcaattttagggaacaagggaagacaaccataaggtctgactgcctgtggggttgggcaaaatagagccatatttttcttctttgcagagagcctataaacggacatgcaagtagggaagatatcgctaaattcttttcctagcaaggaattttaataatactctggagaaggaatgcattccttggaggaggtctatagggcatgtctgtcttatgctgttgacataaggactgaaatacaccctggtctcctgcagtaccctcaggcttattagggtggggaaaaaaccccaccctggtaaatttgaggtcagatcagttttctgctctcaaaccctgttttctgttgtttaagatgtttatcaagacaatttgtgcaccgctgaacatagactcttatcagtaattttgcttttgccttttgccttgtgatctttgttggacccttatcaggagtttctgattttgcccttgtcctgtttcctcagaagcatgtgatctttgttctcctttttgccctttgaggcatgtgatctttgtgacctactcactgttcttaggccccctccccttttgaaatccttaataaacacttgcttattttgcagctcaggtgggcatcacggtcctaccgatatatgtgaggcccagctgtgaaattcctctcttcgtactcttatttcttagccggctgacgcttatagaaaatagaaagaacctacattgaaatattgggggcaggttcccctgatatatttccttagtgacattcctgcaatctcctttagaaagtctttctgttcaccttctataaccagggaaggagagattgagaagagacgaaggatgattttatgtttttcagtcccagtcattatttgatgagaaactgatattacaagctttaaaaactcaagatatgtattcaacatgtagtagtagaacaagtatcttagtttaatagtctataaatttttgatgcactataatatattattgtagtcagtagcatcaaaattttaatgtgatattgcagtatgtttatggttagtttagacatgaggacagtgctaaaggagaaaatctaatgactgtgttgtttgttttgtcaaaatatgctgcctagctccagagtttcctattttggagaagcagaactggttgattcatcttcattatatccggaaagattatgaagcctgcaaggtaagagattgccataataataaaaatgagaggcaggatgttgggtaggcaactaacagtgcctgctaaacagagtgtggcagtttatatctcagtgataaaacatgaattccttcttccccatacttcatacactggttatcttttgctatggtagtgatgtttaacatacaacctcaatatttcagtggcccccaacaaacaaatattaattgctcatgggctttcagatcagctgtgggttggctgggtttgactgcaggctgtgggtcaggtttaggtgtgttccatgtgtcttctcatgtcaagagcaaacaactctcttggacatgttggtcttctggtggaggcagatgttcaactcagcatattaacttttttatctttggatagatgaaaaatggtattttgtcgagtttttttttttttttttttttttttgagatggagtctcactgtcacctaggctggagtgcagtggcatgatcttggctcattgcagcctttgtctcccaggttcaagcaattcttctgcctcagcctccccagtagatgggactacagatgagtgtcaccatgcccagctaattttttgtatttttagtagagatggggtttcaccatattggccaggctggtctcgaactcctgaccttgtgatctgcccgccttggcctcccaaagtgctgggattacaggcgtgagccaccgtgcccagccctgagttttattttttaatttctctcttactgcaaggttgatcatcatgtgtatatttaaaaaccatttgtatttccctttctctgtatctttggtgacataccatatgtgttacaaacttgcaggcagacagtggtagtactaacatgcagaatgtatccttggtgtcatcttttttggtatccagagctttgtgacccatctaaggtttttaatttatacccatggcatttatacctatggcaatgcacagaactaattcatactggtatgacaaagattcataccagtttttttttttctttttttaagtggagttttgctcttattgcccaggctagagtgcagtggcgcaatctcggctcactgcaacccccgctttccagtttcaagcaattctcctgcctcagcctcccaagtcgctgggattacaggtgcccgccaccatgcccagctaatttttttttttttttttgtatttctagtagaggtggagtttcaccatgttggtcaggctggtctcaaactgctgacctcgtaatccacctgcctcagcctcccaaagtgctgggattacaggcgtgagccaccgcacccggcccataccagttttttttgacaccgctgatccgaaggcagataccagtatgaatctttttttttttgagatggagttttgctcttgtcgccaagggtggagtgcaatggcgtgacctcggctcaccacaacctccgcctcctgggttcaagcgattgtcctgcctcagcctcctgagtagctgggattacaggcatgtgccaccacgcctggctaattttttgtgtttttagtagagatggggtttttccatgttggtcaggctggtctcaaactcccgacctcaggtgatctgcccgcttcggccacccaaagtgctgggattacatgcgtgagccaccgcgcctggccaccagtatgaatcttgaaaggttctctttctttttcatctgtgataatacttggaaatcttatcacacttttcttagcttgcctagttagattttagacaggggttggcaaactttttctgtaatgggccaacaatattttagggtttgtaggccacatacagtctctacatcatatttgttatcttattttttataaccctttagaaataaaaaaaccactgttagcttgagagctgtacaaaaatatacagggcctgtaagccctgtagtttgcaaatccctgttctagaagaagtaatcacaacaagggagttgaaattttaagaaactgaatgaactaatactttactaggcattattaatactctaggtttttttacatatgattcttgtccacgtctgctttttcattactatttgttttcttttttttttcagacagagtctcactctgttgcccaggctggagtgcagtggcgctatcttggctcactgcaacctccgcctcctgggttcaagcgattctccttcctcagcctcctgagtagctgggattacagacacgcaccactactgcccggctaatttttgtatttttagtagagatggggtttcaccatattggttaggctgatcttgaactcctgacctcataatctgcctgccttggtctcccaaagttttgggattacaagcatgagccaccgcacctggcctgtccatgtccactttttcttaaagacacctgaagaaacttaaccactgctcagaagcatttttctccctctttcaggctgttatcaaagaacagcttcaagagactcagggattgtgtgaatatgctatctatgtccaaggtaagacacatacttcttgtcttcttgctagagaaatacacttttcctaggttcttgaaaaagatcaggcaattgaagaaacaagttcaagtacagtcatgcaccacttaacaatggagatatgttctaagaaatgtgttgttaggcaattttgtcattgtgtgaacattacatggagtgtacttacacaaacatagatggatgatatagtgtactatacacatgatatagtctgttgctcccaggctacaaacctgtatgagcaggtgttataccgaatactgtaggcagttgtaaaacagtggtaagtgtatctaaacatagaaaaggtactgtaaaaatatggtataaaagataaaaaatagtatacctgtatagagtacttaccatggatggactggaagttgctctgggtgagttagtggtgagtgaatgtgaaggtctaggacattattgtatactaatgtagactttatgttgtatactaatgtagactttataaacactgtacacttagcctacactaaatttatttaaaaatattttttctacaatgataaattaactttagcttactataactttttactttataaactttaaaactttttggctcttttggggtaatacttaaaacacacaacaacattgtacatttgtacaaaaatagtttctttaggtccttattctataagcttttttctttttctttcttttttttttttggtagagagacagagtctcactttgttgcccaggctggtcttgaactcctgggctcaagcagttctcctgcctcagcctctcaaagtgctgggattataggcatgagctacgacacctggccctttatgctattcttaaaactttttatttttttacttttaaacttttttgttaaaaactacgatacacacactactacagtggtggtactaacatgtggaatgtgtccttgctgtcttttttggcattcagagctttgtgacccatctaaggtctttgtgacacacacacacacacacacacacacacacacacacgcacacgcacgcacgcactggtctaggcctacactgagtcaagattataaatatcactgtcttccacctccttatggaaggtcttcagtggcaataacatacatggagctgtcatctcctataacaataggaataccttctggaatacctcctgaaggatctgcctgaggcagttattcttttttttagtaagtggaaggagtacactctaaaataaagattaaaatgtatagcgtagtaaatacataaaccagtaatgtagtcatttattatcaagtattaagttctatatatatgtaattgtatatgctgtacttctatgtgactggcagcacagtaggtttgtttataccagcatcactacagataggtaagtaatgcattgcactgttttgattgctatgacgtcactgggcaataggaatttttcctcttcattataatcttaagtgatcatcatcatttatacagctgtcgaccaaaatgtcattacaggtgcatgagtttaaatgttccagaaaggttttattcagtattaatctttttatggaatctgaatataattactgtgttggatttgacttcagaaatgactagtaatgttaaaaaattgctatgattacccattttttagtttctggctagtgttttttggaatggatgcttaggattcctgcctaatgcagtgatttcagggccaaaagatgcttttggaaggattgcttgtaatcaagctaaaagagatgaagaagagcttgaggatttctgtaaggtgaatcaggatgaggggaagaagcctggaaataaacaagataaagcagagcataaattcagctcattagaaaccaaagataaggaccactcacttactttttttttttttttttttttttgagacagagtcttgctctgttgcccaggctggagtgcagtggtgcgatcccagctcactgcaacctctgccttccaggttcaagcgatcctcctgcctcagcccccctattagctgggattacaggcacatgccaccatgtccagctagtttttgtatttttagtagagacaaggttttgccatattggccaggctggtctcgaactcctgacctcaggtgatccacctgccttggcctaccaaagtgctgggattacaggcatgaaccactgcacctggcccactgacttaaattttcctctttagtggcataagtagcattcttagtttttccaggaactttctttttgactcttgggtgtaaataaatggttttgtttaccattcattgcatttgtagtcttcagattaacatataattttctgacataattgttaagatattgacaaatttaggacatcatggcaaaaaatgctcttattcccagtgtcacaagtatcagactttcagtgcctgataaattcttctggaaacataggcctaggaaaaacctctggttctaattggttgttacactgacaactgaagtcttaaatgttactttatcctttgccagaatctccatgttgaatttgaggtattgattccatttgccccatttgggggttcgctctgaaaactatcagttggaagtaaattatgataaatgaagcatctgatggggaagccccaaaatgttgttaatgtgaagagtttgtgtgataatttgcaaaggaactgattatctatgtgatggatcctgggagtagagagagaagtaggtaggtttgagctaccttgctaaaagacagttgagcttgtcagcagttttggttgttgtttcagcctgtccaaagccatatctgattgttttaaggatacagttgtccaaaggatttacttgatgtggtttcccagttttctcttctccaatttttctgaccccaggctccattcttcccagaacatggttttacttttttttgtattttctgtttcttggcagcattgatatttcgcctagaaggaaatatccaagaatccctagaactcttccagacatgtgcagttcttagtcctcagagtgctgataacctcaagcaggtggccagatctttgtgagtattggcaacctggaggccctagggcactcacagagaacagtgtaaaatgcattcctaggtccagcctgctgctggcagctgcatcagcctgatacacaagtgggggaatggtttaataggtacagtgggattcactctgaagagcatggattaagtttgaaatttgagaaaatgagataactagtgttaaggaactaagcattttaaacactgtgcattctagtttgatgggggaccaatattgtttatcatgtaaatagagacaccttgtaccctaagtcttctaaacttattggcaatccttggaatttttctcatctactcttctaacacttagtatttgtcacacagtaagtttttagtaaggacagagagttcctgacttctgatggttcaacttacataatttttcaactttacaatgatgtaaaattgttatgtattcagtagaaactgtacttcaagtatccatacagccattccgtttttcattttcagtatagtattcagtaaattacatgagatattcagcattttattataaagttggcattgtgttagatggttttgcctaactgtcagcaaatgtagttaagaaagtggagataggaactccatggaacagagtaagtgttctgagcatgcttaagataggctaggctatctatgatgtctggtagagtagatgtattacatgcatttttgaattacagtgttttcaatttacaatgggtttactgggatgtaaccccatcataagttgaggagcatctctatttgttgagtgaatgtcctaaagattcctagatggaaagaatctcaagtgtttataaactactaggtactcccttttcagtcctttgttccatggagttcctatctcccctttcttagccacattgccattcatacctgtgttgtttttgcatagagcttggttttccctgtttctctctaaactcaggatccaatatcaaggaaagagacttagtcttggaaggaaaggatgtgtccctaatgggtgatgataaatgatggtagttactgcttaacatggtatatcattaggcttatttcttttttggtctgcatttatagtacattgtagaagaaaaattccacaagactctcactaaaattggtatagaatgagaccaaggccttggaacagctgccagtgcaatccctactaagagagcttctgctgttagtgtatagcagcttcactgaccaaaccagcacaaccacctcatagagaaaaggcttctagaattctctgctggatgaaatatgattaaaatgtgggactagtagggttagtcttctaagaattttgaggtaataattatggaaaatatatcttttacagatttcttttgggaaaacataaagctgccattgaagtatataatgaagcagctaaactcaaccagaaagattgggtaagtagagaactttcagttctttcttattagtaaacttgctaatggttccatttatcatctggctgtcttatttctgaattcttacattccaaaaatgtcttgattttaacctcatacttaattcatgatttgtataagtataggatcaaaaaccatgtttcctcataactttgcaggcattgctgcatgattttctagcagtttgctgacgagcagtctcttaccagtctgattcttgttgatgacccctagaagctttgggtatttttttcgtcattggaattccacagtatcagcaataggcatctagttgtgtttcatgtctttttcccgtccccatctgtgtgacattcaattgactctttcattctgaagacccttgcctttctttgggtcagggcctttgagtagttctttatttttcccctccccttctctttgtgtcaattgaggattgtgtgtaaatgcaacagaaaatttgactaaacattggctttacaaattcgtttttgtttttttttttaattctcatgaaacaagatgtccaggtaagtagttgctggcattgatttggtggtcctaggatgtcaagactgagagtttttcctcatggttacaagaagactgctgcatccagcatcatatctgcattctagggaggcagaaagagaaagcaacaaggagaaaaggacagagcctatactgggaaagcacaactttcccagaagtcccccacagacttccacttatgtcatatcagctccccttctataaggaaggctggttaaatgtcgtttttaatctggtcacactgccactctaaacaaaattagggttcttttagtaaggaaaaagagaagagtaggtagcaggtaggcaagtagataactagcagcatctgccacactgttttccattctctatgagagatgttctctaactattctctacaactcttaacttgcctctcattttctacctctgtgtccttttctttgtgtgtggtgcgggggggtacagaggctcactctgttgcccaggctggagtgcagtggcgtgatctcggctcactgcaacctctttcttccaggttcaagtgattctcctgtctcagcctcctgagtagctgggattacaggcgcctgccaccatgcccggctaatttttgtatttttggtagagacggggtttcaccatgttggctaggctggtctccaactcctgacctcaggtgattcacctgccttgtcctcccaaagtgttgggattataggtgtgagacaccacgcctgaccctccttgtcattttattatatgttcaggacatgtattcagtcttatcttccatatcatcatttttgtttttagctatttgtattctgttatataccctatccatccaatattttttatttcatttccttttattgtatttttaatttccaaaaatcttgtcttttcttcaatgtctctgattcttgaagttcttttctgcttctcagaattatctttttcttcctctctgcattttggttcttctattttatgctgttggtatttttcaagtatttggtgattctcagagagacattcatatctgtgagtgaagaactagatttattagtacagagaattagcatggatttcctttgcagttcttacggggcactattatttttgaagtgtgttcaatttgttagtcgcttttcttctgtacatcggaagattgagttgagtctttatgccatggagtatgttatagctaacagccagagtgaaactacagatgaagaaaaattcatgtacttttcattcagtcggtttttcaaaaaatgagtatgtctgctatatgccaagcactgatctatgccctggagatgcaaagatggactgttggattataagatactcaactagaataggaaatgaaggaagaagagcaaggtttggaagaaggtgatggtaagaaatcagagttaaatcctgtctttcagaggattttggatatgataagttttaggttctgaggggatatctaaattgagatgtgtccagtaggattggatatagaaatctgaaactcaagtgttttggagtagagatgtgaattctggagtcagcaacataaaggtggtaattgaaaccattagattggttgacattaccctgcaatgagctgaggatgggaccctggaaaaaaagagttttttactttttttttgtctgtttgagacggcacaggaaaagttactgctttaatgcagggaggaagccctgcattctctatgggggccaggatcatgggggtggccagtgccacaaatggtcaccatacaggccagggaggagccagggcccaccaataatccctggaacatccctggatgctagcagttttttactttctaaatttttttttttttttttaagagacaaggttgcctaggctggagtatagtggggtgatcatagcttactgtaacctccaactcctgggctcaagtgatcctcctgcctctgcctcctgagtagctggggctacaggtgcaagccaccatgcctggctaaatttattttgtggaaatgaggtctcatgttacccaggctggtctcaagctcctgtcctcaagtgatcctcctgctttagcttcccagagtgctgggattacaggtgtgagccatcaaaaagcaattttgaaggactgagcagaagaagagaacccatagagggagatagggaagaggtaaagcaggagagctcagggtcacagggggaatggaacgtatttcttaatctatccagttggttgaaagagctcatttggtattactgactcacttgggataaccatcccattgttactagtagatgtgatcattcacaaaacagccattctttttttttttttttgttgagacagagtctcattctgtcacctaggctagagtgcagtggctcaatcttggctcactgcaacctctgcctcctgggttcaagcgattctcctcccccagcctcctgagtagctgggatttacaggcacccgccaccatgcccagctaatttttgtatttttagtagagatgaggtttcaccatgttggtcaggctggtctcgagctcctgacgttgtgatccgcccaccttggcctcccaaagtgctgagactacaggtgtgagccaccaccttttttttttttaactttaaaatttttctttaaaattttccccttcatggcatttttattttctttttagaatattttaatgattttgaattttacttttattaatagcccttacctaccctacatatttcataagtacctgtagaaaaccttatagtagctggagcatggtggctcatacctgtaataccagcactttaaaaggatgctgagtggggaggatcacttgagcccaggagtctgagaccagcctgggcaacatagagacccagtttctaggaaaaaaaaataaaaattagtggtcgtgtgcacctgtagtcctagctattctagaggctgaggtaggaggatcacgttagcccaggaggttgaggctgcagtgatgcggtgaactgtgattgtgtcactgcacttcagcatggaaagcagagcaagaccctgtctcaaaaaaaaaaaaaaaaaagaaacaaccttgtagccctactttcttggactcatcagggtattccacagtcttgctgcaacaggggaatagtaattcctcctgccattatcttagttgacttttggaacagttctgttaagtagggagaatttcccccattgacaagtgaggaagctaaggctttggaagatggaagttgctacagtgaggtagttgctgagccagaactggaattcagacctgtgatctaggatgatctaagattcctcgtcttaagactgtgatcttttccactgtaccaactgcctttgcaggatgtctgctgggttcccttacctcctgaaagataggatttgactctgatttgttctgttgccctttccaaatttcttttgcagttagtttgttaaaggtatattgctgccttctcaactatctatgtcaaagattttaaaaggtcagaggttagccttcaggacatctatttacttacctaccttaacaattcctactgtagagcaggacatttaaaggacaagaaaggctttatttctgccttgtctctctccatgcatgcattcttatagcatgacaaagttggcagtatacaagttttggaagcaggcctgagttcaaatcccaatgttctataatatggacatgatttgtgattgaataaaaaaaatttttaaatgtgcggcatttgtgagataattggaaattttaacgtaattgaatatctaatatcaagcagtcactactttttttcgagtgtgacgatgtgggtagtttaagaaaaaggccttatcttttagaaataaatacggaaacatttgtggataaaacgttgggctgttatttgcttacaaaagttgtgggagtagatggggtgtggattggatggttgttgggacaggatgattagtacctaattctgtctgcacttacgtatgattgaaattctccctaggatgtagaactaaaaaagaaaaaaaaaatcccaatactctctgtcttaagttaggtaatctactcaacctctctgagcttcaatttccttatctgtaaaattggaaagattataactatgttgcaggtttgctgaaaattaaagtaacatatatgaaaacatctggcataaagcctgatgttagtaggtgctcaaccaatggttgctgttttgttgtttttactatttttggagacttggaaaacattaaatcagttgttatctctgagcctgggggtccatgtttcctcagacagggacacatctccactactaatagggtagttcttactatgtttcccaagagcattttccttacccttgctttctccttttccaaagctaccttaaataaagggaggtttattataaaggaatttgagagtccataaaacagtatcaagagatgcaggttggtcttttagtgaagcagaactggaacgcttcagcatccaaggtagctactctgccttttctgcttcatcttttctttctgtagatcaaaggttggcaaactttttttgtaaagggccagttaataaatattttaatttgtatagcttcatacagactctgttgcaacgacttaactctgcagttctaatgcaaaagagccatacaaaaacaatagttgtgtctgtgttccaatgaatctgtacttataaaaaagggcagggaatggatttggcccatggaccatagttttcccatgtcagctctagacttctgcagatggctccaattacatgtattccatcacagcagactccaggtggcgctgtcagtcctcaagttcacatcacctagtaaatttagtacttgtaactaactagctctcttccaattccagattcctagggaaaggacttcagttgtgtcaggtgtcactatccaactgtgttgccttaagggcggaaatgtgtggctagcagccctctcagcaggggctgtgggtagtctctcctgagaagaaggagcaaagggtatgggtgatgggcaactcttaaagaaaaaaggtatggggatgggctgggtatgtgccccagggttccccatagatccaggaagatcacctgtttattctgcttttatttcttataatctgtatttttttatgttgaggaacttatttttaacaattaatttgagtatgaactctaataaaaagctgactgtaatgcatagtttaaagtttaaaccttgccgagcaataacaatctctagatgtctgttgtttcactctaatacttactgtggaattacacctgagttgttttccttcttttttatgagcctaggagatcagccataacctaggagtttgctacatatacctgaagcagttcaacaaggtaatttatagaagtggtgatagatttcactgagggtgcacttgttgcagaagttgttacattgctcatttggtattatccctagtgcttgcagaggtttttggaactgaaaattgaaagtacctttatacatttttttctgttttaattctcacttgtcattattcatctgttgttttctgcttgtaataagaacatggaaagttctagaaatatgagggaatggcagtttttctcctttcttctttttctctacctccagttaaatttcccagtttagaaacagatgcttaataaaacatacatatcaaaaagtggacccttaagtcttaaaggtgtgatcatgaccatgtgagctatctccatgccctgacggcaacttagtttttagggtcattgaaaataaattttaaattttaagtggatctgatttctgagttttcagttttaattttatagttattttccatgatgagaaattatatttcactgtgattaagctatagactcctatatcagagaagacaagttgagcttacctcaaatttggtactcaggtaagaaaaagtatatatcataattgaggagtagacaaaattactgagagctctaaaacttagtgatgagagcgttgggtagtttccttcatagagctcacagttagtgattgtgaagttttattctcctttctccgatgccaccaggactgagaatctgaattggttagtacccatttgacaatgtttagtttgtgtcaatttgcagactggtgtaactagtatcccacactggtgtgaaaaaaaatatgcacattagcagttggggtgtaaaagtaacttttctcctgagataacaatatatatacataaaatacatttagtgggccccttaggttttgtagatggatctatagttttatatacttggttaggagatttttctcttcagagacaatttcaaacaggcacatttctattcacaggattattctgagtcaggggaaaagaaggatttgtctttggttggatctgtgctgagaagaaatatatttagattttactgtacagctaacaggctaggcaaatacaatacctggcatttatataaatgcttgttgaatctgtgaatgactaaacaaagcccttttgtttactaggagaaggtaagctcctccagagcaaggagttggttttataaactcaaatatatttagcatctagaacagcaagcagttgggtgaataaatgagaacaatctatttattcatttatcatcacattgatggggaaacctggcccaccatagggaaggttgtgcacttggtcagtgttacagctgggatttagtttagtgtagtactctacactgtactatgatggcccttttgacttatgaagtatgagtcataggtgtgaatatcaggcagaaaacattcagaaagattaatcgtcttgtataaattcttccaagtggctccagaagcagatatcccatgttgccagctgtcttttcaacaaggacagttttggtatgttttggtctttgggtagtgggggctgtttgctgaaatgtgatgttcctatgtcaatacagcagaaagtgtctttacattagccatataaaggtatagttcgttcagtggtagtgatttggttttctttattttgttaaacttgtcaggcacaagaccagttgcacaatgccctgaatcttaataggcacgatctgacttatataatgctggggaagatccacttgctggagggagacttggacaaggccattgaagtctacaagaaagcagtggagtaagtgtatctgtttcctttaaaacagtgagaaactaaaaaaattgagtggatatgtgaactcccaagcctaaaagagtgaatatgtttgattaattacttactgtatgagttaaaggttaagctgaagtttaagagctcccagtagcttcaataaggtagactgtgtttctttcttacctataaggatgactgctgctttaggttagctgggcagctctattctacaaggtcagccagggatccaggtttcttccttattaactcaccattccttaggctgttgtctttacctgcatggttgatgctgaatgtaacatccacatccaggctgtggtggaaggagatggtttgggaagctaagcatggaataagcatctggctatatatatatatatatatagagagagagagagagagagagagagacatgatcttactccatcactcaggctggagtgcagtggagaacacagctcactgcagcctcaacctcttgggctaaagcaatcttcctacctcagcctcccaagtagttgggactacaggcatgtgccaccatgcccagctaatttaaaaaaaaaaactgtttttgtgttgacagggtcttgctgtgttgcccaggctggtcttaaacttctgggctcaagcgatcctcctgcctcagccttccaaagtgctggaattacaggtgtgagccactgcacctggccttggtaataagttttaaatgacccagaaattgcacacatcgttcctgcttacattccatggttcaaaactacatgatagttacaagggaagtgggcagacatgcactcaagaagaaggaaataacagatttaagagttggccgacagtctgccattttggtatcatatgttaataacagatcttctgttttcagagatattattagggacagaaatctcctgattcagtaaaaaacaaaacaaaacaaaacaaaacatttggccttattagcatgagaccagtatcttttttcccccttccccattttcccttccccttccccgttttccccttccctttccccgttttcccttcccccttttctcttccccctttccctttcccccttcccccttcccccttcctcttccccttcctccttccctcttcccccatcccccttcccccatccccctttccccatccccctttccccatccccctttccccatccccctttccccatccccctttccccatccccctttccccatccccctttccccatcccccttccccctttccccttccccctttccccttcctcctttcccttccccctttccccttttcccatctcccttcccctttcccctccctctctcccttccttcctttttctctcttttctttccatcctttccctccctcccattcccatctttctttgtttctttcttttcttcctttcttccttcctttctttccttcctttcatttatttcaacagtctcgctctgtcgcccaggggtgagtgcagtggcgcgatctcgcctcactgcaacctctgcctcctgggttcaagcgattctcatgcctcagcctcctgagtagctgggactgcacgagcacgccaccacccctggctaatgtttgtatttttagcagagacagggtttcaccatgttggtcaggctggtctcgaattcctggcctcaagtgatctgcttgccttggtctcccatagtgctgggattgcaggcgtgaaccactgcgcccagccttgtgttgttacttttaaatgggatagctgtagcaaaatgccttgtctcatttgtttggtcccttaatagaatgtctggtctgtggttcaaggcttattattcctaataattagattctgaactaaacttagatttctattaatttgttaatcatctttgtcttctaccatggtagtaaattttctggttatatcagtcacagcactgctttctgaattttcttcaaccatattttgtgtctaaaacagaaaaatcccttggtttgttaagctacagaacagacttttgtcatcaagaggctgtatatttgggcaagtagtaaggagccatgtaacatgttcagtgcctctgtggtgctaggtagtagccctgatccctgacccctgccttctagaggttagctctttgagaatagcatacataaatcccaaggggaacattcttccagtaactgatcaaggactttggtcactaaatttcctaagggagaaatgtggacagctaaaatctgaagccttactgagaagatagagaccattgttcatgacctacagctttgaagagagtagtcatgttgtagtggggaagccaatattgctagaattacagaagttacctggctttggggagggaagtgatcaaagtggatgtttattatggcagaaagtgaaaggcggattcccagttgaattgagaaagctctgtttggtcagctcaggcctcccctggctggggctttgcatcttctggttcaggtcttcctataggtaaccagtgccctatatcattccttagaagcagaagacattgttcatagccctttggtgttttactgttgaaactgtctgatgatcctatggtcagatcatctcaactcagtgttgccttggttttgtgacaaagacaaatactagtgagggattgagcaggcaatccctgatgtgagtattttacttacatcagtgtttactcccaaaggtcagtagcaccttctttcctaggattggtatgtatcttccttcttttgtttagtttggctacttggtatagctctttgtttaagtggagagaacagcattaggggccttgggatcctaaattacatagaaaattatgctgcctggcattgtgagcacaatgaggatagaaaaaaaattccacaagagaggactggtgaaactgtgtgtgttctaggctgacttggtttataaagcattgttctttaattttatcagtgtgaccaagacagtcatgcaaaacattctataggttctttcttaggacttttaccctaagaaaggaatctgaattctaagcctcatttttcttgctgagcagttctccttatcaccagggttgagatgacctacttttgatggcaattcccaaattgccttcaggtatttccacggggaggaagaggctcagtggggtctgtcaagtattgcacgagggcatattactgtgcatgtgtcttcgtgtttctcatctacatcttgtttccctctgagcatctctatgttgcaggttctcaccagaaaatacagagcttcttacaactttaggattactctacttacaggtaatgaaaactctgtactcattcatgcactgatgttagaaatggttttgggtttgtgtgtatggtggttttcctgcattctgatatttattttattaaaggtcatataaagttcatgaactacactctctctattcgatactctttgctaaaggaattaattttctgcatttaaattggaagcaattctattttagcctagtgcaattataattcttatctaggctgggtgtggtctcatgcctgtaatcccagcaatttgggaggctgaggctggtggatcacttgagctcaggagttggagaccagcctgggtaacatagtgagaccctgtctctacaaaaaataaaaaaattagccaggcatggtggcatgcttctgtagtcccagctacttgggaggctgtgatgggaagattgcttgaactcggaaggcagaggttgcagtgagctgagattgagtcactgcactccatcctgggtgacagagccagatcctgtctcagaaaaaaaaaaaaattcttatgctatccaggaaagagcatatatgagaaataactctggtcttggaggctgttattttgttgtgaggagagaaacagatacaagtgagcacttagggctttggggcaaagccatttcttttgatctttcttcccagccagagtcttattggaaagagagaaggcaaagtatacttttatctagaataagaagttttctgtcccctcaacattcctgaatgtgaatgggattcttttagctccattgattctctggctgaggacccagggcccaggtatccaaggggcttttccctcttccccaatatacacatttgccaagttccttggtcagctgattctgcctccagccctgcctctgtggtggcctttatgtctatttcatttttctttaaaaggaatcaggagcttaaccctgggtcttcctgggctttggcttgggaggttggctccacgggagatgaggatacccagctcatttcctgcaaagaggcattaatgtggaacagtactagtgtggcagagatggttcttatcaaatagatactttgaccttatcaggtgacaaattaacaaaaatagaaggaaaaccatgactggggatttttagttttctttctttattatctggtaactgtagctgctttttttttttttttttttttttttaaagtcaagagaactcaaaaaagccagagcatttctgttctgggtgaggttggccagactgtttttttttttttttttttggagacggagtttcactctttttgcctaggctagagtgcaatggcgtgatctcggctcactgcaacctctgcctcctgggttcaagcgattctcctgcctcagcctcccaagtagctgggattacaggcatgtgccaccatgcctgggtaattttgtatttttagtagagatggggtttctccatgttggtcaggctggtctcgaactcctgacctcaggtgatccacccaccttagcctcccaaagtgctgggattataggcattagccaccacgcctggtctggccagactcttttaactgccgtctccttgctgatgtaaattgtcttgtttgctttttttccaagctcggcatttaccagaaggcatttgaacatcttggcaatgcactgacttatgaccctaccaactacaaggtattacaggctgtgaaggctctggccttcatatagacggtcccactgctcctagaggtgatctgaccctggaaagcaaaggaatagcttcttaaatttggatacctgagaaatagaaaaaatataaataaaaggtggctcttcttatttgaaaatagtgtcaagtatgctctacttatcttctaaaagtgcacatttgttataatagacgtgtaacccctgcagaaggcagatcatagtgctagtaaagcttatgtgttacttaggaaattagcaatgcctccacaactattgtcaaaaataaatctgcggcccggcgcggtggctcacgcctgtaatcccagcactttgggaggctgaggtgggcagatcacgaggtcaggagatcgagaccatcctggctaacacagtgaaaccccgtctctactaaaaatacaaaaaaattagccgggcgtggtggcgggcgcctgtagtcccagctcctcgggaggctgaggcaggagaatggcgtgaacccgggaggcagagcttgcagtgagctgagatcacgcgccactgcactccagcctgggtgacagagcgagactctgtctcaaaaaaaaaaaaaataaaaaataaaaaaaataaatctgctgggcatggtggcttatgcctgtaatcccagcactttggaatgctgaggcaggaggatcacttgaggccaggagttcaagaccaggctgggccacatagtgagacccccatttctacaaaaaaaattatccaggcatggtggcacacacctgtagtcctagccactcggaaggtggaagagggaagatcacttgagcccaggagtttgagtctacagtgggctatgatggcaccactatactccagcctgggtgacagagaccctgtctctaaaaagaaacaataattatgttgaaatgacttctagagtcctaatgatttgatactacaactttttttctagatgtgactttgggaatgagaaggaatagcatcaaatggatgaacatcattgaggagatgcagcaagacaagctgtttattaaaggatacaaactgaattctgatttaggaagtaacattagactgtcagctcccaccttgatacctttccttagagaaatgaaagggctgggctgatgaagcctaaagctgactcgccctctgttctacggtagaaagaaatttaccttaagtagccacgtacaggtgtatttcaggtatctagaacacttggtataccaaataggggctgcagagaacagattaaaggaagtttttacttaaagggctctggtattcattctgaaatactgactttcctggctagaagtaggaaacagatgggtaaagcaagtaacattttatctttttttttttttttttttttttttttttttgtgctgtgccagagagccacagtgtagagtgcaaggacattcctcaggaacatttgtcccaataggttggatatatttatgtccctggaagaaattttccagtcccatctatgctgatgggcctgctgagtatagactcaggaaagctgccccactgctacagccttttgggaatgactgaatgactttctctgtgccatgttttcaggccatcttggcagcaggcagcatgatgcagacccacggggactttgatgttgccctcaccaaatacagagttgtggcttgtgctgttccagaaagtcctccactctggaataacattggaatgtgtttctttggcaagaagaaatatgtggcggtgagtgtcccctcatgttctttgtttgtatttctacatgtggttattgggtctgtttagcttgcccttctcattgagtgccccttctctctcataggccatcagctgcctgaaacgagccaactacttggcaccctttgattggaagattctgtataatttgggccttgtccatttgaccatgcagcagtatgcatcagcttttcattttctcagtgcggccatcaacttccagccaaagatgggggagctctacatgctcttggcaggtaagaaacatttatgtggaaaactctctctgccatctgtaatgagggaaaaatggattagaatcatagaagatcagtggctgtctcataggagccattcccttagagatcctgtaggaatctggattactgtcctggagcttgaagaaatagaaaaagatgacaaaggaacttggttgtttctaacttgggggagtttgactcagagaccaacaggttaaataaagatcatccctagttcaccttttaccagttttttcctcttgccttgacaattcatttatgtatatattgagtccaactaagttccagacagcaagtgttaagagcttgggttttaggtagggtcctgcctctactacttattatatgtacctagggctgatgtgaggattgcatgattaagctctcaattaataatactggttttgttgaaatactgatttttgaaaactgttggttttactgtggttatataattggtctattattatcaatattgttgttactataattggcccctaggtgatacttccaagtcaagctaccttatgttgaaacccttatctcttctgagcatgttatatagaatgccattctcttcctgaaactccattttatgccatgcaaatactaaaattgatcataaaaataagttaaaattaatcaaacactttaacaattatgcacaaccattttaaagtactgactagtctttctaggaatttttttctccatatacatttacttactaaatgtaagacccaaagcagatttccatgtcctcatttggcagtcgtcttccagtggctttttgttcattactgtgggttcttatttaaaagagaaagcttgcaaaagcaattgtggttatttgagggttgcctgaatacaaagataactttaaaaaaaaaacataggttttattattattcagatatggtatgggcaacagatcagaagacatctgccactggaaagatagtctgttacaattcctgagaaggagggcatgctacaccgtgcagggccacatggggaagcaccaggtcaatcaggaggtagagggagcaaggggtaaatgtgggcacaattctttattgtagttttcatgggtagaaatgccctccccggggcaagaccgggaaagcaggttaaccaggttggggattggccagtttgaataatttcagtgggctctgggctatagggctgtctctaggtgtctggtacctgaccctcgggtgactaggactagggaatattggcccagtgtcagggcccagtaaaggaggcagttaagaatatgaacactgggttggtcggtctgcatacagaaggtactcttgtaggggttatatctaggaattagctgactgtgggagggacagtctccccagggtcagtaaggccccagatgtcaaaacatcagaataaaaaggctaaagtggggtgtgatggtacatacctgtagtgctggctacttgggaggctaaggcaggaagtttgcttaagcccaggagttgggagtacagcctgggcaacacagtgagactccattcctctctctttttttaaaaattttattttaggttcaggggtacatgtgcatcctgttacacaggcacgtgtgtcatggggattagttgtacagattatttcatcacccaggtactaagcctagtacccaatagttatttttttctggccctccccctcctccagtaagctccagtgtctgtttccctctgtgtctccatgtgttctcatcatttagctcttatagtgagaacatgcaggatttggttttctatcctttattaatttgctaaggatggtggcctccagctccatctatgttgctgcaaaggacacgatcttgttcttttgtatggctgtgtcgtattccatggtgtacatttacattttgtttatccagtctaccattgatgggcatttaggttgatttcacatctttgctattgtgaatagtgctgcattgaacacacacatgcatgtgtctttatggcagaacgatttacattcctttgggcatatacccagtaatgggattgctgggtcgaagggtagttgtatttttagctctttggggaattgccagattgctttccacaatggttgaactaatttacactcccatcaacagtgtataagcattcccttttctctgcagcctcaccaggatgttatattttgagtttttaataatagccattttgactggtgtgagatggttatctcactgtggtttcaatttgcatttctctaatcagtgatagagtttttcatatgcttgttggctgcatacatgacttcttttgaagtgtctgtttatgtcctttgcccattttaatgggattgtattcttcttgtaaatttgcttaagttccttatagatcctggatattagacctgcatggtttgcaaatattttctcccattttgtacattgtctgtttactgtgttgatagtttctttagatagctgggttctaatggaacacagaaatgtaaacagccataatgtaagagataacagcgatgctaactttacaaagtagagatggcattcaaactggatcctgaacaacaagctaaaatggaatagcacagaatggctgaggagccactgtgaagaaaggcatgcagccatgaaactgcagtgtcccttgctgttagtgggggttagtgttagagaatatgatgggagatgaatcaggaaagatattctggggtcagattatggaggtcatgcgtacagtgcaaggactttatcttagaggccatgtttgtccagctgtcttcctagatctcctcttaggtgcctggtaggagtgagtgcatagctggtggggaggtggaatgggcagggcttccagagcagctgtttttgttttatatattaggtgtcaaggaaatactgattttaaaaagtggggggagtgttttactgctaaatgaaagtgtaaagatcatggttatagatgtggggggccagtgaggattcctaagtaggatggtaatgtggtcagatttgtaaggcagtgagatacctggcagcgctgtggaaggtggaatggaggcaggtggggactttgacactggggaataaatggaaagcctaaaactacttgggcctgaacaagggcagtgtcagaaaagaaactgcaaaaaaaggatgcatagaacctggcaactgattgactgtagaagagatggttgaagatagcaccaggtatctaagctgacttagtaaactctggtgccatgagctgacagggtgaagtttactttgggggtagtctttaatactccttttgtcttctaagctgagctctccagctgcagtgctttctttgttgcagtggctctgaccaatctggaagatatagaaaatgccaagagagcctacgcagaagcagtccacctggataagtatgcactttgttgagaatggtactggcgggggttggactctccaaagccatgaggtggtgccatacatagcattggtgctgcctgtgtcagcccagctgttcctctatggcattagtacatagcagacctcagtgtggagggatgtgtctcctaagtatgtggtggctcagcaggaattgacactctgagaaaatgtttccagtcctaaactgagtaatcaggaggctagagaatgtcagaactggcagtgggcttgggttgctgatagctatgggctagctggaatatcagatgggactctgggctgtttaattcaagataaaacttgactcttccaggatttactccgctggcatcttctagacagcagggtagagatccctttttcaaccctggcctaggtagtctctgttgagggctgagatgccagatttggtcccaataccagctttgcttgttaggccattaactccttgattcttctccacaggtctgcttagcacgtatgtacctaccttgctgcataatggagaaatctctacttaaccagttttgttttgtttttgtgtaatgagaaggatctctaaatgaccatttgttgcagagcccccagctccatagaatctctgtctgccacaggtgtaaccctttagtaaacctgaactatgctgtgctgctgtacaaccagggcgagaagaagaacgccctggcccaatatcaggagatggagaagaaagtcagcctactcaaggacaatagctctctggaatttgactctgaggtatgtcttttattagctcccaagagtcataagtaagctctcaggagacttttaaaaatcaagcccagatcatccaaatccaaggtattacacgttcatggctgttctggctttgatgttcctagcagcatgagttcatcaattaataacagcctgagaaaaactttcctagaataataataaaaggaaattcaggcttactgagttgttattgctaattcaactcatcaaagttgaggtctgtgtctgtctgtagcttccttctatttcactttttttttttttttttttttgagacggaatctcgctctgttgcccaggctggagtgcaatggcgcaatctcagttcactgcaacctccgcctcctgggttcaagcaattctcctgcctcagccttccaagtagctgggactacaggcgcgtgccaccacgcccagctaatttttgtatttttagtagagacggggtttcaccatgttggccaggatggtcttgatctcttgacctcgtgatccacgtgcccagccctatttcacttgttgtaggaaatgcactgtttggcccggtaatgcaccaggcttgaattgttgggttttgagatcctatgtgaaccaccatgccatccagtaaaggcaatctgtaatctctactgtttgataagtacttcctgcctcaactgctagtacgaccagacactatttcagctaaaaccccagctcgaagaccaaagaagtgggttggcttgtctctgacagtcacgcttttgattcttttacttcctttgtggacacaagatggtggagatggctcagaagttgggagctgctctccaggttggggaggcactggtctggaccaaaccagttaaagatcccaaatcaaagcaccagaccacttcaaccagcaaacctgccagtttccagcagcctctgggctctaatcaagctctaggacaggcaatgtcttcagcagctgcatacaggacgctcccctcaggtaggaccatacagagctccatgaagacctggcaggtacaagccacatgtgtctgtcagcagagattatagctttcagtgaggttctcttcagactcatatgtccaacgtagtattggccacaaggggagaaaaaaaacacagggtggctaaattggcacttgtttccttaaggcgagctatgtagtaggtaacagctactcacagacttagttggatggtctatacactggtctttccaattttagcaatatgttattaagtatatcctgttatgcaatgtttaatttttactgctttatcagaagttgacacgtaaatatttttcagtgactcattgaaggcaaacttgactgttgctttatttctcagttatagtcttcccttatagttaatgggtcagtcccactggttccagaaaatatggggtttcctcttgaactctaacagcaaaaaagaatgatttcttctgaaattgtggaacatgaggattcaagtttttattttgttactaggtgctggaggaacatcccagttcacaaagcccccatctcttcctctggagccagagcctgcggtggaatcaagtccaactgaaacatcagaacaaataagagagaaataagaatagaatgaatgaccccaaaatagggttttcttgggcgaggatgtgctggattaggaaaggtgacatgacacaggcagagcagagtggcacccaccacagaatacagtgtgtgttattacgaggagccagcagttgagcctaaggtccttctacctacctggtattggcatttgaggtcggaaaccctctactgccccataagccaggaaaagtgaaaagagaacacagttcctttaagaactggcagcaaggcttgaggccttatgtatgtagctgagtcagcaaggtacatgatgctgtctgctttcaaaaggacttttctctcctagctgactgactccttccttagttcaaggaacagctgagacagacctctgctgagtagctctgtgatgacaaagccttggtttaactgaggtgatcctcaggttgtgaggtttattagtccccaaggcaaacacaaatattagattaataatccaactttaatagtatac

SEQ ID NO: 15485 - DNA, 30462 bp, Homo sapiens
ccctttttactgtcccgggaactggtcgcctggggcaagtctggatacttagcagcacaggtcctgttctaggactgtagtccctcttggggtgcgctggacggagaagggagacttttcaccagtaatggctcttaccgtagtgccatctttttctgtctcgggggtttggaaggtaatgactagcacttgtgtagacagttcctgttaatcccgtgaattgggaatttaacatgcctggaagcttgcagcgtcactgccttctgccagtggagcgggactgtgttttttctgtggtgattaagtttaggaaagtacggttttggaattcatctgaaggctgagttgggcgttcactccacagaactgctaatatagaggaacccgatgaattcaggatgacctagtcgctattttttgaggcatatatctataattggatctaatttcggtaaagtgccaagtgtgaagctttgtttaccttgctttagtgttgggtttgaaagcctgttctgtccatttgttagaatgattttaggtattcggaatttattgtctttcgaaaaacgccctggaaaacagtacaaatagcagcctttggctgttttacaacttagttttggctaagcagcaaggttagtgttattgttagagggccttttgtttgttttctactctcatttgcagagtagtcatattattctagtctaattagaaaactctgaagacagaaacttttttttttgagacggagtgtcgctgttgtcggcccgggctggagtgcaatggcgcgatctcggctcactgcaacctccgcctcccaggttccagcaattctcctgcctcagcctccggattagctgagaatacaggcgcctgccaccacgcccggccgaaacatttttattaagctaagaaatttaaaatagctaggccggacgcggtgcatcacgcctgtaatcccagcactttgggaggccgagacgggtggatcacttgaggtcatgagtttgagaccatcctggccaacatggtgaaaccccgtctctactaaaaatacaaaaattagcggggcatcgtggcgctcgcctgtaatcccaggtacctggaaggctgaggcaggagaatcgcttgaaccccggaggcggaggttgcagtgagccgagatcatgccattgcactccagcatgagcgacagagacagactccttctcaaaaaaaaagaaagaaaaaacagattttaaaataattaaataggccaggctcagtggctcacgcctgtaatcctagcaccttgggaggctgaggtgggtggatcgcctgaggtcaggagttcgagaccagcctggccaacgtagtgaaaccctgtccctactaaaaaaatacaaaaaattagctggacgtggtggcgggcgctggtaatcccagctactagggaggctgaggcaggagaatcgcttagaacccaggaggcagaggttgcagtgagccgagatcgtgccatttcactgcagcctgggcatccagagcaaaactccgtctcagaaaaaaaaaaaaagtaaatagcatggttaatgttactgggttttaaatattaaaaacataggaaagaaaatacttccactccagcctgggtgacagagcaagactccgtctcaaaaaaaaaaaaaaaaaaaaaaagaaaatacttctaagtaatcttaaagtgtaaaagataatgggtaacataacattgctacaaatatagcttatcctctagtgctcatcacaagtgtttgtgtaatagaatatgaacttgagtctgtgacggcagaattgtcatgtacatttgaatgtctaatactgttttaaagagaatagcttttgtttcgatatgacttagcaattaagcctgaagttaactgttttcattgttgtcaaatttattgctagtagtgttacgtttatagtaattttcatcttttcaagttaccaatgcatggaaatgtgaatttctgtccttttaggaagtggtattttatcttttttttttttttttttttgagacggagtctcactttgtcgccctgtctggagtgcagtggcgtgatctcagctcagtggaacctctgcctcccgggttcaagtgatttttctgcctcagcctcccgagtagctggggttacaggccctcaccaccatgcctggcttatttttgtggagatggggtttcaccacgttggccaggctggtcttgaactcctgaccttgtgatctgcacgcctcggtctcccaaagtgttgggattacaggcgtgagccatggccccctgccttattttttaatacaattaaaagaacccagtaatcctactcctagacctgtgtcccacagaaaaaagtgttaaacatgagcgtgtagtactagggcattcgttgtagtactatccgtagtggcaaaacgctggaagcaaattaaatgcccattaatagggtaattgatgacttcagatatttccatactgtggaatattatgcagtcattaaaaagaatgttacaactaattgcttttcctctcagaagcccctctctctcactagagaaagctgttctcctttctttcttctgcctattaaacctccattcctaaactcagaaagaaaaaaaaaaaaagagaatgttacgactaattgacttggagggacttccatggtgtacatttaaataaaaggtagatgtgaagtggggtatattatgtgatcttaatttcataacacaaaggaaaacatatagatccgtagataaggatatatggatatggaggagagaaaaggaaaagactcaaaactcacagaatttttgaagaaatgtatagctaaaaatctaagaaggctacagtcaaggccttgaggccagaagacaccccatcaaaactgagtaaaactagcccagtgtgggacgcagaaattctagtatgctaccaaaattacttacggattgctaccagttccttagaaggaaaactgaggactaatatttgtattttcagtatagtttagaattcttaaaaaatgagcaaacaggctgtacttggtggctcatgcctgtaatgccaggacttgtggaaactgaggtgagaggataacttgagtccagaggtttgagaccagtctgggcaacatgttggagccccatttctacaaaaaacacaaaaattagccagacgtggtggcacgcgcctgtcttcccagctactggggaggatcatctgagcctgggggaagttgaggctccagtgagccatgatcatgccactggactccagcaggggcagagtgagactttgtctgaaaaaaacaaaaaatgaatgagcaactaactctggctttcatgatttgtgcttataaatctttttatttatttatttatttatttatttatttatttatttatttattttgagacggagtcttgctctgtcgcccaggctggagcgcagtggcgcgatctcggctcactgcaacctccgcctcccgggttcacgccattctccagcctgagcctccggagtagctgggactacaggcgcctgccaccacgcccagctaattttttgtatttttagtagagacggggtttcaccgtgttagccaggatggtttcaatctcctgaccttgtgatccgcccgactcagcctcccaaagtgctgggattacaggcgagccactgtacccagcctataaattttttttataatgccctgattcccattatttgatgtatttggataaatatgtcatcctgtaaattgaaggattaaactgataagagcagaaaacagaaattagtacactagttgatctggctcagatatagtgcctatgtatcaggtgctccatgaatatttgttggatgaataaatgatcataaaactatataaaaatgaagaaataacagaataaaataatttgttctatataaatcctatgaatgagattgagtgggctaatagaatcctttccatctcaaaatgttctggaaagtcttgagtaaaagactcatcaaaaaaataattctgctttgtgcagaaagaagggttgctgacctttgaaggtgctttttgagtctttaacattctttagtagtatattccccaaagttaagaaattctagttagattttaaaaaattgagttaacatttaaaaaacagttttgttgaggtataatacacgtaccataaaatttactcaatttaagtacaaagtttgatcagttttagtaaatttatatagttgcacagctgtcatcagaggctgcttttaaaacatgtccatcactccagaagggttcctgtgtcaatggaattgctgggttatattgtttaagtatttgtttaaaaaaacagaaacaaatctgcctaacttctgcaggctatatacgagttaacatttccatgagcaatgcatgagggttgtgatttttccacatccctgtcaacacttggtttgtcagtttgtttttatttagctgttgtagtggatgggtagtgatggtgtatggtggttttaatttgtatttccttcatgaataatgatattgaagattttttatatgtttattttccacccgtatctctttggtgaaatgtctttataaatttttgtgaatttttaaatcaagatcattaaccaaatgagcccctcatttgggctcaagtgatccttccacctcaacctcccgagtagctgggaccacaggtgcaggccacgcttggctaatttttgtatattttgtagaggcggggttttgccatgttgcccaggctggtcttaaactcctgaactcaagcaattggcctgcctcacataagtattctcttttattttgaggattaatttttgttgttgtgaaatatatcctacctgtaaaagagtgcttaaaatgtcgtatgtgtgctttaaaggataatataatggaaacttgtgttcctactgcccaggttaggaaatgggttattaataactttgaaacctcctaaatgcctctctcctactgcattttccttcctccacatcagatgtagtgtttcttcaattttatattaatattttgtactttttatagttttaccatatatgtttatatatatccttaatatattagtttttaaaatttgttattaaccttcagtttattcattatttcaacactgtatagtatcttattgtagtaaagtatgtcaattaacttatccattccactagatggagatcgggattatttctggtttttagttattaaaaacaatgctgctgctgggtgcagtggcttacgcctgtaatcctagcactttgggaggccgaggctgcggatcatgaggtcaagagatcgagatcatcctggccaacatggtgcaactccgtctctactaaaaatacaaaaattagcaggatgcggtgctgcgcgcctgtagtccctgctactcgggaggctgaggcgggagaatcacttgaacccaggaggcggaggttgcagtgagccgagattgtgccactgcacttcagcttggcagagcgagacttcgtctcaaaaaaaaaaaaaaaaaaagctgctataaatatggccaagactaaggaaaggtaagtgaggtgcttagggttcacattttatggagtaagagtaagtaccttcttaaggtttataccctaggttcttcacatgcctcactttagtcctagccctgagcattattatgtaggtcttctgatgcaatatctaagagtttctctaaggtatacctagaaatagattgctaggtaatggagtaactttattacttacaggaaactatatggtggttgtaacaatttatgcttctgccaccagtcatggtggatatgaaattatgtcttaatgtgataatttacattgcaatttttttttttttttttttttttttttttgagacagagtcttgctctgtcacccaggctggagtgcagtggcgtgatcttggctcactgcaacctctgcctcctgggctcaagtgatccttccacctcagcctcccgagtagctgagaccacaggcgcaggccacacttggctaatttttgtatattctgtagaggcggggtttcgtcatgttacccaggctggtcttaaactcctgaactcaagcaatcggcctgcctcagcctaccgaagtgctgggattagaggtgtgagccaccacacctggctgtttgtttgttttgagcctgttcctcaggctggagtgcagtggtccaatcatggcttgctgcaactccgcttcctgggcttaagagatcctcccacctcagccttctgagtagctaggactaagggcacctgccactatgcctggctaatttctaaagttttttttatagaggcagagtctcgctgttttgcccaagctgttctcaaatttctaggctcgtgtgatcctcctgcctcagcctcccaaagtgctgggattataggtgtgagccaccacacctggctgatctatctgtcttaaactggagaattgcatttttttctacctcctttcttttttttaaaaaaactgaatttccatctgttacccctccctttctgctcctcttatttcatgccttggaagttatactttgccttcctttaatgagtaccaaagaaattaaaaaatacatgtttactgtaagtccaggcctaaatgttgctactacagggaccatcaaatgctttactaccatctattgccatctgcaaatgtatgccattgttgtttagttttgtagttcttaatgtattttaattaaacaccacaaattatgctttttgtttgttttattcagtcagtagatgcttagaatacttgcttattttaccaattcctttgcttattccactcctttgttctgggattatttttctttttcctaatatattttcattaaaagtttatttggtgagaatctaaaaactctcaaattctgaaagttttaaaaatttgcctttgttgttgaaaattagttttgatgggtgagagaatctagatcaggtgttagcaaacctttttttgtaaagggccagatagtaaatattgtgggctttgtgggccatagagtctctctgacaactactcagcaatgctgttgtaggacaaaagcaaccatagacattatgtaaacatgagtgtgggtatgttctcacaaattttgtttatagacactgaaatttgactcaattttcatgtgttaaaaattattattttttgaatttttttaaccatataaaaatgtaaaaatcattcgtagcttgtagaccaaataaacaggatggatttgacctgtgggccatagtttgctgacctctggtctaaattaacattcattttacttagtacctgacactggagtaattattcttatgatgtcttattgtgatattgtcttccatttttaattgttgaagagccagctgtcagtcttttttgtttttctttttcttcttcttttttttttgaaatggagttttgctcttatcgcccaagctggagtgcagtggtgtgatcttggcccactgcaacctctgccttctgggttcaagcgattttcctgcctcagcctcccaagtagctgggattacaggtgcctgccaccacacccagctaatttttgtatttttagtagagatggggcttcaccatgttggccaggctggtgttgaactcctaacctcaggtgatccacctgccttggcctcccaaagtgctgcaattacaggcatgaggcacggcgtctggcctttctttcctttttttttttttttgagacgtagtcttgctctgttgcccaggccggggggcgatggtacgatcttggctcattgcaacctctgcttcccaagttcaagccattctcctgcctcagcctcccaagtagctgggactataggcacgtgccaccatgccgagctaatttttgtatatttagtagagacggggtttcaccatgttgtccaggctggtcttgaactcctgacctcaagtgatcctctcgccttggcctctcaaataactgtcctttctttgttggtaatctggtgatatgttttcttgtttggctgcttttaagagctgcttcttgtctctggtgcagttcgctatgatgtatctaagtatgtatttattttcatttaacctggtcaggatttgttgagtatccagaaactaaggattggtgtttctcattacatctggaaaaatttgagccattatttttgcttatattgtggtatgtcataggaagttgagaaaagaaaaattcatttgatggttttctatgaggttatagtggaaaataactatctcccttttagaattgagtgctagacagtttctgtgtagatgatctcataagcttccttttatcaaacagcgatcacttttttggtttggctgctgagaagtatggcatcaagtataatactcatatgaggtgtttaagaactgagtatatttcttatgcacattttactatatactataattatacattaaaaatgcacattgtaaatattataaatatgtgttatacattgttaatagtttggatagcaaaagtatgacttgacatttgttttttaaaccatatttaaagtaactctatcacaatatggatttaatggattaattgcataattggtgagctactgattattcttgttatttggatgcttctttaagttagcaagtttatattgtggtgcttcaatatagactacttatttcatttcagagaactcaatttcctgtatctactgagtctcaaaaaccccggcagaaaaaaggtctgtatgcagtttcatggtatgtgtatgtttgcacagacagatttctcttttatttatttatttatttttttttttggaggcagagtctcactgtcacccaggctggagtgcagtagcacaatcttggctcactgcaacctttgcctctggggctcaagcaattctcctgcctcagcctcccgagtagctgggattacaggtgcacgccaccacacctggctaacttttgtgttttagtagagatgaggtttcactgtgtttgccaggctggtctcgaactcctgacctcaggtgatctgcccaccttggcctcccaaagtgttgggattacaggcgtgagccgccacgcctggccagatttctctctcttgttgattcttttatctattctatattatttcaaaatgagtgttgggaaaagaagtaatagtctaaatgttctgtcacatctagcttttatttaatagagttattagatattaggaggttggtttgacctggaaattatttaaatggggtttgattattatgtaagtgtgtactaattttctgcttctggaaaaaccactttgtgaagttccaggtatctttttgctttgttggtttctagtttaattctattgtgggtagagaacattctttatatggtttgttttatggcccacaatgtggcctgtgttggtgcatgtcccatgtacacttggaaataatgtgtattctgctcttgtaggatgtagcattctgtaaatgtcaattaggtcaagttggttgatagtgttctgtatatacttacaattacagatattcatattcttactgatgtagttactgattggaagggtgatagaagagtgttgaagtgtgcaaatgtaattgtggatttgtttctactttcagttctatcaatttttgatttgtgtattttgaagatctgttgttggatgcatatacatttaggattgtctgatttcttggtaaattgacccgtttgtctttatataatattcctcttcaatttctgataatattccttgtttgaagtctactttgcctgataatattttagttttagttatttatttagctattttagttttgctttggccagtctttgaatggtatcaacatataattttcgtagagtaaaattccctttttttagtacaaattctgagtttcgacaaatgaaactagccatgtaaccactagtagcaccataatcaagttataaaagtttaattactcccccaaaagtcacctttactttgtagtaaaccacttcttccattcccaattgcgggcagccattaatctgtttctttcttcctagttttgcctttcttggaatgccaaataaatggaatcatacattattattattttgagagagagggtctcgctctgtcacccaagctagagtgcagtggtgtgattatagctcactgcaacctgaaactcctgggttcaaatggttttccccagtagctgggtctacaggtgcatgccgccatgcctggctaatttttatgtattttttttgtagaaatgggggtctggctctgttgcccaggctggttttgaactcctggcttcaagtgatactccatcttcggcctcctgaagtactggcattacaggcatgagctattgcacctgggttatgtaaatttttcagtggcttttaaacctcatataatgtttgtttgttggtttgtttttgaggcggaggctcgctctgtcacccaggctggagtgcagtggtgcagtctcagctcactgcaacctccacctcctgggttcaagtgattctgctgtctcagcctcccaagtagctgggattatcggcatgaaccaccatgcctggctaatttttttatttttagtacagatggggtttcaccacgttggccaggctggtcttgaactcctgacctcaagtgatccacctgctttggccccccaaagtactgggattacaggcatgagccactgcatccagcccaatatagggaggtattaagaaaagagaagaactatcatccttaagtattaacgggactttaacaaattaaaaaagtagtactttgaataaaaagctgtcacattttactgtgaaatccttagactttttttatacctctagttcaggttttttcagctttggcatgaatgatattttgagcaagataaatctttgttggagttgtcctgtatattgtaggatggttaacaacatccctggcttctacctggtagatgacagtagcacttaattgtaacaaccaaaagtgtctccagatgttgccagttattccttctggggcaaaattgttcccacttgagaaccactgctctggttaagtagtgtaatacttggaaatagaaggcagaaagttggtaagtgcataaagaattcacacagaagttggattagcaagctgagagacgttatttgaacaagtagcaattggaggcattttgactgagaatggatgttgtgcctctccctcactctttcctcctcagcttgagaggtccatattctctcaaagtttgactctttagttttgagggtgatgactgccaactgtggaagggataaacagatttctgtttggtatttttgtccaaatatatcaggactttttcaagaacaggcaatgaaattattgatcagaactacttggtggttctgagaaaataatatgctacatgaggctactgaagtcctcttccttttgccccatgatgtaaccttaggtgactttcttctggctttcagttgaagatcttacccatcattgaggtgagcgaactgatttactgcttgagtctattttcttccttaaaggagtcttcattgaaaactttacccattttggggtggccatagctgaggatgagttttgtccacaacctgagacaacatactcactatgtaaaaaacctgatctcagcttgatatctggttttagactaattgtttaatagaataatttattattgtaaaatatatataaaatttaccatttttaagtgtgtaagtcagtggcattaagtacatttacaaagttgtgcagccatcaccactgtccatttctagaagtgtttcatcattccaaacagaaacactgtacccattaaacaataaatctccacatccccttgcctccccagatcctggtaatctccattctattttctgtatctatgaatttgactattctaggtttttcatgtaaggtgaatcatacaatatttgcccttttctgcctggcttattccactcagcattttcaagattcattcatgttgtagcatgtgtcagaatttcattcctttttaaggctgaataatattctagtgtatgtatatatcacattttgtttatctgtctgttgatgggcatttgggttgttttccttagagtctttatatgtcagtaattcttaaagaatttaaaagttgtagaaactaggaattttgtagatattctagaaatatgtcatttcctgtactgtatataataatttattctacagactaattactgtgtatatatttggttctcagacgtgattttgattttgtagatgctgtacatgctcttcacttcattaatcttttccttttgctaattttggttcttgtgtatacagaattatagagttacaaggtaatttagttgttacctaattcaccctaaagtctacatgaaaccactgtcacagtctttgataagtagttaccaaatctcactatttctactgtgatagtgaatgactttcattgattagctttctgaaagaatagtttatcttacttgtcttggtatcctcacctctgagtctatttgtctattgtaatctggcttttgctccaccgctccactgattaaatggatgagctaagcatttttttttttttccactgcaacctctgcctcccgggttcaagtgattctcttgcctcagcttcccgtgtagctggtattacaggtgcccaccaccatgcctggctaattttttgtctttttagtagaaacggggtttcactatgttggccagactggtatcgagctcctgacttcatgatccaccccaaagcctcccaaagttctgggattacaggtgtgagccaccgtgcttggcccaattctgtttaatttttgaggaacaatgttaacttctaatttaaatggaaggtagtatatatctaatttttccctattatttttaatttcaatgctagtaaatctttaaatctgaaatacacactcttgaattttgacagatatgtatactcatgtacatatttatattcctgtaatcatcagatcaaattaaacatttttatcacttagaaagtttcctcatgcctttttccagtaagtcttctgcttcacttcgccagatgcaaccaccattctgatttctgcctgtataaattgattttgaactttcctataataagttgtgcttgaacttcacacaaagggagccatacagtatctactatttagcttttggcagctttcatacaacatgttgttttggagattcatccgtgttgttatatgtatcagtagttcttttatttaaaaaatgctgtttagtattcagttgcatgaatataccaccgtttgtccattctcctgttaatgagtatttgcaatgtttccagtttttgagtactgtgaaagtttctatgaacatttatttatttagagatggagtctcgctttattgcccaggctggagtgcagtggtgcgatctcagctcactgtaacctccgcctcctgggttcaatcgattcttcagcttcagcctcctgagtagctgggactataggtgtgtgccaccatgcccggctaatttttctatttttagtagagacgggatttcaccatattagccaggctggtcttgaattccttacctcatgatccgcccgcctcagcctcccatagtgctgggattacaggcatgagccactgcacccggcctgaacatttatttactggttttttttgtgtgtgcatgtgtgtgcaagttttcacttgaataagtgcctagggagtggaattgcttggtcatatgtgaactgtttgttttaactttataataaactgccgaagtattttccaaagtggttgtacagttttacccgaccgccagcaacgtgtgaggattctgtttggctacattcttgccaacatttgttactatcagtctttttcatattagacttgctggtgggtatattgtgttttattgtgattttaatttgcattacactaatgactagtgatgttgaacaccttttcatatacttattggtcatatcttttgtgtagtgtctgctcaagttttttgcctatttttaaatttcttttttccttattattgatttgtgagacttcttaatatattctgaatgtacgtcctttgtctgttatatatgtggtaagtatttccccccagcctgtgttttactactttcattttattaaggtatcttttgatgatcaaaagttttaattttgatgaaggccaatttactattatttttcttttgttattaatgccttctctgtcttgtctaggaaatcttgatccttaccccagactgagttgtgtgtcctctcccttttctgcattaatattgcagaaattaattttttggttttagaaaatgtctaatttggctcaatcagtaatttttgatatctttctattgaaatatatatacagaaaagtacatacataaatcataattgtactgtgcagtgaatttttacaaagtaaacatatccatgtaatcaccatctagattaaggtatagaatattatcagtgccctccaggccgcctccttattccctaccagtcattaaccacccctcccaaaggtagtaacttgtatttaacttctatcttctacatcagttttgcctgcttttgaatttaatgtaaatggaatcatgcagtgtgtactttttaatatctaacttcgttgctcagaattatgtttgtgagattcatttatgttgttgcatgtagtagtggttggttgttttcttccttgttatatatattccattgtggggctctacctaagtctattcattttatacttgatgaacatttgggatatttttattgtgatgtattatgaataatgccaccatgaagagtcttgtacatgttttttggtacacatacatacttaggagtaggattttcagggtcaccaggaaggatatatttaggctcagtgaatactagcaagcaatttttaaaatgcggtcaatataatccccatgtgtaaaataaaggtgtacaaacgcacacacacacacttgctcatatgcttatatgtgcatagaaattccttgaaaatactcaagaaatgcttcacctctggtaagggataggaatggaatgggtcttttgtttagtatcctatgtgccctttgaattttgttttactgtaagtatgtatttttaagaaaaccaactagttatttttaaaaatcatttgaaagtcttcctactttgatatatgaaaaacactggttttaaaaaaaataatagaaaagctttaaaatcattattatttttttgagacggagtcttgctctgtcgccaggctggagtgcagtggtgcgatttccgctcaccacaacctttgcctcccggattcaagcaattctcctgcctcagcctcccaagtagctgggactacaggtgtgtgccaccaggcccagctaatttttttttttttttgtatttttaatagagatggggtttcaccatgttggccaggatggtctcaatctcttgacctcgtgatctgcctgcctcggcctcccaaagtgctgggattacaggcgtgagccactgtgcctggccgctttaaaatcattaatgttgcgttgctcagttatgtctaattgacagcccaaacatttacattgtaatattagaaaatcctttatgattgggcagaaacttggtttaatgtgtcaccttggagacctgggttatagtcctgcctcttccattaactacttgttgaatgtggacaatttacttaacctttagggccttaatttcctcctttataatgtgagaatgttctctgaattgcataactcactggccttacgtgactattcagtggaataataagagagaaaaactttgagatacatgcacacacacccttaagaaggatataattgttaaattttgctttgaggaaataaaataatctaagctataaagtaaaaccataattagctaatcttttatatgacttttttcttcctcatttcaagctaatgagaagcaaacaaactggatagcagcaatataattaaaaaattataggccagcttctagcatgtattcttgagtcaatactgactcagcccagtctcttcctcttccttcatcatcatttatgtacctgaacagagtagatgtttctcttgatcctgggcctgttcgccctcagatccattccttgccttctcttctctttttggtatagtgaggagctgactctttttttttttttttttttttttgagacggagtctcgctctgtcgcccaggctggagtgcagtggcgggatctcggctcactgcaagctccgccttccgggttcacgccattctcctgcctcagcctcccaagtagctgggactacaggcgcccgccactacgcccggctaattttttttgtatttttagtagagacggggtttcacctttttttagccgggatggtctcgatctcctgacctcgtgatccgcccgcctcggcctcccaaagtgctgggattacaggcgtgagccatcgcgcccggccgaggagctgactcttgcagcctccttttcttcccaggcttccgtgtcagcagtttctggctggattagcaagtggaggaactggcaggagattagaaggcaagaggaaagagaagacagggcttccctccccgaccttcaggcctcagagtcgtagtggttttttgctcatgcagacttctgatttgtctcaccattccctgttgggcctctcatttcttccattgcctgttctctgcattaaagtccttgtgtttcaaatcctcaagtggctttttgttaggctttgactgatacagggctcaaaatgatagtaatgaaaatgtcttacatttatattcttttcaagatttgttatctcttttgataccccaaatatcctattgaggtagaaaagtgttataattcctgtttggcatgaggaaattaacatttattgaatgactattttcagattctttggattttcgggtgaaaattttaggggggataaatggaggcccagagaagtgaaataacttgccctaggccccatagaaggctggtattgaatcaagattgaaattctgcatgtgaaaacttttacgtgctacatgtctgctagtcctggaagaaatcctttctttgatgagtattttttttaaaggctttacttgcaatatatttacaaaagccttagttatttagtaaatttttcaatgaaaaatctgaaccataataattttctgcttagtacttatatagctagcatactatccctagcattaatcaaagtgtcatgtaaaggtttgatttttgagcctaagcagaatttgaaattcttctaagagaatttagcacctagggcaaactacaggggagaattcttgaggtgtcatgtttattcacttctggaattgtttaaaatatgtcaggtgcatccttaaagggagaaagaagggggaagagatgttacaaaagagtagaatggggcaagagaagtggcaagggagtattgttgctaggttgccagccttctgcccccactgtcttggtgatggtggaggggtagtgtggcagctgggatatgaatgaggtcttttttataactcactaaaagccattaccttgtcttcatctcgtcagctggctacctgacctctgtggtaacataggctcctgaaatgtagcattggagatgatcactgtgctttattgcaaaataggggagactctgctctgcatttacatgcttatgttttgtggaggatctttcaactagtaattctcataatacctgtgaaagcatataagaaccagtatctccatttttagggggagttggagtgagcaatgatttggaataccagaaattcaacttatatatttacaggtaaaattctaattgtaaattcaggattcatagattctagggatttctgaggtatccagaattccttcatctttgatgataagtagataataatggtaataaaaataacagcaacaggcccagcacagtgacccacacctgtaatcccagcactttgggagactgaggcaggtggatcacttgaggtcaggagttcaagaccagcctggcggacatggcaaaaccccatttctactaaaaatgcaaaaattagctgagcatagtggcatgtgcctgtaatcccagctactcagtaggctgagtcataagaatcatttgaatctgggaggtggagattgcggtgagctaagatcgcgccactgcactccggcctttatgacagaactcgactccatctcaaaaaaacaaaacaaaacaaaacaaaacaaaaacaaaatgcaaaaaaacagcaacaataataggtaacatttctttaaggcctactatgtaccaggcactatttgaacctctttatatattaggtaatacgatacaactctatgagaatgagtattttatttcctgacccttctatttaaaagtaaaaccccccacccggcactgtttctctttcctgctttatttttctccatagaaaaatatcactcataagtgtaacatactttattatctgtcctgtgtggtagtagcccctgccctcaattataaactccatgaaatcagggagtcagttttgttcactgctgtattcccagtgcctagaacagtgcctggaatcatggtaggtacccagcgaatattggttgaatgaatgagtcttggttttacagatgaggaaactataaatttcccaggtcacacatttggtaataggacagttgtgtacactgaaatgttctctaaaatatttgatggaacgaaaattagcttttggacagctacatctccaagagtgtgaaatgaccttcagcactggatttggtggattttcctttttctaatccctagagttccatttaatgagcgtttgggttcttgagctaccttacaaattgaacacttttttctccagctttcactcaagaaacacaaaacatggcttgtcctttttttttttttttttttttttgagactgggtctcactctgtcacccaggttggagtgcagtgcacaatcatggttcattgcaacctctgcctcccaggctcaagcaatcctcctaactcagcctcctgagtagctgggactacaggcttgtgcctccactcctggctaatttttttgtattttttgtagagatggggtttgtccaggctggccttgaagtgctggactcaagtgatccgtccacctgggcctcccaaagtgctggggttacaggcgtaaaccactatagctagccctgattgtcttttattgtgagattttaataacagctaagacttgaaaattaacattttataaattttcttttagactacttagtgatatactaagtatctaaggtttgtaatacttagtataaactcaaaagggttcagtgcctcattctcttttactctttccctttagtagataggtgacagaggactgggtcatgcagttgagacttggtccaagatgacttagtaagctacttgtcccagaactatttatttatttacttatttttgagatggagtctcgctctgtcgcccaggctggagtgcagtggtgtgatcttggctcactgcaacccccgtctcctgggttcaagcgattcttttgcctcagcctcccgagtagctgggattataggtgcccgccaccactcccggctaattttttgtatttttagtagagacttggtttcattgtgttagccaggattgtttcgatctcctgacctcatgatccacctgcgtggacctcccaaaatgctaggattacaggcgtgagtcaccacccccggaccctggaactatttatgacggtgcactttatgcacttaacacactcacatgtctttaagcttggtgactcgtgtggctttttcgaaggagatttgattctggaagtggttaagtaggatgtgaatggctaaggtctggtcattggtgaagcctaggggaagaaaagaaaggaaacacaagtcttagaagaatttcagatcggccccaacgactagaagggtggttctactaagaaaatgtgtgtagtcagaaaatgaagagtcagttgcttaaaattttactttttttcttgttcctggcatgtaaagtcatatccatactttctgttataatttcttcttacaaattccattgataatccctattcttggatagcaatgagcagcattacttcttttttatttttttaaaaaaattaaattttttgttgaaatgagggtcctgctgtattgcccaggctggtatcaaatttctgggctcaactgatcctcctgcctcagcctcccaaagcgctgggattacagttgtgagccagtgtgtctggttgtaccttttaatttttgtgttcaggcaacattaactctgagtcacagtaagctttttttttcttcctgtcatattatggacatagaagttttttggttttctttagattgtttctccttaggttgcagaacatcaagaaatggattacagtcattttcctctcttccccatgctcttccctttcttttccttttttcttttctttttttttttttggagacagaatcttgctctttggccgaggctggagtacagtgtcatgatcttggctcactgtaacctccccgcaccaggttcaagtgattctggtgcccaagcctccctagtagctgggatgtcaggatgcgccaccacaccctgctaatttttgtatttttttgtagagatggggtttcaccatgttgtccaggctgacctcaaactcctggactcaaatgatctgccctcctcggtctcccaaagtgctgggattataggcatgagccaccacatctggcctcttttccatttttaaaaaggactgtctccaacatattaaaattcacaaaaaataatataaacacacatgtactcactggctaggcttaataaaaaacatttagtcatgtttactttaaagctttttatttttttgagaaataggcattaaagagttgaagtctcctttctgtcttttcataattctgttcttccctcttccttccttgagatcttcactattcttgggttaatttggatctttctactccttgttaccacagaaaagtaattcttaatgaatttgaccatattttaaacttctgatttcagtgggcaggtaactcattttatggtttctgtattgtgagccattttcaatgactcaactagatttttttcatcgttgacttctcatttctgggcaacagcataatgttctcatttgagctatttctaaagattgtgtttaactatttaaaatatttgtggtactctgatcatcagatgtgatttttttttttttttgagacggagtctcactctttcaccaggctggagtgcagtggcgcgatctcggctcactgtaacctccttctcccaggttcaagtgatgctcctgcctcagcctcccaagtagctgggactattggtgcgggttaccacacccggctaattttttgtatttttagtagagacagggtttcaccatgtttgctaggatggtctcgatcttctgacctcgtgatctgcctgccttggcctcccaaagtgctgggattacaggcgtgagccactgcacctggccagaagtgatattaactatcttatatgtatatttctgttgcgggaagtcaggggccccaaacggagggaccggctggagctgtggcagaggaacgtaaattgtgattatttcatggacacttaccagttcccaaataatattcttataatttcttacacctgtctttaatctcttaatcctgttatcttcgtaagctgaggatgtacctcacctcagggccactatgataattgtgttaactgtacaaattgattgtaaaacgtgtgtttgaacaatatgaaatcagtgcaccttgaacagaataacagcaattttagggaacaagggaagacaaccataaggtctgactgcctgtggggttgggcaaaatagagccatatttttcttctttgcagagagcctataaacggacatgcaagtagggaagatatcgctaaattcttttcctagcaaggaattttaataatactctggagaaggaatgcattccttggaggaggtctatagggcatgtctgtcttatgctgttgacataaggactgaaatacaccctggtctcctgcagtaccctcaggcttattagggtggggaaaaaaccccaccctggtaaatttgaggtcagatcagttttctgctctcaaaccctgttttctgttgtttaagatgtttatcaagacaatttgtgcaccgctgaacatagactcttatcagtaattttgcttttgccttttgccttgtgatctttgttggacccttatcaggagtttctgattttgcccttgtcctgtttcctcagaagcatgtgatctttgttctcctttttgccctttgaggcatgtgatctttgtgacctactcactgttcttaggccccctccccttttgaaatccttaataaacacttgcttattttgcagctcaggtgggcatcacggtcctaccgatatatgtgaggcccagctgtgaaattcctctcttcgtactcttatttcttagccggctgacgcttatagaaaatagaaagaacctacattgaaatattgggggcaggttcccctgatatatttccttagtgacattcctgcaatctcctttagaaagtctttctgttcaccttctataaccagggaaggagagattgagaagagacgaaggatgattttatgtttttcagtcccagtcattatttgatgagaaactgatattacaagctttaaaaactcaagatatgtattcaacatgtagtagtagaacaagtatcttagtttaatagtctataaatttttgatgcactataatatattattgtagtcagtagcatcaaaattttaatgtgatattgcagtatgtttatggttagtttagacatgaggacagtgctaaaggagaaaatctaatgactgtgttgtttgttttgtcaaaatatgctgcctagctccagagtttcctattttggagaagcagaactggttgattcatcttcattatatccggaaagattatgaagcctgcaaggtaagagattgccataataataaaaatgagaggcaggatgttgggtaggcaactaacagtgcctgctaaacagagtgtggcagtttatatctcagtgataaaacatgaattccttcttccccatacttcatacactggttatcttttgctatggtagtgatgtttaacatacaacctcaatatttcagtggcccccaacaaacaaatattaattgctcatgggctttcagatcagctgtgggttggctgggtttgactgcaggctgtgggtcaggtttaggtgtgttccatgtgtcttctcatgtcaagagcaaacaactctcttggacatgttggtcttctggtggaggcagatgttcaactcagcatattaacttttttatctttggatagatgaaaaatggtattttgtcgagtttttttttttttttttttttttttgagatggagtctcactgtcacctaggctggagtgcagtggcatgatcttggctcattgcagcctttgtctcccaggttcaagcaattcttctgcctcagcctccccagtagatgggactacagatgagtgtcaccatgcccagctaattttttgtatttttagtagagatggggtttcaccatattggccaggctggtctcgaactcctgaccttgtgatctgcccgccttggcctcccaaagtgctgggattacaggcgtgagccaccgtgcccagccctgagttttattttttaatttctctcttactgcaaggttgatcatcatgtgtatatttaaaaaccatttgtatttccctttctctgtatctttggtgacataccatatgtgttacaaacttgcaggcagacagtggtagtactaacatgcagaatgtatccttggtgtcatcttttttggtatccagagctttgtgacccatctaaggtttttaatttatacccatggcatttatacctatggcaatgcacagaactaattcatactggtatgacaaagattcataccagtttttttttttctttttttaagtggagttttgctcttattgcccaggctagagtgcagtggcgcaatctcggctcactgcaacccccgctttccagtttcaagcaattctcctgcctcagcctcccaagtcgctgggattacaggtgcccgccaccatgcccagctaatttttttttttttttttgtatttctagtagaggtggagtttcaccatgttggtcaggctggtctcaaactgctgacctcgtaatccacctgcctcagcctcccaaagtgctgggattacaggcgtgagccaccgcacccggcccataccagttttttttgacaccgctgatccgaaggcagataccagtatgaatctttttttttttgagatggagttttgctcttgtcgccaagggtggagtgcaatggcgtgacctcggctcaccacaacctccgcctcctgggttcaagcgattgtcctgcctcagcctcctgagtagctgggattacaggcatgtgccaccacgcctggctaattttttgtgtttttagtagagatggggtttttccatgttggtcaggctggtctcaaactcccgacctcaggtgatctgcccgcttcggccacccaaagtgctgggattacatgcgtgagccaccgcgcctggccaccagtatgaatcttgaaaggttctctttctttttcatctgtgataatacttggaaatcttatcacacttttcttagcttgcctagttagattttagacaggggttggcaaactttttctgtaatgggccaacaatattttagggtttgtaggccacatacagtctctacatcatatttgttatcttattttttataaccctttagaaataaaaaaaccactgttagcttgagagctgtacaaaaatatacagggcctgtaagccctgtagtttgcaaatccctgttctagaagaagtaatcacaacaagggagttgaaattttaagaaactgaatgaactaatactttactaggcattattaatactctaggtttttttacatatgattcttgtccacgtctgctttttcattactatttgttttcttttttttttcagacagagtctcactctgttgcccaggctggagtgcagtggcgctatcttggctcactgcaacctccgcctcctgggttcaagcgattctccttcctcagcctcctgagtagctgggattacagacacgcaccactactgcccggctaatttttgtatttttagtagagatggggtttcaccatattggttaggctgatcttgaactcctgacctcataatctgcctgccttggtctcccaaagttttgggattacaagcatgagccaccgcacctggcctgtccatgtccactttttcttaaagacacctgaagaaacttaaccactgctcagaagcatttttctccctctttcaggctgttatcaaagaacagcttcaagagactcagggattgtgtgaatatgctatctatgtccaaggtaagacacatacttcttgtcttcttgctagagaaatacacttttcctaggttcttgaaaaagatcaggcaattgaagaaacaagttcaagtacagtcatgcaccacttaacaatggagatatgttctaagaaatgtgttgttaggcaattttgtcattgtgtgaacattacatggagtgtacttacacaaacatagatggatgatatagtgtactatacacatgatatagtctgttgctcccaggctacaaacctgtatgagcaggtgttataccgaatactgtaggcagttgtaaaacagtggtaagtgtatctaaacatagaaaaggtactgtaaaaatatggtataaaagataaaaaatagtatacctgtatagagtacttaccatggatggactggaagttgctctgggtgagttagtggtgagtgaatgtgaaggtctaggacattattgtatactaatgtagactttatgttgtatactaatgtagactttataaacactgtacacttagcctacactaaatttatttaaaaatattttttctacaatgataaattaactttagcttactataactttttactttataaactttaaaactttttggctcttttggggtaatacttaaaacacacaacaacattgtacatttgtacaaaaatagtttctttaggtccttattctataagcttttttctttttctttcttttttttttttggtagagagacagagtctcactttgttgcccaggctggtcttgaactcctgggctcaagcagttctcctgcctcagcctctcaaagtgctgggattataggcatgagctacgacacctggccctttatgctattcttaaaactttttatttttttacttttaaacttttttgttaaaaactacgatacacacactactacagtggtggtactaacatgtggaatgtgtccttgctgtcttttttggcattcagagctttgtgacccatctaaggtctttgtgacacacacacacacacacacacacacacacacacacgcacacgcacgcacgcactggtctaggcctacactgagtcaagattataaatatcactgtcttccacctccttatggaaggtcttcagtggcaataacatacatggagctgtcatctcctataacaataggaataccttctggaatacctcctgaaggatctgcctgaggcagttattcttttttttagtaagtggaaggagtacactctaaaataaagattaaaatgtatagcgtagtaaatacataaaccagtaatgtagtcatttattatcaagtattaagttctatatatatgtaattgtatatgctgtacttctatgtgactggcagcacagtaggtttgtttataccagcatcactacagataggtaagtaatgcattgcactgttttgattgctatgacgtcactgggcaataggaatttttcctcttcattataatcttaagtgatcatcatcatttatacagctgtcgaccaaaatgtcattacaggtgcatgagtttaaatgttccagaaaggttttattcagtattaatctttttatggaatctgaatataattactgtgttggatttgacttcagaaatgactagtaatgttaaaaaattgctatgattacccattttttagtttctggctagtgttttttggaatggatgcttaggattcctgcctaatgcagtgatttcagggccaaaagatgcttttggaaggattgcttgtaatcaagctaaaagagatgaagaagagcttgaggatttctgtaaggtgaatcaggatgaggggaagaagcctggaaataaacaagataaagcagagcataaattcagctcattagaaaccaaagataaggaccactcacttactttttttttttttttttttttttgagacagagtcttgctctgttgcccaggctggagtgcagtggtgcgatcccagctcactgcaacctctgccttccaggttcaagcgatcctcctgcctcagcccccctattagctgggattacaggcacatgccaccatgtccagctagtttttgtatttttagtagagacaaggttttgccatattggccaggctggtctcgaactcctgacctcaggtgatccacctgccttggcctaccaaagtgctgggattacaggcatgaaccactgcacctggcccactgacttaaattttcctctttagtggcataagtagcattcttagtttttccaggaactttctttttgactcttgggtgtaaataaatggttttgtttaccattcattgcatttgtagtcttcagattaacatataattttctgacataattgttaagatattgacaaatttaggacatcatggcaaaaaatgctcttattcccagtgtcacaagtatcagactttcagtgcctgataaattcttctggaaacataggcctaggaaaaacctctggttctaattggttgttacactgacaactgaagtcttaaatgttactttatcctttgccagaatctccatgttgaatttgaggtattgattccatttgccccatttgggggttcgctctgaaaactatcagttggaagtaaattatgataaatgaagcatctgatggggaagccccaaaatgttgttaatgtgaagagtttgtgtgataatttgcaaaggaactgattatctatgtgatggatcctgggagtagagagagaagtaggtaggtttgagctaccttgctaaaagacagttgagcttgtcagcagttttggttgttgtttcagcctgtccaaagccatatctgattgttttaaggatacagttgtccaaaggatttacttgatgtggtttcccagttttctcttctccaatttttctgaccccaggctccattcttcccagaacatggttttacttttttttgtattttctgtttcttggcagcattgatatttcgcctagaaggaaatatccaagaatccctagaactcttccagacatgtgcagttcttagtcctcagagtgctgataacctcaagcaggtggccagatctttgtgagtattggcaacctggaggccctagggcactcacagagaacagtgtaaaatgcattcctaggtccagcctgctgctggcagctgcatcagcctgatacacaagtgggggaatggtttaataggtacagtgggattcactctgaagagcatggattaagtttgaaatttgagaaaatgagataactagtgttaaggaactaagcattttaaacactgtgcattctagtttgatgggggaccaatattgtttatcatgtaaatagagacaccttgtaccctaagtcttctaaacttattggcaatccttggaatttttctcatctactcttctaacacttagtatttgtcacacagtaagtttttagtaaggacagagagttcctgacttctgatggttcaacttacataatttttcaactttacaatgatgtaaaattgttatgtattcagtagaaactgtacttcaagtatccatacagccattccgtttttcattttcagtatagtattcagtaaattacatgagatattcagcattttattataaagttggcattgtgttagatggttttgcctaactgtcagcaaatgtagttaagaaagtggagataggaactccatggaacagagtaagtgttctgagcatgcttaagataggctaggctatctatgatgtctggtagagtagatgtattacatgcatttttgaattacagtgttttcaatttacaatgggtttactgggatgtaaccccatcataagttgaggagcatctctatttgttgagtgaatgtcctaaagattcctagatggaaagaatctcaagtgtttataaactactaggtactcccttttcagtcctttgttccatggagttcctatctcccctttcttagccacattgccattcatacctgtgttgtttttgcatagagcttggttttccctgtttctctctaaactcaggatccaatatcaaggaaagagacttagtcttggaaggaaaggatgtgtccctaatgggtgatgataaatgatggtagttactgcttaacatggtatatcattaggcttatttcttttttggtctgcatttatagtacattgtagaagaaaaattccacaagactctcactaaaattggtatagaatgagaccaaggccttggaacagctgccagtgcaatccctactaagagagcttctgctgttagtgtatagcagcttcactgaccaaaccagcacaaccacctcatagagaaaaggcttctagaattctctgctggatgaaatatgattaaaatgtgggactagtagggttagtcttctaagaattttgaggtaataattatggaaaatatatcttttacagatttcttttgggaaaacataaagctgccattgaagtatataatgaagcagctaaactcaaccagaaagattggg

SEQ ID NO: 15486 - DNA, 38451 bp, Homo sapiens
gcagcggtgggctgagctaaaatggctgaggagagagtcgcgacggtgagcgccgagattctctttagttgcccggccgcagggcaaggcaagctggcgggtggcttttgtcccatgcagcggttcctggagagaggcggagctgggtgccgagcgtctcagggtgggcggggcgacacggtcccctttttactgtcccgggaactggtcgcctggggcaagtctggatacttagcagcacaggtcctgttctaggactgtagtccctcttggggtgcgctggacggagaagggagacttttcaccagtaatggctcttaccgtagtgccatctttttctgtctcgggggtttggaaggtaatgactagcacttgtgtagacagttcctgttaatcccgtgaattgggaatttaacatgcctggaagcttgcagcgtcactgccttctgccagtggagcgggactgtgttttttctgtggtgattaagtttaggaaagtacggttttggaattcatctgaaggctgagttgggcgttcactccacagaactgctaatatagaggaacccgatgaattcaggatgacctagtcgctattttttgaggcatatatctataattggatctaatttcggtaaagtgccaagtgtgaagctttgtttaccttgctttagtgttgggtttgaaagcctgttctgtccatttgttagaatgattttaggtattcggaatttattgtctttcgaaaaacgccctggaaaacagtacaaatagcagcctttggctgttttacaacttagttttggctaagcagcaaggttagtgttattgttagagggccttttgtttgttttctactctcatttgcagagtagtcatattattctagtctaattagaaaactctgaagacagaaacttttttttttgagacggagtgtcgctgttgtcggcccgggctggagtgcaatggcgcgatctcggctcactgcaacctccgcctcccaggttccagcaattctcctgcctcagcctccggattagctgagaatacaggcgcctgccaccacgcccggccgaaacatttttattaagctaagaaatttaaaatagctaggccggacgcggtgcatcacgcctgtaatcccagcactttgggaggccgagacgggtggatcacttgaggtcatgagtttgagaccatcctggccaacatggtgaaaccccgtctctactaaaaatacaaaaattagcggggcatcgtggcgctcgcctgtaatcccaggtacctggaaggctgaggcaggagaatcgcttgaaccccggaggcggaggttgcagtgagccgagatcatgccattgcactccagcatgagcgacagagacagactccttctcaaaaaaaaagaaagaaaaaacagattttaaaataattaaataggccaggctcagtggctcacgcctgtaatcctagcaccttgggaggctgaggtgggtggatcgcctgaggtcaggagttcgagaccagcctggccaacgtagtgaaaccctgtccctactaaaaaaatacaaaaaattagctggacgtggtggcgggcgctggtaatcccagctactagggaggctgaggcaggagaatcgcttagaacccaggaggcagaggttgcagtgagccgagatcgtgccatttcactgcagcctgggcatccagagcaaaactccgtctcagaaaaaaaaaaaaagtaaatagcatggttaatgttactgggttttaaatattaaaaacataggaaagaaaatacttccactccagcctgggtgacagagcaagactccgtctcaaaaaaaaaaaaaaaaaaaaaaagaaaatacttctaagtaatcttaaagtgtaaaagataatgggtaacataacattgctacaaatatagcttatcctctagtgctcatcacaagtgtttgtgtaatagaatatgaacttgagtctgtgacggcagaattgtcatgtacatttgaatgtctaatactgttttaaagagaatagcttttgtttcgatatgacttagcaattaagcctgaagttaactgttttcattgttgtcaaatttattgctagtagtgttacgtttatagtaattttcatcttttcaagttaccaatgcatggaaatgtgaatttctgtccttttaggaagtggtattttatcttttttttttttttttttttgagacggagtctcactttgtcgccctgtctggagtgcagtggcgtgatctcagctcagtggaacctctgcctcccgggttcaagtgatttttctgcctcagcctcccgagtagctggggttacaggccctcaccaccatgcctggcttatttttgtggagatggggtttcaccacgttggccaggctggtcttgaactcctgaccttgtgatctgcacgcctcggtctcccaaagtgttgggattacaggcgtgagccatggccccctgccttattttttaatacaattaaaagaacccagtaatcctactcctagacctgtgtcccacagaaaaaagtgttaaacatgagcgtgtagtactagggcattcgttgtagtactatccgtagtggcaaaacgctggaagcaaattaaatgcccattaatagggtaattgatgacttcagatatttccatactgtggaatattatgcagtcattaaaaagaatgttacaactaattgcttttcctctcagaagcccctctctctcactagagaaagctgttctcctttctttcttctgcctattaaacctccattcctaaactcagaaagaaaaaaaaaaaaagagaatgttacgactaattgacttggagggacttccatggtgtacatttaaataaaaggtagatgtgaagtggggtatattatgtgatcttaatttcataacacaaaggaaaacatatagatccgtagataaggatatatggatatggaggagagaaaaggaaaagactcaaaactcacagaatttttgaagaaatgtatagctaaaaatctaagaaggctacagtcaaggccttgaggccagaagacaccccatcaaaactgagtaaaactagcccagtgtgggacgcagaaattctagtatgctaccaaaattacttacggattgctaccagttccttagaaggaaaactgaggactaatatttgtattttcagtatagtttagaattcttaaaaaatgagcaaacaggctgtacttggtggctcatgcctgtaatgccaggacttgtggaaactgaggtgagaggataacttgagtccagaggtttgagaccagtctgggcaacatgttggagccccatttctacaaaaaacacaaaaattagccagacgtggtggcacgcgcctgtcttcccagctactggggaggatcatctgagcctgggggaagttgaggctccagtgagccatgatcatgccactggactccagcaggggcagagtgagactttgtctgaaaaaaacaaaaaatgaatgagcaactaactctggctttcatgatttgtgcttataaatctttttatttatttatttatttatttatttatttatttatttatttattttgagacggagtcttgctctgtcgcccaggctggagcgcagtggcgcgatctcggctcactgcaacctccgcctcccgggttcacgccattctccagcctgagcctccggagtagctgggactacaggcgcctgccaccacgcccagctaattttttgtatttttagtagagacggggtttcaccgtgttagccaggatggtttcaatctcctgaccttgtgatccgcccgactcagcctcccaaagtgctgggattacaggcgagccactgtacccagcctataaattttttttataatgccctgattcccattatttgatgtatttggataaatatgtcatcctgtaaattgaaggattaaactgataagagcagaaaacagaaattagtacactagttgatctggctcagatatagtgcctatgtatcaggtgctccatgaatatttgttggatgaataaatgatcataaaactatataaaaatgaagaaataacagaataaaataatttgttctatataaatcctatgaatgagattgagtgggctaatagaatcctttccatctcaaaatgttctggaaagtcttgagtaaaagactcatcaaaaaaataattctgctttgtgcagaaagaagggttgctgacctttgaaggtgctttttgagtctttaacattctttagtagtatattccccaaagttaagaaattctagttagattttaaaaaattgagttaacatttaaaaaacagttttgttgaggtataatacacgtaccataaaatttactcaatttaagtacaaagtttgatcagttttagtaaatttatatagttgcacagctgtcatcagaggctgcttttaaaacatgtccatcactccagaagggttcctgtgtcaatggaattgctgggttatattgtttaagtatttgtttaaaaaaacagaaacaaatctgcctaacttctgcaggctatatacgagttaacatttccatgagcaatgcatgagggttgtgatttttccacatccctgtcaacacttggtttgtcagtttgtttttatttagctgttgtagtggatgggtagtgatggtgtatggtggttttaatttgtatttccttcatgaataatgatattgaagattttttatatgtttattttccacccgtatctctttggtgaaatgtctttataaatttttgtgaatttttaaatcaagatcattaaccaaatgagcccctcatttgggctcaagtgatccttccacctcaacctcccgagtagctgggaccacaggtgcaggccacgcttggctaatttttgtatattttgtagaggcggggttttgccatgttgcccaggctggtcttaaactcctgaactcaagcaattggcctgcctcacataagtattctcttttattttgaggattaatttttgttgttgtgaaatatatcctacctgtaaaagagtgcttaaaatgtcgtatgtgtgctttaaaggataatataatggaaacttgtgttcctactgcccaggttaggaaatgggttattaataactttgaaacctcctaaatgcctctctcctactgcattttccttcctccacatcagatgtagtgtttcttcaattttatattaatattttgtactttttatagttttaccatatatgtttatatatatccttaatatattagtttttaaaatttgttattaaccttcagtttattcattatttcaacactgtatagtatcttattgtagtaaagtatgtcaattaacttatccattccactagatggagatcgggattatttctggtttttagttattaaaaacaatgctgctgctgggtgcagtggcttacgcctgtaatcctagcactttgggaggccgaggctgcggatcatgaggtcaagagatcgagatcatcctggccaacatggtgcaactccgtctctactaaaaatacaaaaattagcaggatgcggtgctgcgcgcctgtagtccctgctactcgggaggctgaggcgggagaatcacttgaacccaggaggcggaggttgcagtgagccgagattgtgccactgcacttcagcttggcagagcgagacttcgtctcaaaaaaaaaaaaaaaaaaagctgctataaatatggccaagactaaggaaaggtaagtgaggtgcttagggttcacattttatggagtaagagtaagtaccttcttaaggtttataccctaggttcttcacatgcctcactttagtcctagccctgagcattattatgtaggtcttctgatgcaatatctaagagtttctctaaggtatacctagaaatagattgctaggtaatggagtaactttattacttacaggaaactatatggtggttgtaacaatttatgcttctgccaccagtcatggtggatatgaaattatgtcttaatgtgataatttacattgcaatttttttttttttttttttttttttttttgagacagagtcttgctctgtcacccaggctggagtgcagtggcgtgatcttggctcactgcaacctctgcctcctgggctcaagtgatccttccacctcagcctcccgagtagctgagaccacaggcgcaggccacacttggctaatttttgtatattctgtagaggcggggtttcgtcatgttacccaggctggtcttaaactcctgaactcaagcaatcggcctgcctcagcctaccgaagtgctgggattagaggtgtgagccaccacacctggctgtttgtttgttttgagcctgttcctcaggctggagtgcagtggtccaatcatggcttgctgcaactccgcttcctgggcttaagagatcctcccacctcagccttctgagtagctaggactaagggcacctgccactatgcctggctaatttctaaagttttttttatagaggcagagtctcgctgttttgcccaagctgttctcaaatttctaggctcgtgtgatcctcctgcctcagcctcccaaagtgctgggattataggtgtgagccaccacacctggctgatctatctgtcttaaactggagaattgcatttttttctacctcctttcttttttttaaaaaaactgaatttccatctgttacccctccctttctgctcctcttatttcatgccttggaagttatactttgccttcctttaatgagtaccaaagaaattaaaaaatacatgtttactgtaagtccaggcctaaatgttgctactacagggaccatcaaatgctttactaccatctattgccatctgcaaatgtatgccattgttgtttagttttgtagttcttaatgtattttaattaaacaccacaaattatgctttttgtttgttttattcagtcagtagatgcttagaatacttgcttattttaccaattcctttgcttattccactcctttgttctgggattatttttctttttcctaatatattttcattaaaagtttatttggtgagaatctaaaaactctcaaattctgaaagttttaaaaatttgcctttgttgttgaaaattagttttgatgggtgagagaatctagatcaggtgttagcaaacctttttttgtaaagggccagatagtaaatattgtgggctttgtgggccatagagtctctctgacaactactcagcaatgctgttgtaggacaaaagcaaccatagacattatgtaaacatgagtgtgggtatgttctcacaaattttgtttatagacactgaaatttgactcaattttcatgtgttaaaaattattattttttgaatttttttaaccatataaaaatgtaaaaatcattcgtagcttgtagaccaaataaacaggatggatttgacctgtgggccatagtttgctgacctctggtctaaattaacattcattttacttagtacctgacactggagtaattattcttatgatgtcttattgtgatattgtcttccatttttaattgttgaagagccagctgtcagtcttttttgtttttctttttcttcttcttttttttttgaaatggagttttgctcttatcgcccaagctggagtgcagtggtgtgatcttggcccactgcaacctctgccttctgggttcaagcgattttcctgcctcagcctcccaagtagctgggattacaggtgcctgccaccacacccagctaatttttgtatttttagtagagatggggcttcaccatgttggccaggctggtgttgaactcctaacctcaggtgatccacctgccttggcctcccaaagtgctgcaattacaggcatgaggcacggcgtctggcctttctttcctttttttttttttttgagacgtagtcttgctctgttgcccaggccggggggcgatggtacgatcttggctcattgcaacctctgcttcccaagttcaagccattctcctgcctcagcctcccaagtagctgggactataggcacgtgccaccatgccgagctaatttttgtatatttagtagagacggggtttcaccatgttgtccaggctggtcttgaactcctgacctcaagtgatcctctcgccttggcctctcaaataactgtcctttctttgttggtaatctggtgatatgttttcttgtttggctgcttttaagagctgcttcttgtctctggtgcagttcgctatgatgtatctaagtatgtatttattttcatttaacctggtcaggatttgttgagtatccagaaactaaggattggtgtttctcattacatctggaaaaatttgagccattatttttgcttatattgtggtatgtcataggaagttgagaaaagaaaaattcatttgatggttttctatgaggttatagtggaaaataactatctcccttttagaattgagtgctagacagtttctgtgtagatgatctcataagcttccttttatcaaacagcgatcacttttttggtttggctgctgagaagtatggcatcaagtataatactcatatgaggtgtttaagaactgagtatatttcttatgcacattttactatatactataattatacattaaaaatgcacattgtaaatattataaatatgtgttatacattgttaatagtttggatagcaaaagtatgacttgacatttgttttttaaaccatatttaaagtaactctatcacaatatggatttaatggattaattgcataattggtgagctactgattattcttgttatttggatgcttctttaagttagcaagtttatattgtggtgcttcaatatagactacttatttcatttcagagaactcaatttcctgtatctactgagtctcaaaaaccccggcagaaaaaaggtctgtatgcagtttcatggtatgtgtatgtttgcacagacagatttctcttttatttatttatttatttttttttttggaggcagagtctcactgtcacccaggctggagtgcagtagcacaatcttggctcactgcaacctttgcctctggggctcaagcaattctcctgcctcagcctcccgagtagctgggattacaggtgcacgccaccacacctggctaacttttgtgttttagtagagatgaggtttcactgtgtttgccaggctggtctcgaactcctgacctcaggtgatctgcccaccttggcctcccaaagtgttgggattacaggcgtgagccgccacgcctggccagatttctctctcttgttgattcttttatctattctatattatttcaaaatgagtgttgggaaaagaagtaatagtctaaatgttctgtcacatctagcttttatttaatagagttattagatattaggaggttggtttgacctggaaattatttaaatggggtttgattattatgtaagtgtgtactaattttctgcttctggaaaaaccactttgtgaagttccaggtatctttttgctttgttggtttctagtttaattctattgtgggtagagaacattctttatatggtttgttttatggcccacaatgtggcctgtgttggtgcatgtcccatgtacacttggaaataatgtgtattctgctcttgtaggatgtagcattctgtaaatgtcaattaggtcaagttggttgatagtgttctgtatatacttacaattacagatattcatattcttactgatgtagttactgattggaagggtgatagaagagtgttgaagtgtgcaaatgtaattgtggatttgtttctactttcagttctatcaatttttgatttgtgtattttgaagatctgttgttggatgcatatacatttaggattgtctgatttcttggtaaattgacccgtttgtctttatataatattcctcttcaatttctgataatattccttgtttgaagtctactttgcctgataatattttagttttagttatttatttagctattttagttttgctttggccagtctttgaatggtatcaacatataattttcgtagagtaaaattccctttttttagtacaaattctgagtttcgacaaatgaaactagccatgtaaccactagtagcaccataatcaagttataaaagtttaattactcccccaaaagtcacctttactttgtagtaaaccacttcttccattcccaattgcgggcagccattaatctgtttctttcttcctagttttgcctttcttggaatgccaaataaatggaatcatacattattattattttgagagagagggtctcgctctgtcacccaagctagagtgcagtggtgtgattatagctcactgcaacctgaaactcctgggttcaaatggttttccccagtagctgggtctacaggtgcatgccgccatgcctggctaatttttatgtattttttttgtagaaatgggggtctggctctgttgcccaggctggttttgaactcctggcttcaagtgatactccatcttcggcctcctgaagtactggcattacaggcatgagctattgcacctgggttatgtaaatttttcagtggcttttaaacctcatataatgtttgtttgttggtttgtttttgaggcggaggctcgctctgtcacccaggctggagtgcagtggtgcagtctcagctcactgcaacctccacctcctgggttcaagtgattctgctgtctcagcctcccaagtagctgggattatcggcatgaaccaccatgcctggctaatttttttatttttagtacagatggggtttcaccacgttggccaggctggtcttgaactcctgacctcaagtgatccacctgctttggccccccaaagtactgggattacaggcatgagccactgcatccagcccaatatagggaggtattaagaaaagagaagaactatcatccttaagtattaacgggactttaacaaattaaaaaagtagtactttgaataaaaagctgtcacattttactgtgaaatccttagactttttttatacctctagttcaggttttttcagctttggcatgaatgatattttgagcaagataaatctttgttggagttgtcctgtatattgtaggatggttaacaacatccctggcttctacctggtagatgacagtagcacttaattgtaacaaccaaaagtgtctccagatgttgccagttattccttctggggcaaaattgttcccacttgagaaccactgctctggttaagtagtgtaatacttggaaatagaaggcagaaagttggtaagtgcataaagaattcacacagaagttggattagcaagctgagagacgttatttgaacaagtagcaattggaggcattttgactgagaatggatgttgtgcctctccctcactctttcctcctcagcttgagaggtccatattctctcaaagtttgactctttagttttgagggtgatgactgccaactgtggaagggataaacagatttctgtttggtatttttgtccaaatatatcaggactttttcaagaacaggcaatgaaattattgatcagaactacttggtggttctgagaaaataatatgctacatgaggctactgaagtcctcttccttttgccccatgatgtaaccttaggtgactttcttctggctttcagttgaagatcttacccatcattgaggtgagcgaactgatttactgcttgagtctattttcttccttaaaggagtcttcattgaaaactttacccattttggggtggccatagctgaggatgagttttgtccacaacctgagacaacatactcactatgtaaaaaacctgatctcagcttgatatctggttttagactaattgtttaatagaataatttattattgtaaaatatatataaaatttaccatttttaagtgtgtaagtcagtggcattaagtacatttacaaagttgtgcagccatcaccactgtccatttctagaagtgtttcatcattccaaacagaaacactgtacccattaaacaataaatctccacatccccttgcctccccagatcctggtaatctccattctattttctgtatctatgaatttgactattctaggtttttcatgtaaggtgaatcatacaatatttgcccttttctgcctggcttattccactcagcattttcaagattcattcatgttgtagcatgtgtcagaatttcattcctttttaaggctgaataatattctagtgtatgtatatatcacattttgtttatctgtctgttgatgggcatttgggttgttttccttagagtctttatatgtcagtaattcttaaagaatttaaaagttgtagaaactaggaattttgtagatattctagaaatatgtcatttcctgtactgtatataataatttattctacagactaattactgtgtatatatttggttctcagacgtgattttgattttgtagatgctgtacatgctcttcacttcattaatcttttccttttgctaattttggttcttgtgtatacagaattatagagttacaaggtaatttagttgttacctaattcaccctaaagtctacatgaaaccactgtcacagtctttgataagtagttaccaaatctcactatttctactgtgatagtgaatgactttcattgattagctttctgaaagaatagtttatcttacttgtcttggtatcctcacctctgagtctatttgtctattgtaatctggcttttgctccaccgctccactgattaaatggatgagctaagcatttttttttttttccactgcaacctctgcctcccgggttcaagtgattctcttgcctcagcttcccgtgtagctggtattacaggtgcccaccaccatgcctggctaattttttgtctttttagtagaaacggggtttcactatgttggccagactggtatcgagctcctgacttcatgatccaccccaaagcctcccaaagttctgggattacaggtgtgagccaccgtgcttggcccaattctgtttaatttttgaggaacaatgttaacttctaatttaaatggaaggtagtatatatctaatttttccctattatttttaatttcaatgctagtaaatctttaaatctgaaatacacactcttgaattttgacagatatgtatactcatgtacatatttatattcctgtaatcatcagatcaaattaaacatttttatcacttagaaagtttcctcatgcctttttccagtaagtcttctgcttcacttcgccagatgcaaccaccattctgatttctgcctgtataaattgattttgaactttcctataataagttgtgcttgaacttcacacaaagggagccatacagtatctactatttagcttttggcagctttcatacaacatgttgttttggagattcatccgtgttgttatatgtatcagtagttcttttatttaaaaaatgctgtttagtattcagttgcatgaatataccaccgtttgtccattctcctgttaatgagtatttgcaatgtttccagtttttgagtactgtgaaagtttctatgaacatttatttatttagagatggagtctcgctttattgcccaggctggagtgcagtggtgcgatctcagctcactgtaacctccgcctcctgggttcaatcgattcttcagcttcagcctcctgagtagctgggactataggtgtgtgccaccatgcccggctaatttttctatttttagtagagacgggatttcaccatattagccaggctggtcttgaattccttacctcatgatccgcccgcctcagcctcccatagtgctgggattacaggcatgagccactgcacccggcctgaacatttatttactggttttttttgtgtgtgcatgtgtgtgcaagttttcacttgaataagtgcctagggagtggaattgcttggtcatatgtgaactgtttgttttaactttataataaactgccgaagtattttccaaagtggttgtacagttttacccgaccgccagcaacgtgtgaggattctgtttggctacattcttgccaacatttgttactatcagtctttttcatattagacttgctggtgggtatattgtgttttattgtgattttaatttgcattacactaatgactagtgatgttgaacaccttttcatatacttattggtcatatcttttgtgtagtgtctgctcaagttttttgcctatttttaaatttcttttttccttattattgatttgtgagacttcttaatatattctgaatgtacgtcctttgtctgttatatatgtggtaagtatttccccccagcctgtgttttactactttcattttattaaggtatcttttgatgatcaaaagttttaattttgatgaaggccaatttactattatttttcttttgttattaatgccttctctgtcttgtctaggaaatcttgatccttaccccagactgagttgtgtgtcctctcccttttctgcattaatattgcagaaattaattttttggttttagaaaatgtctaatttggctcaatcagtaatttttgatatctttctattgaaatatatatacagaaaagtacatacataaatcataattgtactgtgcagtgaatttttacaaagtaaacatatccatgtaatcaccatctagattaaggtatagaatattatcagtgccctccaggccgcctccttattccctaccagtcattaaccacccctcccaaaggtagtaacttgtatttaacttctatcttctacatcagttttgcctgcttttgaatttaatgtaaatggaatcatgcagtgtgtactttttaatatctaacttcgttgctcagaattatgtttgtgagattcatttatgttgttgcatgtagtagtggttggttgttttcttccttgttatatatattccattgtggggctctacctaagtctattcattttatacttgatgaacatttgggatatttttattgtgatgtattatgaataatgccaccatgaagagtcttgtacatgttttttggtacacatacatacttaggagtaggattttcagggtcaccaggaaggatatatttaggctcagtgaatactagcaagcaatttttaaaatgcggtcaatataatccccatgtgtaaaataaaggtgtacaaacgcacacacacacacttgctcatatgcttatatgtgcatagaaattccttgaaaatactcaagaaatgcttcacctctggtaagggataggaatggaatgggtcttttgtttagtatcctatgtgccctttgaattttgttttactgtaagtatgtatttttaagaaaaccaactagttatttttaaaaatcatttgaaagtcttcctactttgatatatgaaaaacactggttttaaaaaaaataatagaaaagctttaaaatcattattatttttttgagacggagtcttgctctgtcgccaggctggagtgcagtggtgcgatttccgctcaccacaacctttgcctcccggattcaagcaattctcctgcctcagcctcccaagtagctgggactacaggtgtgtgccaccaggcccagctaatttttttttttttttgtatttttaatagagatggggtttcaccatgttggccaggatggtctcaatctcttgacctcgtgatctgcctgcctcggcctcccaaagtgctgggattacaggcgtgagccactgtgcctggccgctttaaaatcattaatgttgcgttgctcagttatgtctaattgacagcccaaacatttacattgtaatattagaaaatcctttatgattgggcagaaacttggtttaatgtgtcaccttggagacctgggttatagtcctgcctcttccattaactacttgttgaatgtggacaatttacttaacctttagggccttaatttcctcctttataatgtgagaatgttctctgaattgcataactcactggccttacgtgactattcagtggaataataagagagaaaaactttgagatacatgcacacacacccttaagaaggatataattgttaaattttgctttgaggaaataaaataatctaagctataaagtaaaaccataattagctaatcttttatatgacttttttcttcctcatttcaagctaatgagaagcaaacaaactggatagcagcaatataattaaaaaattataggccagcttctagcatgtattcttgagtcaatactgactcagcccagtctcttcctcttccttcatcatcatttatgtacctgaacagagtagatgtttctcttgatcctgggcctgttcgccctcagatccattccttgccttctcttctctttttggtatagtgaggagctgactctttttttttttttttttttttttgagacggagtctcgctctgtcgcccaggctggagtgcagtggcgggatctcggctcactgcaagctccgccttccgggttcacgccattctcctgcctcagcctcccaagtagctgggactacaggcgcccgccactacgcccggctaattttttttgtatttttagtagagacggggtttcacctttttttagccgggatggtctcgatctcctgacctcgtgatccgcccgcctcggcctcccaaagtgctgggattacaggcgtgagccatcgcgcccggccgaggagctgactcttgcagcctccttttcttcccaggcttccgtgtcagcagtttctggctggattagcaagtggaggaactggcaggagattagaaggcaagaggaaagagaagacagggcttccctccccgaccttcaggcctcagagtcgtagtggttttttgctcatgcagacttctgatttgtctcaccattccctgttgggcctctcatttcttccattgcctgttctctgcattaaagtccttgtgtttcaaatcctcaagtggctttttgttaggctttgactgatacagggctcaaaatgatagtaatgaaaatgtcttacatttatattcttttcaagatttgttatctcttttgataccccaaatatcctattgaggtagaaaagtgttataattcctgtttggcatgaggaaattaacatttattgaatgactattttcagattctttggattttcgggtgaaaattttaggggggataaatggaggcccagagaagtgaaataacttgccctaggccccatagaaggctggtattgaatcaagattgaaattctgcatgtgaaaacttttacgtgctacatgtctgctagtcctggaagaaatcctttctttgatgagtattttttttaaaggctttacttgcaatatatttacaaaagccttagttatttagtaaatttttcaatgaaaaatctgaaccataataattttctgcttagtacttatatagctagcatactatccctagcattaatcaaagtgtcatgtaaaggtttgatttttgagcctaagcagaatttgaaattcttctaagagaatttagcacctagggcaaactacaggggagaattcttgaggtgtcatgtttattcacttctggaattgtttaaaatatgtcaggtgcatccttaaagggagaaagaagggggaagagatgttacaaaagagtagaatggggcaagagaagtggcaagggagtattgttgctaggttgccagccttctgcccccactgtcttggtgatggtggaggggtagtgtggcagctgggatatgaatgaggtcttttttataactcactaaaagccattaccttgtcttcatctcgtcagctggctacctgacctctgtggtaacataggctcctgaaatgtagcattggagatgatcactgtgctttattgcaaaataggggagactctgctctgcatttacatgcttatgttttgtggaggatctttcaactagtaattctcataatacctgtgaaagcatataagaaccagtatctccatttttagggggagttggagtgagcaatgatttggaataccagaaattcaacttatatatttacaggtaaaattctaattgtaaattcaggattcatagattctagggatttctgaggtatccagaattccttcatctttgatgataagtagataataatggtaataaaaataacagcaacaggcccagcacagtgacccacacctgtaatcccagcactttgggagactgaggcaggtggatcacttgaggtcaggagttcaagaccagcctggcggacatggcaaaaccccatttctactaaaaatgcaaaaattagctgagcatagtggcatgtgcctgtaatcccagctactcagtaggctgagtcataagaatcatttgaatctgggaggtggagattgcggtgagctaagatcgcgccactgcactccggcctttatgacagaactcgactccatctcaaaaaaacaaaacaaaacaaaacaaaacaaaaacaaaatgcaaaaaaacagcaacaataataggtaacatttctttaaggcctactatgtaccaggcactatttgaacctctttatatattaggtaatacgatacaactctatgagaatgagtattttatttcctgacccttctatttaaaagtaaaaccccccacccggcactgtttctctttcctgctttatttttctccatagaaaaatatcactcataagtgtaacatactttattatctgtcctgtgtggtagtagcccctgccctcaattataaactccatgaaatcagggagtcagttttgttcactgctgtattcccagtgcctagaacagtgcctggaatcatggtaggtacccagcgaatattggttgaatgaatgagtcttggttttacagatgaggaaactataaatttcccaggtcacacatttggtaataggacagttgtgtacactgaaatgttctctaaaatatttgatggaacgaaaattagcttttggacagctacatctccaagagtgtgaaatgaccttcagcactggatttggtggattttcctttttctaatccctagagttccatttaatgagcgtttgggttcttgagctaccttacaaattgaacacttttttctccagctttcactcaagaaacacaaaacatggcttgtcctttttttttttttttttttttttgagactgggtctcactctgtcacccaggttggagtgcagtgcacaatcatggttcattgcaacctctgcctcccaggctcaagcaatcctcctaactcagcctcctgagtagctgggactacaggcttgtgcctccactcctggctaatttttttgtattttttgtagagatggggtttgtccaggctggccttgaagtgctggactcaagtgatccgtccacctgggcctcccaaagtgctggggttacaggcgtaaaccactatagctagccctgattgtcttttattgtgagattttaataacagctaagacttgaaaattaacattttataaattttcttttagactacttagtgatatactaagtatctaaggtttgtaatacttagtataaactcaaaagggttcagtgcctcattctcttttactctttccctttagtagataggtgacagaggactgggtcatgcagttgagacttggtccaagatgacttagtaagctacttgtcccagaactatttatttatttacttatttttgagatggagtctcgctctgtcgcccaggctggagtgcagtggtgtgatcttggctcactgcaacccccgtctcctgggttcaagcgattcttttgcctcagcctcccgagtagctgggattataggtgcccgccaccactcccggctaattttttgtatttttagtagagacttggtttcattgtgttagccaggattgtttcgatctcctgacctcatgatccacctgcgtggacctcccaaaatgctaggattacaggcgtgagtcaccacccccggaccctggaactatttatgacggtgcactttatgcacttaacacactcacatgtctttaagcttggtgactcgtgtggctttttcgaaggagatttgattctggaagtggttaagtaggatgtgaatggctaaggtctggtcattggtgaagcctaggggaagaaaagaaaggaaacacaagtcttagaagaatttcagatcggccccaacgactagaagggtggttctactaagaaaatgtgtgtagtcagaaaatgaagagtcagttgcttaaaattttactttttttcttgttcctggcatgtaaagtcatatccatactttctgttataatttcttcttacaaattccattgataatccctattcttggatagcaatgagcagcattacttcttttttatttttttaaaaaaattaaattttttgttgaaatgagggtcctgctgtattgcccaggctggtatcaaatttctgggctcaactgatcctcctgcctcagcctcccaaagcgctgggattacagttgtgagccagtgtgtctggttgtaccttttaatttttgtgttcaggcaacattaactctgagtcacagtaagctttttttttcttcctgtcatattatggacatagaagttttttggttttctttagattgtttctccttaggttgcagaacatcaagaaatggattacagtcattttcctctcttccccatgctcttccctttcttttccttttttcttttctttttttttttttggagacagaatcttgctctttggccgaggctggagtacagtgtcatgatcttggctcactgtaacctccccgcaccaggttcaagtgattctggtgcccaagcctccctagtagctgggatgtcaggatgcgccaccacaccctgctaatttttgtatttttttgtagagatggggtttcaccatgttgtccaggctgacctcaaactcctggactcaaatgatctgccctcctcggtctcccaaagtgctgggattataggcatgagccaccacatctggcctcttttccatttttaaaaaggactgtctccaacatattaaaattcacaaaaaataatataaacacacatgtactcactggctaggcttaataaaaaacatttagtcatgtttactttaaagctttttatttttttgagaaataggcattaaagagttgaagtctcctttctgtcttttcataattctgttcttccctcttccttccttgagatcttcactattcttgggttaatttggatctttctactccttgttaccacagaaaagtaattcttaatgaatttgaccatattttaaacttctgatttcagtgggcaggtaactcattttatggtttctgtattgtgagccattttcaatgactcaactagatttttttcatcgttgacttctcatttctgggcaacagcataatgttctcatttgagctatttctaaagattgtgtttaactatttaaaatatttgtggtactctgatcatcagatgtgatttttttttttttttgagacggagtctcactctttcaccaggctggagtgcagtggcgcgatctcggctcactgtaacctccttctcccaggttcaagtgatgctcctgcctcagcctcccaagtagctgggactattggtgcgggttaccacacccggctaattttttgtatttttagtagagacagggtttcaccatgtttgctaggatggtctcgatcttctgacctcgtgatctgcctgccttggcctcccaaagtgctgggattacaggcgtgagccactgcacctggccagaagtgatattaactatcttatatgtatatttctgttgcgggaagtcaggggccccaaacggagggaccggctggagctgtggcagaggaacgtaaattgtgattatttcatggacacttaccagttcccaaataatattcttataatttcttacacctgtctttaatctcttaatcctgttatcttcgtaagctgaggatgtacctcacctcagggccactatgataattgtgttaactgtacaaattgattgtaaaacgtgtgtttgaacaatatgaaatcagtgcaccttgaacagaataacagcaattttagggaacaagggaagacaaccataaggtctgactgcctgtggggttgggcaaaatagagccatatttttcttctttgcagagagcctataaacggacatgcaagtagggaagatatcgctaaattcttttcctagcaaggaattttaataatactctggagaaggaatgcattccttggaggaggtctatagggcatgtctgtcttatgctgttgacataaggactgaaatacaccctggtctcctgcagtaccctcaggcttattagggtggggaaaaaaccccaccctggtaaatttgaggtcagatcagttttctgctctcaaaccctgttttctgttgtttaagatgtttatcaagacaatttgtgcaccgctgaacatagactcttatcagtaattttgcttttgccttttgccttgtgatctttgttggacccttatcaggagtttctgattttgcccttgtcctgtttcctcagaagcatgtgatctttgttctcctttttgccctttgaggcatgtgatctttgtgacctactcactgttcttaggccccctccccttttgaaatccttaataaacacttgcttattttgcagctcaggtgggcatcacggtcctaccgatatatgtgaggcccagctgtgaaattcctctcttcgtactcttatttcttagccggctgacgcttatagaaaatagaaagaacctacattgaaatattgggggcaggttcccctgatatatttccttagtgacattcctgcaatctcctttagaaagtctttctgttcaccttctataaccagggaaggagagattgagaagagacgaaggatgattttatgtttttcagtcccagtcattatttgatgagaaactgatattacaagctttaaaaactcaagatatgtattcaacatgtagtagtagaacaagtatcttagtttaatagtctataaatttttgatgcactataatatattattgtagtcagtagcatcaaaattttaatgtgatattgcagtatgtttatggttagtttagacatgaggacagtgctaaaggagaaaatctaatgactgtgttgtttgttttgtcaaaatatgctgcctagctccagagtttcctattttggagaagcagaactggttgattcatcttcattatatccggaaagattatgaagcctgcaaggtaagagattgccataataataaaaatgagaggcaggatgttgggtaggcaactaacagtgcctgctaaacagagtgtggcagtttatatctcagtgataaaacatgaattccttcttccccatacttcatacactggttatcttttgctatggtagtgatgtttaacatacaacctcaatatttcagtggcccccaacaaacaaatattaattgctcatgggctttcagatcagctgtgggttggctgggtttgactgcaggctgtgggtcaggtttaggtgtgttccatgtgtcttctcatgtcaagagcaaacaactctcttggacatgttggtcttctggtggaggcagatgttcaactcagcatattaacttttttatctttggatagatgaaaaatggtattttgtcgagtttttttttttttttttttttttttgagatggagtctcactgtcacctaggctggagtgcagtggcatgatcttggctcattgcagcctttgtctcccaggttcaagcaattcttctgcctcagcctccccagtagatgggactacagatgagtgtcaccatgcccagctaattttttgtatttttagtagagatggggtttcaccatattggccaggctggtctcgaactcctgaccttgtgatctgcccgccttggcctcccaaagtgctgggattacaggcgtgagccaccgtgcccagccctgagttttattttttaatttctctcttactgcaaggttgatcatcatgtgtatatttaaaaaccatttgtatttccctttctctgtatctttggtgacataccatatgtgttacaaacttgcaggcagacagtggtagtactaacatgcagaatgtatccttggtgtcatcttttttggtatccagagctttgtgacccatctaaggtttttaatttatacccatggcatttatacctatggcaatgcacagaactaattcatactggtatgacaaagattcataccagtttttttttttctttttttaagtggagttttgctcttattgcccaggctagagtgcagtggcgcaatctcggctcactgcaacccccgctttccagtttcaagcaattctcctgcctcagcctcccaagtcgctgggattacaggtgcccgccaccatgcccagctaatttttttttttttttttgtatttctagtagaggtggagtttcaccatgttggtcaggctggtctcaaactgctgacctcgtaatccacctgcctcagcctcccaaagtgctgggattacaggcgtgagccaccgcacccggcccataccagttttttttgacaccgctgatccgaaggcagataccagtatgaatctttttttttttgagatggagttttgctcttgtcgccaagggtggagtgcaatggcgtgacctcggctcaccacaacctccgcctcctgggttcaagcgattgtcctgcctcagcctcctgagtagctgggattacaggcatgtgccaccacgcctggctaattttttgtgtttttagtagagatggggtttttccatgttggtcaggctggtctcaaactcccgacctcaggtgatctgcccgcttcggccacccaaagtgctgggattacatgcgtgagccaccgcgcctggccaccagtatgaatcttgaaaggttctctttctttttcatctgtgataatacttggaaatcttatcacacttttcttagcttgcctagttagattttagacaggggttggcaaactttttctgtaatgggccaacaatattttagggtttgtaggccacatacagtctctacatcatatttgttatcttattttttataaccctttagaaataaaaaaaccactgttagcttgagagctgtacaaaaatatacagggcctgtaagccctgtagtttgcaaatccctgttctagaagaagtaatcacaacaagggagttgaaattttaagaaactgaatgaactaatactttactaggcattattaatactctaggtttttttacatatgattcttgtccacgtctgctttttcattactatttgttttcttttttttttcagacagagtctcactctgttgcccaggctggagtgcagtggcgctatcttggctcactgcaacctccgcctcctgggttcaagcgattctccttcctcagcctcctgagtagctgggattacagacacgcaccactactgcccggctaatttttgtatttttagtagagatggggtttcaccatattggttaggctgatcttgaactcctgacctcataatctgcctgccttggtctcccaaagttttgggattacaagcatgagccaccgcacctggcctgtccatgtccactttttcttaaagacacctgaagaaacttaaccactgctcagaagcatttttctccctctttcaggctgttatcaaagaacagcttcaagagactcagggattgtgtgaatatgctatctatgtccaaggtaagacacatacttcttgtcttcttgctagagaaatacacttttcctaggttcttgaaaaagatcaggcaattgaagaaacaagttcaagtacagtcatgcaccacttaacaatggagatatgttctaagaaatgtgttgttaggcaattttgtcattgtgtgaacattacatggagtgtacttacacaaacatagatggatgatatagtgtactatacacatgatatagtctgttgctcccaggctacaaacctgtatgagcaggtgttataccgaatactgtaggcagttgtaaaacagtggtaagtgtatctaaacatagaaaaggtactgtaaaaatatggtataaaagataaaaaatagtatacctgtatagagtacttaccatggatggactggaagttgctctgggtgagttagtggtgagtgaatgtgaaggtctaggacattattgtatactaatgtagactttatgttgtatactaatgtagactttataaacactgtacacttagcctacactaaatttatttaaaaatattttttctacaatgataaattaactttagcttactataactttttactttataaactttaaaactttttggctcttttggggtaatacttaaaacacacaacaacattgtacatttgtacaaaaatagtttctttaggtccttattctataagcttttttctttttctttcttttttttttttggtagagagacagagtctcactttgttgcccaggctggtcttgaactcctgggctcaagcagttctcctgcctcagcctctcaaagtgctgggattataggcatgagctacgacacctggccctttatgctattcttaaaactttttatttttttacttttaaacttttttgttaaaaactacgatacacacactactacagtggtggtactaacatgtggaatgtgtccttgctgtcttttttggcattcagagctttgtgacccatctaaggtctttgtgacacacacacacacacacacacacacacacacacacgcacacgcacgcacgcactggtctaggcctacactgagtcaagattataaatatcactgtcttccacctccttatggaaggtcttcagtggcaataacatacatggagctgtcatctcctataacaataggaataccttctggaatacctcctgaaggatctgcctgaggcagttattcttttttttagtaagtggaaggagtacactctaaaataaagattaaaatgtatagcgtagtaaatacataaaccagtaatgtagtcatttattatcaagtattaagttctatatatatgtaattgtatatgctgtacttctatgtgactggcagcacagtaggtttgtttataccagcatcactacagataggtaagtaatgcattgcactgttttgattgctatgacgtcactgggcaataggaatttttcctcttcattataatcttaagtgatcatcatcatttatacagctgtcgaccaaaatgtcattacaggtgcatgagtttaaatgttccagaaaggttttattcagtattaatctttttatggaatctgaatataattactgtgttggatttgacttcagaaatgactagtaatgttaaaaaattgctatgattacccattttttagtttctggctagtgttttttggaatggatgcttaggattcctgcctaatgcagtgatttcagggccaaaagatgcttttggaaggattgcttgtaatcaagctaaaagagatgaagaagagcttgaggatttctgtaaggtgaatcaggatgaggggaagaagcctggaaataaacaagataaagcagagcataaattcagctcattagaaaccaaagataaggaccactcacttactttttttttttttttttttttttgagacagagtcttgctctgttgcccaggctggagtgcagtggtgcgatcccagctcactgcaacctctgccttccaggttcaagcgatcctcctgcctcagcccccctattagctgggattacaggcacatgccaccatgtccagctagtttttgtatttttagtagagacaaggttttgccatattggccaggctggtctcgaactcctgacctcaggtgatccacctgccttggcctaccaaagtgctgggattacaggcatgaaccactgcacctggcccactgacttaaattttcctctttagtggcataagtagcattcttagtttttccaggaactttctttttgactcttgggtgtaaataaatggttttgtttaccattcattgcatttgtagtcttcagattaacatataattttctgacataattgttaagatattgacaaatttaggacatcatggcaaaaaatgctcttattcccagtgtcacaagtatcagactttcagtgcctgataaattcttctggaaacataggcctaggaaaaacctctggttctaattggttgttacactgacaactgaagtcttaaatgttactttatcctttgccagaatctccatgttgaatttgaggtattgattccatttgccccatttgggggttcgctctgaaaactatcagttggaagtaaattatgataaatgaagcatctgatggggaagccccaaaatgttgttaatgtgaagagtttgtgtgataatttgcaaaggaactgattatctatgtgatggatcctgggagtagagagagaagtaggtaggtttgagctaccttgctaaaagacagttgagcttgtcagcagttttggttgttgtttcagcctgtccaaagccatatctgattgttttaaggatacagttgtccaaaggatttacttgatgtggtttcccagttttctcttctccaatttttctgaccccaggctccattcttcccagaacatggttttacttttttttgtattttctgtttcttggcagcattgatatttcgcctagaaggaaatatccaagaatccctagaactcttccagacatgtgcagttcttagtcctcagagtgctgataacctcaagcaggtggccagatctttgtgagtattggcaacctggaggccctagggcactcacagagaacagtgtaaaatgcattcctaggtccagcctgctgctggcagctgcatcagcctgatacacaagtgggggaatggtttaataggtacagtgggattcactctgaagagcatggattaagtttgaaatttgagaaaatgagataactagtgttaaggaactaagcattttaaacactgtgcattctagtttgatgggggaccaatattgtttatcatgtaaatagagacaccttgtaccctaagtcttctaaacttattggcaatccttggaatttttctcatctactcttctaacacttagtatttgtcacacagtaagtttttagtaaggacagagagttcctgacttctgatggttcaacttacataatttttcaactttacaatgatgtaaaattgttatgtattcagtagaaactgtacttcaagtatccatacagccattccgtttttcattttcagtatagtattcagtaaattacatgagatattcagcattttattataaagttggcattgtgttagatggttttgcctaactgtcagcaaatgtagttaagaaagtggagataggaactccatggaacagagtaagtgttctgagcatgcttaagataggctaggctatctatgatgtctggtagagtagatgtattacatgcatttttgaattacagtgttttcaatttacaatgggtttactgggatgtaaccccatcataagttgaggagcatctctatttgttgagtgaatgtcctaaagattcctagatggaaagaatctcaagtgtttataaactactaggtactcccttttcagtcctttgttccatggagttcctatctcccctttcttagccacattgccattcatacctgtgttgtttttgcatagagcttggttttccctgtttctctctaaactcaggatccaatatcaaggaaagagacttagtcttggaaggaaaggatgtgtccctaatgggtgatgataaatgatggtagttactgcttaacatggtatatcattaggcttatttcttttttggtctgcatttatagtacattgtagaagaaaaattccacaagactctcactaaaattggtatagaatgagaccaaggccttggaacagctgccagtgcaatccctactaagagagcttctgctgttagtgtatagcagcttcactgaccaaaccagcacaaccacctcatagagaaaaggcttctagaattctctgctggatgaaatatgattaaaatgtgggactagtagggttagtcttctaagaattttgaggtaataattatggaaaatatatcttttacagatttcttttgggaaaacataaagctgccattgaagtatataatgaagcagctaaactcaaccagaaagattgggtaagtagagaactttcagttctttcttattagtaaacttgctaatggttccatttatcatctggctgtcttatttctgaattcttacattccaaaaatgtcttgattttaacctcatacttaattcatgatttgtataagtataggatcaaaaaccatgtttcctcataactttgcaggcattgctgcatgattttctagcagtttgctgacgagcagtctcttaccagtctgattcttgttgatgacccctagaagctttgggtatttttttcgtcattggaattccacagtatcagcaataggcatctagttgtgtttcatgtctttttcccgtccccatctgtgtgacattcaattgactctttcattctgaagacccttgcctttctttgggtcagggcctttgagtagttctttatttttcccctccccttctctttgtgtcaattgaggattgtgtgtaaatgcaacagaaaatttgactaaacattggctttacaaattcgtttttgtttttttttttaattctcatgaaacaagatgtccaggtaagtagttgctggcattgatttggtggtcctaggatgtcaagactgagagtttttcctcatggttacaagaagactgctgcatccagcatcatatctgcattctagggaggcagaaagagaaagcaacaaggagaaaaggacagagcctatactgggaaagcacaactttcccagaagtcccccacagacttccacttatgtcatatcagctccccttctataaggaaggctggttaaatgtcgtttttaatctggtcacactgccactctaaacaaaattagggttcttttagtaaggaaaaagagaagagtaggtagcaggtaggcaagtagataactagcagcatctgccacactgttttccattctctatgagagatgttctctaactattctctacaactcttaacttgcctctcattttctacctctgtgtccttttctttgtgtgtggtgcgggggggtacagaggctcactctgttgcccaggctggagtgcagtggcgtgatctcggctcactgcaacctctttcttccaggttcaagtgattctcctgtctcagcctcctgagtagctgggattacaggcgcctgccaccatgcccggctaatttttgtatttttggtagagacggggtttcaccatgttggctaggctggtctccaactcctgacctcaggtgattcacctgccttgtcctcccaaagtgttgggattataggtgtgagacaccacgcctgaccctccttgtcattttattatatgttcaggacatgtattcagtcttatcttccatatcatcatttttgtttttagctatttgtattctgttatataccctatccatccaatattttttatttcatttccttttattgtatttttaatttccaaaaatcttgtcttttcttcaatgtctctgattcttgaagttcttttctgcttctcagaattatctttttcttcctctctgcattttggttcttctattttatgctgttggtatttttcaagtatttggtgattctcagagagacattcatatctgtgagtgaagaactagatttattagtacagagaattagcatggatttcctttgcagttcttacggggcactattatttttgaagtgtgttcaatttgttagtcgcttttcttctgtacatcggaagattgagttgagtctttatgccatggagtatgttatagctaacagccagagtgaaactacagatgaagaaaaattcatgtacttttcattcagtcggtttttcaaaaaatgagtatgtctgctatatgccaagcactgatctatgccctggagatgcaaagatggactgttggattataagatactcaactagaataggaaatgaaggaagaagagcaaggtttggaagaaggtgatggtaagaaatcagagttaaatcctgtctttcagaggattttggatatgataagttttaggttctgaggggatatctaaattgagatgtgtccagtaggattggatatagaaatctgaaactcaagtgttttggagtagagatgtgaattctggagtcagcaacataaaggtggtaattgaaaccattagattggttgacattaccctgcaatgagctgaggatgggaccctggaaaaaaagagttttttactttttttttgtctgtttgagacggcacaggaaaagttactgctttaatgcagggaggaagccctgcattctctatgggggccaggatcatgggggtggccagtgccacaaatggtcaccatacaggccagggaggagccagggcccaccaataatccctggaacatccctggatgctagcagttttttactttctaaatttttttttttttttttaagagacaaggttgcctaggctggagtatagtggggtgatcatagcttactgtaacctccaactcctgggctcaagtgatcctcctgcctctgcctcctgagtagctggggctacaggtgcaagccaccatgcctggctaaatttattttgtggaaatgaggtctcatgttacccaggctggtctcaagctcctgtcctcaagtgatcctcctgctttagcttcccagagtgctgggattacaggtgtgagccatcaaaaagcaattttgaaggactgagcagaagaagagaacccatagagggagatagggaagaggtaaagcaggagagctcagggtcacagggggaatggaacgtatttcttaatctatccagttggttgaaagagctcatttggtattactgactcacttgggataaccatcccattgttactagtagatgtgatcattcacaaaacagccattctttttttttttttttgttgagacagagtctcattctgtcacctaggctagagtgcagtggctcaatcttggctcactgcaacctctgcctcctgggttcaagcgattctcctcccccagcctcctgagtagctgggatttacaggcacccgccaccatgcccagctaatttttgtatttttagtagagatgaggtttcaccatgttggtcaggctggtctcgagctcctgacgttgtgatccgcccaccttggcctcccaaagtgctgagactacaggtgtgagccaccaccttttttttttttaactttaaaatttttctttaaaattttccccttcatggcatttttattttctttttagaatattttaatgattttgaattttacttttattaatagcccttacctaccctacatatttcataagtacctgtagaaaaccttatagtagctggagcatggtggctcatacctgtaataccagcactttaaaaggatgctgagtggggaggatcacttgagcccaggagtctgagaccagcctgggcaacatagagacccagtttctaggaaaaaaaaataaaaattagtggtcgtgtgcacctgtagtcctagctattctagaggctgaggtaggaggatcacgttagcccaggaggttgaggctgcagtgatgcggtgaactgtgattgtgtcactgcacttcagcatggaaagcagagcaagaccctgtctcaaaaaaaaaaaaaaaaaagaaacaaccttgtagccctactttcttggactcatcagggtattccacagtcttgctgcaacaggggaatagtaattcctcctgccattatcttagttgacttttggaacagttctgttaagtagggagaatttcccccattgacaagtgaggaagctaaggctttggaagatggaagttgctacagtgaggtagttgctgagccagaactggaattcagacctgtgatctaggatgatctaagattcctcgtcttaagactgtgatcttttccactgtaccaactgcctttgcaggatgtctgctgggttcccttacctcctgaaagataggatttgactctgatttgttctgttgccctttccaaatttcttttgcagttagtttgttaaaggtatattgctgccttctcaactatctatgtcaaagattttaaaaggtcagaggttagccttcaggacatctatttacttacctaccttaacaattcctactgtagagcaggacatttaaaggacaagaaaggctttatttctgccttgtctctctccatgcatgcattcttatagcatgacaaagttggcagtatacaagttttggaagcaggcctgagttcaaatcccaatgttctataatatggacatgatttgtgattgaataaaaaaaatttttaaatgtgcggcatttgtgagataattggaaattttaacgtaattgaatatctaatatcaagcagtcactactttttttcgagtgtgacgatgtgggtagtttaagaaaaaggccttatcttttagaaataaatacggaaacatttgtggataaaacgttgggctgttatttgcttacaaaagttgtgggagtagatggggtgtggattggatggttgttgggacaggatgattagtacctaattctgtctgcacttacgtatgattgaaattctccctaggatgtagaactaaaaaagaaaaaaaaaatcccaatactctctgtcttaagttaggtaatctactcaacctctctgagcttcaatttccttatctgtaaaattggaaagattataactatgttgcaggtttgctgaaaattaaagtaacatatatgaaaacatctggcataaagcctgatgttagtaggtgctcaaccaatggttgctgttttgttgtttttactatttttggagacttggaaaacattaaatcagttgttatctctgagcctgggggtccatgtttcctcagacagggacacatctccactactaatagggtagttcttactatgtttcccaagagcattttccttacccttgctttctccttttccaaagctaccttaaataaagggaggtttattataaaggaatttgagagtccataaaacagtatcaagagatgcaggttggtcttttagtgaagcagaactggaacgcttcagcatccaaggtagctactctgccttttctgcttcatcttttctttctgtagatcaaaggttggcaaactttttttgtaaagggccagttaataaatattttaatttgtatagcttcatacagactctgttgcaacgacttaactctgcagttctaatgcaaaagagccatacaaaaacaatagttgtgtctgtgttccaatgaatctgtacttataaaaaagggcagggaatggatttggcccatggaccatagttttcccatgtcagctctagacttctgcagatggctccaattacatgtattccatcacagcagactccaggtggcgctgtcagtcctcaagttcacatcacctagtaaatttagtacttgtaactaactagctctcttccaattccagattcctagggaaaggacttcagttgtgtcaggtgtcactatccaactgtgttgccttaagggcggaaatgtgtggctagcagccctctcagcaggggctgtgggtagtctctcctgagaagaaggagcaaagggtatgggtgatgggcaactcttaaagaaaaaaggtatggggatgggctgggtatgtgccccagggttccccatagatccaggaagatcacctgtttattctgcttttatttcttataatctgtatttttttatgttgaggaacttatttttaacaattaatttgagtatgaactctaataaaaagctgactgtaatgcatagtttaaagtttaaaccttgccgagcaataacaatctctagatgtctgttgtttcactctaatacttactgtggaattacacctgagttgttttccttcttttttatgagcctaggagatcagccataacctaggagtttgctacatatacctgaagcagttcaacaaggtaatttatagaagtggtgatagatttcactgagggtgcacttgttgcagaagttgttacattgctcatttggtattatccctagtgcttgcagaggtttttggaactgaaaattgaaagtacctttatacatttttttctgttttaattctcacttgtcattattcatctgttgttttctgcttgtaataagaacatggaaagttctagaaatatgagggaatggcagtttttctcctttcttctttttctctacctccagttaaatttcccagtttagaaacagatgcttaataaaacatacatatcaaaaagtggacccttaagtcttaaaggtgtgatcatgaccatgtgagctatctccatgccctgacggcaacttagtttttagggtcattgaaaataaattttaaattttaagtggatctgatttctgagttttcagttttaattttatagttattttccatgatgagaaattatatttcactgtgattaagctatagactcctatatcagagaagacaagttgagcttacctcaaatttggtactcaggtaagaaaaagtatatatcataattgaggagtagacaaaattactgagagctctaaaacttagtgatgagagcgttgggtagtttccttcatagagctcacagttagtgattgtgaagttttattctcctttctccgatgccaccaggactgagaatctgaattggttagtacccatttgacaatgtttagtttgtgtcaatttgcagactggtgtaactagtatcccacactggtgtgaaaaaaaatatgcacattagcagttggggtgtaaaagtaacttttctcctgagataacaatatatatacataaaatacatttagtgggccccttaggttttgtagatggatctatagttttatatacttggttaggagatttttctcttcagagacaatttcaaacaggcacatttctattcacaggattattctgagtcaggggaaaagaaggatttgtctttggttggatctgtgctgagaagaaatatatttagattttactgtacagctaacaggctaggcaaatacaatacctggcatttatataaatgcttgttgaatctgtgaatgactaaacaaagcccttttgtttactaggagaaggtaagctcctccagagcaaggagttggttttataaactcaaatatatttagcatctagaacagcaagcagttgggtgaataaatgagaacaatctatttattcatttatcatcacattgatggggaaacctggcccaccatagggaaggttgtgcacttggtcagtgttacagctgggatttagtttagtgtagtactctacactgtactatgatggcccttttgacttatgaagtatgagtcataggtgtgaatatcaggcagaaaacattcagaaagattaatcgtcttgtataaattcttccaagtggctccagaagcagatatcccatgttgccagctgtcttttcaacaaggacagttttggtatgttttggtctttgggtagtgggggctgtttgctgaaatgtgatgttcctatgtcaatacagcagaaagtgtctttacattagccatataaaggtatagttcgttcagtggtagtgatttggttttctttattttgttaaacttgtcaggcacaagaccagttgcacaatgccctgaatcttaataggcacgatctgacttatataatgctggggaagatccacttgctggagggagacttggacaaggccattgaagtctacaagaaagcagtggagt

SEQ ID NO: 15487 - DNA, 51618 bp, Homo sapiens
gcagcggtgggctgagctaaaatggctgaggagagagtcgcgacggtgagcgccgagattctctttagttgcccggccgcagggcaaggcaagctggcgggtggcttttgtcccatgcagcggttcctggagagaggcggagctgggtgccgagcgtctcagggtgggcggggcgacacggtcccctttttactgtcccgggaactggtcgcctggggcaagtctggatacttagcagcacaggtcctgttctaggactgtagtccctcttggggtgcgctggacggagaagggagacttttcaccagtaatggctcttaccgtagtgccatctttttctgtctcgggggtttggaaggtaatgactagcacttgtgtagacagttcctgttaatcccgtgaattgggaatttaacatgcctggaagcttgcagcgtcactgccttctgccagtggagcgggactgtgttttttctgtggtgattaagtttaggaaagtacggttttggaattcatctgaaggctgagttgggcgttcactccacagaactgctaatatagaggaacccgatgaattcaggatgacctagtcgctattttttgaggcatatatctataattggatctaatttcggtaaagtgccaagtgtgaagctttgtttaccttgctttagtgttgggtttgaaagcctgttctgtccatttgttagaatgattttaggtattcggaatttattgtctttcgaaaaacgccctggaaaacagtacaaatagcagcctttggctgttttacaacttagttttggctaagcagcaaggttagtgttattgttagagggccttttgtttgttttctactctcatttgcagagtagtcatattattctagtctaattagaaaactctgaagacagaaacttttttttttgagacggagtgtcgctgttgtcggcccgggctggagtgcaatggcgcgatctcggctcactgcaacctccgcctcccaggttccagcaattctcctgcctcagcctccggattagctgagaatacaggcgcctgccaccacgcccggccgaaacatttttattaagctaagaaatttaaaatagctaggccggacgcggtgcatcacgcctgtaatcccagcactttgggaggccgagacgggtggatcacttgaggtcatgagtttgagaccatcctggccaacatggtgaaaccccgtctctactaaaaatacaaaaattagcggggcatcgtggcgctcgcctgtaatcccaggtacctggaaggctgaggcaggagaatcgcttgaaccccggaggcggaggttgcagtgagccgagatcatgccattgcactccagcatgagcgacagagacagactccttctcaaaaaaaaagaaagaaaaaacagattttaaaataattaaataggccaggctcagtggctcacgcctgtaatcctagcaccttgggaggctgaggtgggtggatcgcctgaggtcaggagttcgagaccagcctggccaacgtagtgaaaccctgtccctactaaaaaaatacaaaaaattagctggacgtggtggcgggcgctggtaatcccagctactagggaggctgaggcaggagaatcgcttagaacccaggaggcagaggttgcagtgagccgagatcgtgccatttcactgcagcctgggcatccagagcaaaactccgtctcagaaaaaaaaaaaaagtaaatagcatggttaatgttactgggttttaaatattaaaaacataggaaagaaaatacttccactccagcctgggtgacagagcaagactccgtctcaaaaaaaaaaaaaaaaaaaaaaagaaaatacttctaagtaatcttaaagtgtaaaagataatgggtaacataacattgctacaaatatagcttatcctctagtgctcatcacaagtgtttgtgtaatagaatatgaacttgagtctgtgacggcagaattgtcatgtacatttgaatgtctaatactgttttaaagagaatagcttttgtttcgatatgacttagcaattaagcctgaagttaactgttttcattgttgtcaaatttattgctagtagtgttacgtttatagtaattttcatcttttcaagttaccaatgcatggaaatgtgaatttctgtccttttaggaagtggtattttatcttttttttttttttttttttgagacggagtctcactttgtcgccctgtctggagtgcagtggcgtgatctcagctcagtggaacctctgcctcccgggttcaagtgatttttctgcctcagcctcccgagtagctggggttacaggccctcaccaccatgcctggcttatttttgtggagatggggtttcaccacgttggccaggctggtcttgaactcctgaccttgtgatctgcacgcctcggtctcccaaagtgttgggattacaggcgtgagccatggccccctgccttattttttaatacaattaaaagaacccagtaatcctactcctagacctgtgtcccacagaaaaaagtgttaaacatgagcgtgtagtactagggcattcgttgtagtactatccgtagtggcaaaacgctggaagcaaattaaatgcccattaatagggtaattgatgacttcagatatttccatactgtggaatattatgcagtcattaaaaagaatgttacaactaattgcttttcctctcagaagcccctctctctcactagagaaagctgttctcctttctttcttctgcctattaaacctccattcctaaactcagaaagaaaaaaaaaaaaagagaatgttacgactaattgacttggagggacttccatggtgtacatttaaataaaaggtagatgtgaagtggggtatattatgtgatcttaatttcataacacaaaggaaaacatatagatccgtagataaggatatatggatatggaggagagaaaaggaaaagactcaaaactcacagaatttttgaagaaatgtatagctaaaaatctaagaaggctacagtcaaggccttgaggccagaagacaccccatcaaaactgagtaaaactagcccagtgtgggacgcagaaattctagtatgctaccaaaattacttacggattgctaccagttccttagaaggaaaactgaggactaatatttgtattttcagtatagtttagaattcttaaaaaatgagcaaacaggctgtacttggtggctcatgcctgtaatgccaggacttgtggaaactgaggtgagaggataacttgagtccagaggtttgagaccagtctgggcaacatgttggagccccatttctacaaaaaacacaaaaattagccagacgtggtggcacgcgcctgtcttcccagctactggggaggatcatctgagcctgggggaagttgaggctccagtgagccatgatcatgccactggactccagcaggggcagagtgagactttgtctgaaaaaaacaaaaaatgaatgagcaactaactctggctttcatgatttgtgcttataaatctttttatttatttatttatttatttatttatttatttatttatttattttgagacggagtcttgctctgtcgcccaggctggagcgcagtggcgcgatctcggctcactgcaacctccgcctcccgggttcacgccattctccagcctgagcctccggagtagctgggactacaggcgcctgccaccacgcccagctaattttttgtatttttagtagagacggggtttcaccgtgttagccaggatggtttcaatctcctgaccttgtgatccgcccgactcagcctcccaaagtgctgggattacaggcgagccactgtacccagcctataaattttttttataatgccctgattcccattatttgatgtatttggataaatatgtcatcctgtaaattgaaggattaaactgataagagcagaaaacagaaattagtacactagttgatctggctcagatatagtgcctatgtatcaggtgctccatgaatatttgttggatgaataaatgatcataaaactatataaaaatgaagaaataacagaataaaataatttgttctatataaatcctatgaatgagattgagtgggctaatagaatcctttccatctcaaaatgttctggaaagtcttgagtaaaagactcatcaaaaaaataattctgctttgtgcagaaagaagggttgctgacctttgaaggtgctttttgagtctttaacattctttagtagtatattccccaaagttaagaaattctagttagattttaaaaaattgagttaacatttaaaaaacagttttgttgaggtataatacacgtaccataaaatttactcaatttaagtacaaagtttgatcagttttagtaaatttatatagttgcacagctgtcatcagaggctgcttttaaaacatgtccatcactccagaagggttcctgtgtcaatggaattgctgggttatattgtttaagtatttgtttaaaaaaacagaaacaaatctgcctaacttctgcaggctatatacgagttaacatttccatgagcaatgcatgagggttgtgatttttccacatccctgtcaacacttggtttgtcagtttgtttttatttagctgttgtagtggatgggtagtgatggtgtatggtggttttaatttgtatttccttcatgaataatgatattgaagattttttatatgtttattttccacccgtatctctttggtgaaatgtctttataaatttttgtgaatttttaaatcaagatcattaaccaaatgagcccctcatttgggctcaagtgatccttccacctcaacctcccgagtagctgggaccacaggtgcaggccacgcttggctaatttttgtatattttgtagaggcggggttttgccatgttgcccaggctggtcttaaactcctgaactcaagcaattggcctgcctcacataagtattctcttttattttgaggattaatttttgttgttgtgaaatatatcctacctgtaaaagagtgcttaaaatgtcgtatgtgtgctttaaaggataatataatggaaacttgtgttcctactgcccaggttaggaaatgggttattaataactttgaaacctcctaaatgcctctctcctactgcattttccttcctccacatcagatgtagtgtttcttcaattttatattaatattttgtactttttatagttttaccatatatgtttatatatatccttaatatattagtttttaaaatttgttattaaccttcagtttattcattatttcaacactgtatagtatcttattgtagtaaagtatgtcaattaacttatccattccactagatggagatcgggattatttctggtttttagttattaaaaacaatgctgctgctgggtgcagtggcttacgcctgtaatcctagcactttgggaggccgaggctgcggatcatgaggtcaagagatcgagatcatcctggccaacatggtgcaactccgtctctactaaaaatacaaaaattagcaggatgcggtgctgcgcgcctgtagtccctgctactcgggaggctgaggcgggagaatcacttgaacccaggaggcggaggttgcagtgagccgagattgtgccactgcacttcagcttggcagagcgagacttcgtctcaaaaaaaaaaaaaaaaaaagctgctataaatatggccaagactaaggaaaggtaagtgaggtgcttagggttcacattttatggagtaagagtaagtaccttcttaaggtttataccctaggttcttcacatgcctcactttagtcctagccctgagcattattatgtaggtcttctgatgcaatatctaagagtttctctaaggtatacctagaaatagattgctaggtaatggagtaactttattacttacaggaaactatatggtggttgtaacaatttatgcttctgccaccagtcatggtggatatgaaattatgtcttaatgtgataatttacattgcaatttttttttttttttttttttttttttttgagacagagtcttgctctgtcacccaggctggagtgcagtggcgtgatcttggctcactgcaacctctgcctcctgggctcaagtgatccttccacctcagcctcccgagtagctgagaccacaggcgcaggccacacttggctaatttttgtatattctgtagaggcggggtttcgtcatgttacccaggctggtcttaaactcctgaactcaagcaatcggcctgcctcagcctaccgaagtgctgggattagaggtgtgagccaccacacctggctgtttgtttgttttgagcctgttcctcaggctggagtgcagtggtccaatcatggcttgctgcaactccgcttcctgggcttaagagatcctcccacctcagccttctgagtagctaggactaagggcacctgccactatgcctggctaatttctaaagttttttttatagaggcagagtctcgctgttttgcccaagctgttctcaaatttctaggctcgtgtgatcctcctgcctcagcctcccaaagtgctgggattataggtgtgagccaccacacctggctgatctatctgtcttaaactggagaattgcatttttttctacctcctttcttttttttaaaaaaactgaatttccatctgttacccctccctttctgctcctcttatttcatgccttggaagttatactttgccttcctttaatgagtaccaaagaaattaaaaaatacatgtttactgtaagtccaggcctaaatgttgctactacagggaccatcaaatgctttactaccatctattgccatctgcaaatgtatgccattgttgtttagttttgtagttcttaatgtattttaattaaacaccacaaattatgctttttgtttgttttattcagtcagtagatgcttagaatacttgcttattttaccaattcctttgcttattccactcctttgttctgggattatttttctttttcctaatatattttcattaaaagtttatttggtgagaatctaaaaactctcaaattctgaaagttttaaaaatttgcctttgttgttgaaaattagttttgatgggtgagagaatctagatcaggtgttagcaaacctttttttgtaaagggccagatagtaaatattgtgggctttgtgggccatagagtctctctgacaactactcagcaatgctgttgtaggacaaaagcaaccatagacattatgtaaacatgagtgtgggtatgttctcacaaattttgtttatagacactgaaatttgactcaattttcatgtgttaaaaattattattttttgaatttttttaaccatataaaaatgtaaaaatcattcgtagcttgtagaccaaataaacaggatggatttgacctgtgggccatagtttgctgacctctggtctaaattaacattcattttacttagtacctgacactggagtaattattcttatgatgtcttattgtgatattgtcttccatttttaattgttgaagagccagctgtcagtcttttttgtttttctttttcttcttcttttttttttgaaatggagttttgctcttatcgcccaagctggagtgcagtggtgtgatcttggcccactgcaacctctgccttctgggttcaagcgattttcctgcctcagcctcccaagtagctgggattacaggtgcctgccaccacacccagctaatttttgtatttttagtagagatggggcttcaccatgttggccaggctggtgttgaactcctaacctcaggtgatccacctgccttggcctcccaaagtgctgcaattacaggcatgaggcacggcgtctggcctttctttcctttttttttttttttgagacgtagtcttgctctgttgcccaggccggggggcgatggtacgatcttggctcattgcaacctctgcttcccaagttcaagccattctcctgcctcagcctcccaagtagctgggactataggcacgtgccaccatgccgagctaatttttgtatatttagtagagacggggtttcaccatgttgtccaggctggtcttgaactcctgacctcaagtgatcctctcgccttggcctctcaaataactgtcctttctttgttggtaatctggtgatatgttttcttgtttggctgcttttaagagctgcttcttgtctctggtgcagttcgctatgatgtatctaagtatgtatttattttcatttaacctggtcaggatttgttgagtatccagaaactaaggattggtgtttctcattacatctggaaaaatttgagccattatttttgcttatattgtggtatgtcataggaagttgagaaaagaaaaattcatttgatggttttctatgaggttatagtggaaaataactatctcccttttagaattgagtgctagacagtttctgtgtagatgatctcataagcttccttttatcaaacagcgatcacttttttggtttggctgctgagaagtatggcatcaagtataatactcatatgaggtgtttaagaactgagtatatttcttatgcacattttactatatactataattatacattaaaaatgcacattgtaaatattataaatatgtgttatacattgttaatagtttggatagcaaaagtatgacttgacatttgttttttaaaccatatttaaagtaactctatcacaatatggatttaatggattaattgcataattggtgagctactgattattcttgttatttggatgcttctttaagttagcaagtttatattgtggtgcttcaatatagactacttatttcatttcagagaactcaatttcctgtatctactgagtctcaaaaaccccggcagaaaaaaggtctgtatgcagtttcatggtatgtgtatgtttgcacagacagatttctcttttatttatttatttatttttttttttggaggcagagtctcactgtcacccaggctggagtgcagtagcacaatcttggctcactgcaacctttgcctctggggctcaagcaattctcctgcctcagcctcccgagtagctgggattacaggtgcacgccaccacacctggctaacttttgtgttttagtagagatgaggtttcactgtgtttgccaggctggtctcgaactcctgacctcaggtgatctgcccaccttggcctcccaaagtgttgggattacaggcgtgagccgccacgcctggccagatttctctctcttgttgattcttttatctattctatattatttcaaaatgagtgttgggaaaagaagtaatagtctaaatgttctgtcacatctagcttttatttaatagagttattagatattaggaggttggtttgacctggaaattatttaaatggggtttgattattatgtaagtgtgtactaattttctgcttctggaaaaaccactttgtgaagttccaggtatctttttgctttgttggtttctagtttaattctattgtgggtagagaacattctttatatggtttgttttatggcccacaatgtggcctgtgttggtgcatgtcccatgtacacttggaaataatgtgtattctgctcttgtaggatgtagcattctgtaaatgtcaattaggtcaagttggttgatagtgttctgtatatacttacaattacagatattcatattcttactgatgtagttactgattggaagggtgatagaagagtgttgaagtgtgcaaatgtaattgtggatttgtttctactttcagttctatcaatttttgatttgtgtattttgaagatctgttgttggatgcatatacatttaggattgtctgatttcttggtaaattgacccgtttgtctttatataatattcctcttcaatttctgataatattccttgtttgaagtctactttgcctgataatattttagttttagttatttatttagctattttagttttgctttggccagtctttgaatggtatcaacatataattttcgtagagtaaaattccctttttttagtacaaattctgagtttcgacaaatgaaactagccatgtaaccactagtagcaccataatcaagttataaaagtttaattactcccccaaaagtcacctttactttgtagtaaaccacttcttccattcccaattgcgggcagccattaatctgtttctttcttcctagttttgcctttcttggaatgccaaataaatggaatcatacattattattattttgagagagagggtctcgctctgtcacccaagctagagtgcagtggtgtgattatagctcactgcaacctgaaactcctgggttcaaatggttttccccagtagctgggtctacaggtgcatgccgccatgcctggctaatttttatgtattttttttgtagaaatgggggtctggctctgttgcccaggctggttttgaactcctggcttcaagtgatactccatcttcggcctcctgaagtactggcattacaggcatgagctattgcacctgggttatgtaaatttttcagtggcttttaaacctcatataatgtttgtttgttggtttgtttttgaggcggaggctcgctctgtcacccaggctggagtgcagtggtgcagtctcagctcactgcaacctccacctcctgggttcaagtgattctgctgtctcagcctcccaagtagctgggattatcggcatgaaccaccatgcctggctaatttttttatttttagtacagatggggtttcaccacgttggccaggctggtcttgaactcctgacctcaagtgatccacctgctttggccccccaaagtactgggattacaggcatgagccactgcatccagcccaatatagggaggtattaagaaaagagaagaactatcatccttaagtattaacgggactttaacaaattaaaaaagtagtactttgaataaaaagctgtcacattttactgtgaaatccttagactttttttatacctctagttcaggttttttcagctttggcatgaatgatattttgagcaagataaatctttgttggagttgtcctgtatattgtaggatggttaacaacatccctggcttctacctggtagatgacagtagcacttaattgtaacaaccaaaagtgtctccagatgttgccagttattccttctggggcaaaattgttcccacttgagaaccactgctctggttaagtagtgtaatacttggaaatagaaggcagaaagttggtaagtgcataaagaattcacacagaagttggattagcaagctgagagacgttatttgaacaagtagcaattggaggcattttgactgagaatggatgttgtgcctctccctcactctttcctcctcagcttgagaggtccatattctctcaaagtttgactctttagttttgagggtgatgactgccaactgtggaagggataaacagatttctgtttggtatttttgtccaaatatatcaggactttttcaagaacaggcaatgaaattattgatcagaactacttggtggttctgagaaaataatatgctacatgaggctactgaagtcctcttccttttgccccatgatgtaaccttaggtgactttcttctggctttcagttgaagatcttacccatcattgaggtgagcgaactgatttactgcttgagtctattttcttccttaaaggagtcttcattgaaaactttacccattttggggtggccatagctgaggatgagttttgtccacaacctgagacaacatactcactatgtaaaaaacctgatctcagcttgatatctggttttagactaattgtttaatagaataatttattattgtaaaatatatataaaatttaccatttttaagtgtgtaagtcagtggcattaagtacatttacaaagttgtgcagccatcaccactgtccatttctagaagtgtttcatcattccaaacagaaacactgtacccattaaacaataaatctccacatccccttgcctccccagatcctggtaatctccattctattttctgtatctatgaatttgactattctaggtttttcatgtaaggtgaatcatacaatatttgcccttttctgcctggcttattccactcagcattttcaagattcattcatgttgtagcatgtgtcagaatttcattcctttttaaggctgaataatattctagtgtatgtatatatcacattttgtttatctgtctgttgatgggcatttgggttgttttccttagagtctttatatgtcagtaattcttaaagaatttaaaagttgtagaaactaggaattttgtagatattctagaaatatgtcatttcctgtactgtatataataatttattctacagactaattactgtgtatatatttggttctcagacgtgattttgattttgtagatgctgtacatgctcttcacttcattaatcttttccttttgctaattttggttcttgtgtatacagaattatagagttacaaggtaatttagttgttacctaattcaccctaaagtctacatgaaaccactgtcacagtctttgataagtagttaccaaatctcactatttctactgtgatagtgaatgactttcattgattagctttctgaaagaatagtttatcttacttgtcttggtatcctcacctctgagtctatttgtctattgtaatctggcttttgctccaccgctccactgattaaatggatgagctaagcatttttttttttttccactgcaacctctgcctcccgggttcaagtgattctcttgcctcagcttcccgtgtagctggtattacaggtgcccaccaccatgcctggctaattttttgtctttttagtagaaacggggtttcactatgttggccagactggtatcgagctcctgacttcatgatccaccccaaagcctcccaaagttctgggattacaggtgtgagccaccgtgcttggcccaattctgtttaatttttgaggaacaatgttaacttctaatttaaatggaaggtagtatatatctaatttttccctattatttttaatttcaatgctagtaaatctttaaatctgaaatacacactcttgaattttgacagatatgtatactcatgtacatatttatattcctgtaatcatcagatcaaattaaacatttttatcacttagaaagtttcctcatgcctttttccagtaagtcttctgcttcacttcgccagatgcaaccaccattctgatttctgcctgtataaattgattttgaactttcctataataagttgtgcttgaacttcacacaaagggagccatacagtatctactatttagcttttggcagctttcatacaacatgttgttttggagattcatccgtgttgttatatgtatcagtagttcttttatttaaaaaatgctgtttagtattcagttgcatgaatataccaccgtttgtccattctcctgttaatgagtatttgcaatgtttccagtttttgagtactgtgaaagtttctatgaacatttatttatttagagatggagtctcgctttattgcccaggctggagtgcagtggtgcgatctcagctcactgtaacctccgcctcctgggttcaatcgattcttcagcttcagcctcctgagtagctgggactataggtgtgtgccaccatgcccggctaatttttctatttttagtagagacgggatttcaccatattagccaggctggtcttgaattccttacctcatgatccgcccgcctcagcctcccatagtgctgggattacaggcatgagccactgcacccggcctgaacatttatttactggttttttttgtgtgtgcatgtgtgtgcaagttttcacttgaataagtgcctagggagtggaattgcttggtcatatgtgaactgtttgttttaactttataataaactgccgaagtattttccaaagtggttgtacagttttacccgaccgccagcaacgtgtgaggattctgtttggctacattcttgccaacatttgttactatcagtctttttcatattagacttgctggtgggtatattgtgttttattgtgattttaatttgcattacactaatgactagtgatgttgaacaccttttcatatacttattggtcatatcttttgtgtagtgtctgctcaagttttttgcctatttttaaatttcttttttccttattattgatttgtgagacttcttaatatattctgaatgtacgtcctttgtctgttatatatgtggtaagtatttccccccagcctgtgttttactactttcattttattaaggtatcttttgatgatcaaaagttttaattttgatgaaggccaatttactattatttttcttttgttattaatgccttctctgtcttgtctaggaaatcttgatccttaccccagactgagttgtgtgtcctctcccttttctgcattaatattgcagaaattaattttttggttttagaaaatgtctaatttggctcaatcagtaatttttgatatctttctattgaaatatatatacagaaaagtacatacataaatcataattgtactgtgcagtgaatttttacaaagtaaacatatccatgtaatcaccatctagattaaggtatagaatattatcagtgccctccaggccgcctccttattccctaccagtcattaaccacccctcccaaaggtagtaacttgtatttaacttctatcttctacatcagttttgcctgcttttgaatttaatgtaaatggaatcatgcagtgtgtactttttaatatctaacttcgttgctcagaattatgtttgtgagattcatttatgttgttgcatgtagtagtggttggttgttttcttccttgttatatatattccattgtggggctctacctaagtctattcattttatacttgatgaacatttgggatatttttattgtgatgtattatgaataatgccaccatgaagagtcttgtacatgttttttggtacacatacatacttaggagtaggattttcagggtcaccaggaaggatatatttaggctcagtgaatactagcaagcaatttttaaaatgcggtcaatataatccccatgtgtaaaataaaggtgtacaaacgcacacacacacacttgctcatatgcttatatgtgcatagaaattccttgaaaatactcaagaaatgcttcacctctggtaagggataggaatggaatgggtcttttgtttagtatcctatgtgccctttgaattttgttttactgtaagtatgtatttttaagaaaaccaactagttatttttaaaaatcatttgaaagtcttcctactttgatatatgaaaaacactggttttaaaaaaaataatagaaaagctttaaaatcattattatttttttgagacggagtcttgctctgtcgccaggctggagtgcagtggtgcgatttccgctcaccacaacctttgcctcccggattcaagcaattctcctgcctcagcctcccaagtagctgggactacaggtgtgtgccaccaggcccagctaatttttttttttttttgtatttttaatagagatggggtttcaccatgttggccaggatggtctcaatctcttgacctcgtgatctgcctgcctcggcctcccaaagtgctgggattacaggcgtgagccactgtgcctggccgctttaaaatcattaatgttgcgttgctcagttatgtctaattgacagcccaaacatttacattgtaatattagaaaatcctttatgattgggcagaaacttggtttaatgtgtcaccttggagacctgggttatagtcctgcctcttccattaactacttgttgaatgtggacaatttacttaacctttagggccttaatttcctcctttataatgtgagaatgttctctgaattgcataactcactggccttacgtgactattcagtggaataataagagagaaaaactttgagatacatgcacacacacccttaagaaggatataattgttaaattttgctttgaggaaataaaataatctaagctataaagtaaaaccataattagctaatcttttatatgacttttttcttcctcatttcaagctaatgagaagcaaacaaactggatagcagcaatataattaaaaaattataggccagcttctagcatgtattcttgagtcaatactgactcagcccagtctcttcctcttccttcatcatcatttatgtacctgaacagagtagatgtttctcttgatcctgggcctgttcgccctcagatccattccttgccttctcttctctttttggtatagtgaggagctgactctttttttttttttttttttttttgagacggagtctcgctctgtcgcccaggctggagtgcagtggcgggatctcggctcactgcaagctccgccttccgggttcacgccattctcctgcctcagcctcccaagtagctgggactacaggcgcccgccactacgcccggctaattttttttgtatttttagtagagacggggtttcacctttttttagccgggatggtctcgatctcctgacctcgtgatccgcccgcctcggcctcccaaagtgctgggattacaggcgtgagccatcgcgcccggccgaggagctgactcttgcagcctccttttcttcccaggcttccgtgtcagcagtttctggctggattagcaagtggaggaactggcaggagattagaaggcaagaggaaagagaagacagggcttccctccccgaccttcaggcctcagagtcgtagtggttttttgctcatgcagacttctgatttgtctcaccattccctgttgggcctctcatttcttccattgcctgttctctgcattaaagtccttgtgtttcaaatcctcaagtggctttttgttaggctttgactgatacagggctcaaaatgatagtaatgaaaatgtcttacatttatattcttttcaagatttgttatctcttttgataccccaaatatcctattgaggtagaaaagtgttataattcctgtttggcatgaggaaattaacatttattgaatgactattttcagattctttggattttcgggtgaaaattttaggggggataaatggaggcccagagaagtgaaataacttgccctaggccccatagaaggctggtattgaatcaagattgaaattctgcatgtgaaaacttttacgtgctacatgtctgctagtcctggaagaaatcctttctttgatgagtattttttttaaaggctttacttgcaatatatttacaaaagccttagttatttagtaaatttttcaatgaaaaatctgaaccataataattttctgcttagtacttatatagctagcatactatccctagcattaatcaaagtgtcatgtaaaggtttgatttttgagcctaagcagaatttgaaattcttctaagagaatttagcacctagggcaaactacaggggagaattcttgaggtgtcatgtttattcacttctggaattgtttaaaatatgtcaggtgcatccttaaagggagaaagaagggggaagagatgttacaaaagagtagaatggggcaagagaagtggcaagggagtattgttgctaggttgccagccttctgcccccactgtcttggtgatggtggaggggtagtgtggcagctgggatatgaatgaggtcttttttataactcactaaaagccattaccttgtcttcatctcgtcagctggctacctgacctctgtggtaacataggctcctgaaatgtagcattggagatgatcactgtgctttattgcaaaataggggagactctgctctgcatttacatgcttatgttttgtggaggatctttcaactagtaattctcataatacctgtgaaagcatataagaaccagtatctccatttttagggggagttggagtgagcaatgatttggaataccagaaattcaacttatatatttacaggtaaaattctaattgtaaattcaggattcatagattctagggatttctgaggtatccagaattccttcatctttgatgataagtagataataatggtaataaaaataacagcaacaggcccagcacagtgacccacacctgtaatcccagcactttgggagactgaggcaggtggatcacttgaggtcaggagttcaagaccagcctggcggacatggcaaaaccccatttctactaaaaatgcaaaaattagctgagcatagtggcatgtgcctgtaatcccagctactcagtaggctgagtcataagaatcatttgaatctgggaggtggagattgcggtgagctaagatcgcgccactgcactccggcctttatgacagaactcgactccatctcaaaaaaacaaaacaaaacaaaacaaaacaaaaacaaaatgcaaaaaaacagcaacaataataggtaacatttctttaaggcctactatgtaccaggcactatttgaacctctttatatattaggtaatacgatacaactctatgagaatgagtattttatttcctgacccttctatttaaaagtaaaaccccccacccggcactgtttctctttcctgctttatttttctccatagaaaaatatcactcataagtgtaacatactttattatctgtcctgtgtggtagtagcccctgccctcaattataaactccatgaaatcagggagtcagttttgttcactgctgtattcccagtgcctagaacagtgcctggaatcatggtaggtacccagcgaatattggttgaatgaatgagtcttggttttacagatgaggaaactataaatttcccaggtcacacatttggtaataggacagttgtgtacactgaaatgttctctaaaatatttgatggaacgaaaattagcttttggacagctacatctccaagagtgtgaaatgaccttcagcactggatttggtggattttcctttttctaatccctagagttccatttaatgagcgtttgggttcttgagctaccttacaaattgaacacttttttctccagctttcactcaagaaacacaaaacatggcttgtcctttttttttttttttttttttttgagactgggtctcactctgtcacccaggttggagtgcagtgcacaatcatggttcattgcaacctctgcctcccaggctcaagcaatcctcctaactcagcctcctgagtagctgggactacaggcttgtgcctccactcctggctaatttttttgtattttttgtagagatggggtttgtccaggctggccttgaagtgctggactcaagtgatccgtccacctgggcctcccaaagtgctggggttacaggcgtaaaccactatagctagccctgattgtcttttattgtgagattttaataacagctaagacttgaaaattaacattttataaattttcttttagactacttagtgatatactaagtatctaaggtttgtaatacttagtataaactcaaaagggttcagtgcctcattctcttttactctttccctttagtagataggtgacagaggactgggtcatgcagttgagacttggtccaagatgacttagtaagctacttgtcccagaactatttatttatttacttatttttgagatggagtctcgctctgtcgcccaggctggagtgcagtggtgtgatcttggctcactgcaacccccgtctcctgggttcaagcgattcttttgcctcagcctcccgagtagctgggattataggtgcccgccaccactcccggctaattttttgtatttttagtagagacttggtttcattgtgttagccaggattgtttcgatctcctgacctcatgatccacctgcgtggacctcccaaaatgctaggattacaggcgtgagtcaccacccccggaccctggaactatttatgacggtgcactttatgcacttaacacactcacatgtctttaagcttggtgactcgtgtggctttttcgaaggagatttgattctggaagtggttaagtaggatgtgaatggctaaggtctggtcattggtgaagcctaggggaagaaaagaaaggaaacacaagtcttagaagaatttcagatcggccccaacgactagaagggtggttctactaagaaaatgtgtgtagtcagaaaatgaagagtcagttgcttaaaattttactttttttcttgttcctggcatgtaaagtcatatccatactttctgttataatttcttcttacaaattccattgataatccctattcttggatagcaatgagcagcattacttcttttttatttttttaaaaaaattaaattttttgttgaaatgagggtcctgctgtattgcccaggctggtatcaaatttctgggctcaactgatcctcctgcctcagcctcccaaagcgctgggattacagttgtgagccagtgtgtctggttgtaccttttaatttttgtgttcaggcaacattaactctgagtcacagtaagctttttttttcttcctgtcatattatggacatagaagttttttggttttctttagattgtttctccttaggttgcagaacatcaagaaatggattacagtcattttcctctcttccccatgctcttccctttcttttccttttttcttttctttttttttttttggagacagaatcttgctctttggccgaggctggagtacagtgtcatgatcttggctcactgtaacctccccgcaccaggttcaagtgattctggtgcccaagcctccctagtagctgggatgtcaggatgcgccaccacaccctgctaatttttgtatttttttgtagagatggggtttcaccatgttgtccaggctgacctcaaactcctggactcaaatgatctgccctcctcggtctcccaaagtgctgggattataggcatgagccaccacatctggcctcttttccatttttaaaaaggactgtctccaacatattaaaattcacaaaaaataatataaacacacatgtactcactggctaggcttaataaaaaacatttagtcatgtttactttaaagctttttatttttttgagaaataggcattaaagagttgaagtctcctttctgtcttttcataattctgttcttccctcttccttccttgagatcttcactattcttgggttaatttggatctttctactccttgttaccacagaaaagtaattcttaatgaatttgaccatattttaaacttctgatttcagtgggcaggtaactcattttatggtttctgtattgtgagccattttcaatgactcaactagatttttttcatcgttgacttctcatttctgggcaacagcataatgttctcatttgagctatttctaaagattgtgtttaactatttaaaatatttgtggtactctgatcatcagatgtgatttttttttttttttgagacggagtctcactctttcaccaggctggagtgcagtggcgcgatctcggctcactgtaacctccttctcccaggttcaagtgatgctcctgcctcagcctcccaagtagctgggactattggtgcgggttaccacacccggctaattttttgtatttttagtagagacagggtttcaccatgtttgctaggatggtctcgatcttctgacctcgtgatctgcctgccttggcctcccaaagtgctgggattacaggcgtgagccactgcacctggccagaagtgatattaactatcttatatgtatatttctgttgcgggaagtcaggggccccaaacggagggaccggctggagctgtggcagaggaacgtaaattgtgattatttcatggacacttaccagttcccaaataatattcttataatttcttacacctgtctttaatctcttaatcctgttatcttcgtaagctgaggatgtacctcacctcagggccactatgataattgtgttaactgtacaaattgattgtaaaacgtgtgtttgaacaatatgaaatcagtgcaccttgaacagaataacagcaattttagggaacaagggaagacaaccataaggtctgactgcctgtggggttgggcaaaatagagccatatttttcttctttgcagagagcctataaacggacatgcaagtagggaagatatcgctaaattcttttcctagcaaggaattttaataatactctggagaaggaatgcattccttggaggaggtctatagggcatgtctgtcttatgctgttgacataaggactgaaatacaccctggtctcctgcagtaccctcaggcttattagggtggggaaaaaaccccaccctggtaaatttgaggtcagatcagttttctgctctcaaaccctgttttctgttgtttaagatgtttatcaagacaatttgtgcaccgctgaacatagactcttatcagtaattttgcttttgccttttgccttgtgatctttgttggacccttatcaggagtttctgattttgcccttgtcctgtttcctcagaagcatgtgatctttgttctcctttttgccctttgaggcatgtgatctttgtgacctactcactgttcttaggccccctccccttttgaaatccttaataaacacttgcttattttgcagctcaggtgggcatcacggtcctaccgatatatgtgaggcccagctgtgaaattcctctcttcgtactcttatttcttagccggctgacgcttatagaaaatagaaagaacctacattgaaatattgggggcaggttcccctgatatatttccttagtgacattcctgcaatctcctttagaaagtctttctgttcaccttctataaccagggaaggagagattgagaagagacgaaggatgattttatgtttttcagtcccagtcattatttgatgagaaactgatattacaagctttaaaaactcaagatatgtattcaacatgtagtagtagaacaagtatcttagtttaatagtctataaatttttgatgcactataatatattattgtagtcagtagcatcaaaattttaatgtgatattgcagtatgtttatggttagtttagacatgaggacagtgctaaaggagaaaatctaatgactgtgttgtttgttttgtcaaaatatgctgcctagctccagagtttcctattttggagaagcagaactggttgattcatcttcattatatccggaaagattatgaagcctgcaaggtaagagattgccataataataaaaatgagaggcaggatgttgggtaggcaactaacagtgcctgctaaacagagtgtggcagtttatatctcagtgataaaacatgaattccttcttccccatacttcatacactggttatcttttgctatggtagtgatgtttaacatacaacctcaatatttcagtggcccccaacaaacaaatattaattgctcatgggctttcagatcagctgtgggttggctgggtttgactgcaggctgtgggtcaggtttaggtgtgttccatgtgtcttctcatgtcaagagcaaacaactctcttggacatgttggtcttctggtggaggcagatgttcaactcagcatattaacttttttatctttggatagatgaaaaatggtattttgtcgagtttttttttttttttttttttttttgagatggagtctcactgtcacctaggctggagtgcagtggcatgatcttggctcattgcagcctttgtctcccaggttcaagcaattcttctgcctcagcctccccagtagatgggactacagatgagtgtcaccatgcccagctaattttttgtatttttagtagagatggggtttcaccatattggccaggctggtctcgaactcctgaccttgtgatctgcccgccttggcctcccaaagtgctgggattacaggcgtgagccaccgtgcccagccctgagttttattttttaatttctctcttactgcaaggttgatcatcatgtgtatatttaaaaaccatttgtatttccctttctctgtatctttggtgacataccatatgtgttacaaacttgcaggcagacagtggtagtactaacatgcagaatgtatccttggtgtcatcttttttggtatccagagctttgtgacccatctaaggtttttaatttatacccatggcatttatacctatggcaatgcacagaactaattcatactggtatgacaaagattcataccagtttttttttttctttttttaagtggagttttgctcttattgcccaggctagagtgcagtggcgcaatctcggctcactgcaacccccgctttccagtttcaagcaattctcctgcctcagcctcccaagtcgctgggattacaggtgcccgccaccatgcccagctaatttttttttttttttttgtatttctagtagaggtggagtttcaccatgttggtcaggctggtctcaaactgctgacctcgtaatccacctgcctcagcctcccaaagtgctgggattacaggcgtgagccaccgcacccggcccataccagttttttttgacaccgctgatccgaaggcagataccagtatgaatctttttttttttgagatggagttttgctcttgtcgccaagggtggagtgcaatggcgtgacctcggctcaccacaacctccgcctcctgggttcaagcgattgtcctgcctcagcctcctgagtagctgggattacaggcatgtgccaccacgcctggctaattttttgtgtttttagtagagatggggtttttccatgttggtcaggctggtctcaaactcccgacctcaggtgatctgcccgcttcggccacccaaagtgctgggattacatgcgtgagccaccgcgcctggccaccagtatgaatcttgaaaggttctctttctttttcatctgtgataatacttggaaatcttatcacacttttcttagcttgcctagttagattttagacaggggttggcaaactttttctgtaatgggccaacaatattttagggtttgtaggccacatacagtctctacatcatatttgttatcttattttttataaccctttagaaataaaaaaaccactgttagcttgagagctgtacaaaaatatacagggcctgtaagccctgtagtttgcaaatccctgttctagaagaagtaatcacaacaagggagttgaaattttaagaaactgaatgaactaatactttactaggcattattaatactctaggtttttttacatatgattcttgtccacgtctgctttttcattactatttgttttcttttttttttcagacagagtctcactctgttgcccaggctggagtgcagtggcgctatcttggctcactgcaacctccgcctcctgggttcaagcgattctccttcctcagcctcctgagtagctgggattacagacacgcaccactactgcccggctaatttttgtatttttagtagagatggggtttcaccatattggttaggctgatcttgaactcctgacctcataatctgcctgccttggtctcccaaagttttgggattacaagcatgagccaccgcacctggcctgtccatgtccactttttcttaaagacacctgaagaaacttaaccactgctcagaagcatttttctccctctttcaggctgttatcaaagaacagcttcaagagactcagggattgtgtgaatatgctatctatgtccaaggtaagacacatacttcttgtcttcttgctagagaaatacacttttcctaggttcttgaaaaagatcaggcaattgaagaaacaagttcaagtacagtcatgcaccacttaacaatggagatatgttctaagaaatgtgttgttaggcaattttgtcattgtgtgaacattacatggagtgtacttacacaaacatagatggatgatatagtgtactatacacatgatatagtctgttgctcccaggctacaaacctgtatgagcaggtgttataccgaatactgtaggcagttgtaaaacagtggtaagtgtatctaaacatagaaaaggtactgtaaaaatatggtataaaagataaaaaatagtatacctgtatagagtacttaccatggatggactggaagttgctctgggtgagttagtggtgagtgaatgtgaaggtctaggacattattgtatactaatgtagactttatgttgtatactaatgtagactttataaacactgtacacttagcctacactaaatttatttaaaaatattttttctacaatgataaattaactttagcttactataactttttactttataaactttaaaactttttggctcttttggggtaatacttaaaacacacaacaacattgtacatttgtacaaaaatagtttctttaggtccttattctataagcttttttctttttctttcttttttttttttggtagagagacagagtctcactttgttgcccaggctggtcttgaactcctgggctcaagcagttctcctgcctcagcctctcaaagtgctgggattataggcatgagctacgacacctggccctttatgctattcttaaaactttttatttttttacttttaaacttttttgttaaaaactacgatacacacactactacagtggtggtactaacatgtggaatgtgtccttgctgtcttttttggcattcagagctttgtgacccatctaaggtctttgtgacacacacacacacacacacacacacacacacacacgcacacgcacgcacgcactggtctaggcctacactgagtcaagattataaatatcactgtcttccacctccttatggaaggtcttcagtggcaataacatacatggagctgtcatctcctataacaataggaataccttctggaatacctcctgaaggatctgcctgaggcagttattcttttttttagtaagtggaaggagtacactctaaaataaagattaaaatgtatagcgtagtaaatacataaaccagtaatgtagtcatttattatcaagtattaagttctatatatatgtaattgtatatgctgtacttctatgtgactggcagcacagtaggtttgtttataccagcatcactacagataggtaagtaatgcattgcactgttttgattgctatgacgtcactgggcaataggaatttttcctcttcattataatcttaagtgatcatcatcatttatacagctgtcgaccaaaatgtcattacaggtgcatgagtttaaatgttccagaaaggttttattcagtattaatctttttatggaatctgaatataattactgtgttggatttgacttcagaaatgactagtaatgttaaaaaattgctatgattacccattttttagtttctggctagtgttttttggaatggatgcttaggattcctgcctaatgcagtgatttcagggccaaaagatgcttttggaaggattgcttgtaatcaagctaaaagagatgaagaagagcttgaggatttctgtaaggtgaatcaggatgaggggaagaagcctggaaataaacaagataaagcagagcataaattcagctcattagaaaccaaagataaggaccactcacttactttttttttttttttttttttttgagacagagtcttgctctgttgcccaggctggagtgcagtggtgcgatcccagctcactgcaacctctgccttccaggttcaagcgatcctcctgcctcagcccccctattagctgggattacaggcacatgccaccatgtccagctagtttttgtatttttagtagagacaaggttttgccatattggccaggctggtctcgaactcctgacctcaggtgatccacctgccttggcctaccaaagtgctgggattacaggcatgaaccactgcacctggcccactgacttaaattttcctctttagtggcataagtagcattcttagtttttccaggaactttctttttgactcttgggtgtaaataaatggttttgtttaccattcattgcatttgtagtcttcagattaacatataattttctgacataattgttaagatattgacaaatttaggacatcatggcaaaaaatgctcttattcccagtgtcacaagtatcagactttcagtgcctgataaattcttctggaaacataggcctaggaaaaacctctggttctaattggttgttacactgacaactgaagtcttaaatgttactttatcctttgccagaatctccatgttgaatttgaggtattgattccatttgccccatttgggggttcgctctgaaaactatcagttggaagtaaattatgataaatgaagcatctgatggggaagccccaaaatgttgttaatgtgaagagtttgtgtgataatttgcaaaggaactgattatctatgtgatggatcctgggagtagagagagaagtaggtaggtttgagctaccttgctaaaagacagttgagcttgtcagcagttttggttgttgtttcagcctgtccaaagccatatctgattgttttaaggatacagttgtccaaaggatttacttgatgtggtttcccagttttctcttctccaatttttctgaccccaggctccattcttcccagaacatggttttacttttttttgtattttctgtttcttggcagcattgatatttcgcctagaaggaaatatccaagaatccctagaactcttccagacatgtgcagttcttagtcctcagagtgctgataacctcaagcaggtggccagatctttgtgagtattggcaacctggaggccctagggcactcacagagaacagtgtaaaatgcattcctaggtccagcctgctgctggcagctgcatcagcctgatacacaagtgggggaatggtttaataggtacagtgggattcactctgaagagcatggattaagtttgaaatttgagaaaatgagataactagtgttaaggaactaagcattttaaacactgtgcattctagtttgatgggggaccaatattgtttatcatgtaaatagagacaccttgtaccctaagtcttctaaacttattggcaatccttggaatttttctcatctactcttctaacacttagtatttgtcacacagtaagtttttagtaaggacagagagttcctgacttctgatggttcaacttacataatttttcaactttacaatgatgtaaaattgttatgtattcagtagaaactgtacttcaagtatccatacagccattccgtttttcattttcagtatagtattcagtaaattacatgagatattcagcattttattataaagttggcattgtgttagatggttttgcctaactgtcagcaaatgtagttaagaaagtggagataggaactccatggaacagagtaagtgttctgagcatgcttaagataggctaggctatctatgatgtctggtagagtagatgtattacatgcatttttgaattacagtgttttcaatttacaatgggtttactgggatgtaaccccatcataagttgaggagcatctctatttgttgagtgaatgtcctaaagattcctagatggaaagaatctcaagtgtttataaactactaggtactcccttttcagtcctttgttccatggagttcctatctcccctttcttagccacattgccattcatacctgtgttgtttttgcatagagcttggttttccctgtttctctctaaactcaggatccaatatcaaggaaagagacttagtcttggaaggaaaggatgtgtccctaatgggtgatgataaatgatggtagttactgcttaacatggtatatcattaggcttatttcttttttggtctgcatttatagtacattgtagaagaaaaattccacaagactctcactaaaattggtatagaatgagaccaaggccttggaacagctgccagtgcaatccctactaagagagcttctgctgttagtgtatagcagcttcactgaccaaaccagcacaaccacctcatagagaaaaggcttctagaattctctgctggatgaaatatgattaaaatgtgggactagtagggttagtcttctaagaattttgaggtaataattatggaaaatatatcttttacagatttcttttgggaaaacataaagctgccattgaagtatataatgaagcagctaaactcaaccagaaagattgggtaagtagagaactttcagttctttcttattagtaaacttgctaatggttccatttatcatctggctgtcttatttctgaattcttacattccaaaaatgtcttgattttaacctcatacttaattcatgatttgtataagtataggatcaaaaaccatgtttcctcataactttgcaggcattgctgcatgattttctagcagtttgctgacgagcagtctcttaccagtctgattcttgttgatgacccctagaagctttgggtatttttttcgtcattggaattccacagtatcagcaataggcatctagttgtgtttcatgtctttttcccgtccccatctgtgtgacattcaattgactctttcattctgaagacccttgcctttctttgggtcagggcctttgagtagttctttatttttcccctccccttctctttgtgtcaattgaggattgtgtgtaaatgcaacagaaaatttgactaaacattggctttacaaattcgtttttgtttttttttttaattctcatgaaacaagatgtccaggtaagtagttgctggcattgatttggtggtcctaggatgtcaagactgagagtttttcctcatggttacaagaagactgctgcatccagcatcatatctgcattctagggaggcagaaagagaaagcaacaaggagaaaaggacagagcctatactgggaaagcacaactttcccagaagtcccccacagacttccacttatgtcatatcagctccccttctataaggaaggctggttaaatgtcgtttttaatctggtcacactgccactctaaacaaaattagggttcttttagtaaggaaaaagagaagagtaggtagcaggtaggcaagtagataactagcagcatctgccacactgttttccattctctatgagagatgttctctaactattctctacaactcttaacttgcctctcattttctacctctgtgtccttttctttgtgtgtggtgcgggggggtacagaggctcactctgttgcccaggctggagtgcagtggcgtgatctcggctcactgcaacctctttcttccaggttcaagtgattctcctgtctcagcctcctgagtagctgggattacaggcgcctgccaccatgcccggctaatttttgtatttttggtagagacggggtttcaccatgttggctaggctggtctccaactcctgacctcaggtgattcacctgccttgtcctcccaaagtgttgggattataggtgtgagacaccacgcctgaccctccttgtcattttattatatgttcaggacatgtattcagtcttatcttccatatcatcatttttgtttttagctatttgtattctgttatataccctatccatccaatattttttatttcatttccttttattgtatttttaatttccaaaaatcttgtcttttcttcaatgtctctgattcttgaagttcttttctgcttctcagaattatctttttcttcctctctgcattttggttcttctattttatgctgttggtatttttcaagtatttggtgattctcagagagacattcatatctgtgagtgaagaactagatttattagtacagagaattagcatggatttcctttgcagttcttacggggcactattatttttgaagtgtgttcaatttgttagtcgcttttcttctgtacatcggaagattgagttgagtctttatgccatggagtatgttatagctaacagccagagtgaaactacagatgaagaaaaattcatgtacttttcattcagtcggtttttcaaaaaatgagtatgtctgctatatgccaagcactgatctatgccctggagatgcaaagatggactgttggattataagatactcaactagaataggaaatgaaggaagaagagcaaggtttggaagaaggtgatggtaagaaatcagagttaaatcctgtctttcagaggattttggatatgataagttttaggttctgaggggatatctaaattgagatgtgtccagtaggattggatatagaaatctgaaactcaagtgttttggagtagagatgtgaattctggagtcagcaacataaaggtggtaattgaaaccattagattggttgacattaccctgcaatgagctgaggatgggaccctggaaaaaaagagttttttactttttttttgtctgtttgagacggcacaggaaaagttactgctttaatgcagggaggaagccctgcattctctatgggggccaggatcatgggggtggccagtgccacaaatggtcaccatacaggccagggaggagccagggcccaccaataatccctggaacatccctggatgctagcagttttttactttctaaatttttttttttttttttaagagacaaggttgcctaggctggagtatagtggggtgatcatagcttactgtaacctccaactcctgggctcaagtgatcctcctgcctctgcctcctgagtagctggggctacaggtgcaagccaccatgcctggctaaatttattttgtggaaatgaggtctcatgttacccaggctggtctcaagctcctgtcctcaagtgatcctcctgctttagcttcccagagtgctgggattacaggtgtgagccatcaaaaagcaattttgaaggactgagcagaagaagagaacccatagagggagatagggaagaggtaaagcaggagagctcagggtcacagggggaatggaacgtatttcttaatctatccagttggttgaaagagctcatttggtattactgactcacttgggataaccatcccattgttactagtagatgtgatcattcacaaaacagccattctttttttttttttttgttgagacagagtctcattctgtcacctaggctagagtgcagtggctcaatcttggctcactgcaacctctgcctcctgggttcaagcgattctcctcccccagcctcctgagtagctgggatttacaggcacccgccaccatgcccagctaatttttgtatttttagtagagatgaggtttcaccatgttggtcaggctggtctcgagctcctgacgttgtgatccgcccaccttggcctcccaaagtgctgagactacaggtgtgagccaccaccttttttttttttaactttaaaatttttctttaaaattttccccttcatggcatttttattttctttttagaatattttaatgattttgaattttacttttattaatagcccttacctaccctacatatttcataagtacctgtagaaaaccttatagtagctggagcatggtggctcatacctgtaataccagcactttaaaaggatgctgagtggggaggatcacttgagcccaggagtctgagaccagcctgggcaacatagagacccagtttctaggaaaaaaaaataaaaattagtggtcgtgtgcacctgtagtcctagctattctagaggctgaggtaggaggatcacgttagcccaggaggttgaggctgcagtgatgcggtgaactgtgattgtgtcactgcacttcagcatggaaagcagagcaagaccctgtctcaaaaaaaaaaaaaaaaaagaaacaaccttgtagccctactttcttggactcatcagggtattccacagtcttgctgcaacaggggaatagtaattcctcctgccattatcttagttgacttttggaacagttctgttaagtagggagaatttcccccattgacaagtgaggaagctaaggctttggaagatggaagttgctacagtgaggtagttgctgagccagaactggaattcagacctgtgatctaggatgatctaagattcctcgtcttaagactgtgatcttttccactgtaccaactgcctttgcaggatgtctgctgggttcccttacctcctgaaagataggatttgactctgatttgttctgttgccctttccaaatttcttttgcagttagtttgttaaaggtatattgctgccttctcaactatctatgtcaaagattttaaaaggtcagaggttagccttcaggacatctatttacttacctaccttaacaattcctactgtagagcaggacatttaaaggacaagaaaggctttatttctgccttgtctctctccatgcatgcattcttatagcatgacaaagttggcagtatacaagttttggaagcaggcctgagttcaaatcccaatgttctataatatggacatgatttgtgattgaataaaaaaaatttttaaatgtgcggcatttgtgagataattggaaattttaacgtaattgaatatctaatatcaagcagtcactactttttttcgagtgtgacgatgtgggtagtttaagaaaaaggccttatcttttagaaataaatacggaaacatttgtggataaaacgttgggctgttatttgcttacaaaagttgtgggagtagatggggtgtggattggatggttgttgggacaggatgattagtacctaattctgtctgcacttacgtatgattgaaattctccctaggatgtagaactaaaaaagaaaaaaaaaatcccaatactctctgtcttaagttaggtaatctactcaacctctctgagcttcaatttccttatctgtaaaattggaaagattataactatgttgcaggtttgctgaaaattaaagtaacatatatgaaaacatctggcataaagcctgatgttagtaggtgctcaaccaatggttgctgttttgttgtttttactatttttggagacttggaaaacattaaatcagttgttatctctgagcctgggggtccatgtttcctcagacagggacacatctccactactaatagggtagttcttactatgtttcccaagagcattttccttacccttgctttctccttttccaaagctaccttaaataaagggaggtttattataaaggaatttgagagtccataaaacagtatcaagagatgcaggttggtcttttagtgaagcagaactggaacgcttcagcatccaaggtagctactctgccttttctgcttcatcttttctttctgtagatcaaaggttggcaaactttttttgtaaagggccagttaataaatattttaatttgtatagcttcatacagactctgttgcaacgacttaactctgcagttctaatgcaaaagagccatacaaaaacaatagttgtgtctgtgttccaatgaatctgtacttataaaaaagggcagggaatggatttggcccatggaccatagttttcccatgtcagctctagacttctgcagatggctccaattacatgtattccatcacagcagactccaggtggcgctgtcagtcctcaagttcacatcacctagtaaatttagtacttgtaactaactagctctcttccaattccagattcctagggaaaggacttcagttgtgtcaggtgtcactatccaactgtgttgccttaagggcggaaatgtgtggctagcagccctctcagcaggggctgtgggtagtctctcctgagaagaaggagcaaagggtatgggtgatgggcaactcttaaagaaaaaaggtatggggatgggctgggtatgtgccccagggttccccatagatccaggaagatcacctgtttattctgcttttatttcttataatctgtatttttttatgttgaggaacttatttttaacaattaatttgagtatgaactctaataaaaagctgactgtaatgcatagtttaaagtttaaaccttgccgagcaataacaatctctagatgtctgttgtttcactctaatacttactgtggaattacacctgagttgttttccttcttttttatgagcctaggagatcagccataacctaggagtttgctacatatacctgaagcagttcaacaaggtaatttatagaagtggtgatagatttcactgagggtgcacttgttgcagaagttgttacattgctcatttggtattatccctagtgcttgcagaggtttttggaactgaaaattgaaagtacctttatacatttttttctgttttaattctcacttgtcattattcatctgttgttttctgcttgtaataagaacatggaaagttctagaaatatgagggaatggcagtttttctcctttcttctttttctctacctccagttaaatttcccagtttagaaacagatgcttaataaaacatacatatcaaaaagtggacccttaagtcttaaaggtgtgatcatgaccatgtgagctatctccatgccctgacggcaacttagtttttagggtcattgaaaataaattttaaattttaagtggatctgatttctgagttttcagttttaattttatagttattttccatgatgagaaattatatttcactgtgattaagctatagactcctatatcagagaagacaagttgagcttacctcaaatttggtactcaggtaagaaaaagtatatatcataattgaggagtagacaaaattactgagagctctaaaacttagtgatgagagcgttgggtagtttccttcatagagctcacagttagtgattgtgaagttttattctcctttctccgatgccaccaggactgagaatctgaattggttagtacccatttgacaatgtttagtttgtgtcaatttgcagactggtgtaactagtatcccacactggtgtgaaaaaaaatatgcacattagcagttggggtgtaaaagtaacttttctcctgagataacaatatatatacataaaatacatttagtgggccccttaggttttgtagatggatctatagttttatatacttggttaggagatttttctcttcagagacaatttcaaacaggcacatttctattcacaggattattctgagtcaggggaaaagaaggatttgtctttggttggatctgtgctgagaagaaatatatttagattttactgtacagctaacaggctaggcaaatacaatacctggcatttatataaatgcttgttgaatctgtgaatgactaaacaaagcccttttgtttactaggagaaggtaagctcctccagagcaaggagttggttttataaactcaaatatatttagcatctagaacagcaagcagttgggtgaataaatgagaacaatctatttattcatttatcatcacattgatggggaaacctggcccaccatagggaaggttgtgcacttggtcagtgttacagctgggatttagtttagtgtagtactctacactgtactatgatggcccttttgacttatgaagtatgagtcataggtgtgaatatcaggcagaaaacattcagaaagattaatcgtcttgtataaattcttccaagtggctccagaagcagatatcccatgttgccagctgtcttttcaacaaggacagttttggtatgttttggtctttgggtagtgggggctgtttgctgaaatgtgatgttcctatgtcaatacagcagaaagtgtctttacattagccatataaaggtatagttcgttcagtggtagtgatttggttttctttattttgttaaacttgtcaggcacaagaccagttgcacaatgccctgaatcttaataggcacgatctgacttatataatgctggggaagatccacttgctggagggagacttggacaaggccattgaagtctacaagaaagcagtggagtaagtgtatctgtttcctttaaaacagtgagaaactaaaaaaattgagtggatatgtgaactcccaagcctaaaagagtgaatatgtttgattaattacttactgtatgagttaaaggttaagctgaagtttaagagctcccagtagcttcaataaggtagactgtgtttctttcttacctataaggatgactgctgctttaggttagctgggcagctctattctacaaggtcagccagggatccaggtttcttccttattaactcaccattccttaggctgttgtctttacctgcatggttgatgctgaatgtaacatccacatccaggctgtggtggaaggagatggtttgggaagctaagcatggaataagcatctggctatatatatatatatatatagagagagagagagagagagagagagacatgatcttactccatcactcaggctggagtgcagtggagaacacagctcactgcagcctcaacctcttgggctaaagcaatcttcctacctcagcctcccaagtagttgggactacaggcatgtgccaccatgcccagctaatttaaaaaaaaaaactgtttttgtgttgacagggtcttgctgtgttgcccaggctggtcttaaacttctgggctcaagcgatcctcctgcctcagccttccaaagtgctggaattacaggtgtgagccactgcacctggccttggtaataagttttaaatgacccagaaattgcacacatcgttcctgcttacattccatggttcaaaactacatgatagttacaagggaagtgggcagacatgcactcaagaagaaggaaataacagatttaagagttggccgacagtctgccattttggtatcatatgttaataacagatcttctgttttcagagatattattagggacagaaatctcctgattcagtaaaaaacaaaacaaaacaaaacaaaacatttggccttattagcatgagaccagtatcttttttcccccttccccattttcccttccccttccccgttttccccttccctttccccgttttcccttcccccttttctcttccccctttccctttcccccttcccccttcccccttcctcttccccttcctccttccctcttcccccatcccccttcccccatccccctttccccatccccctttccccatccccctttccccatccccctttccccatccccctttccccatccccctttccccatccccctttccccatcccccttccccctttccccttccccctttccccttcctcctttcccttccccctttccccttttcccatctcccttcccctttcccctccctctctcccttccttcctttttctctcttttctttccatcctttccctccctcccattcccatctttctttgtttctttcttttcttcctttcttccttcctttctttccttcctttcatttatttcaacagtctcgctctgtcgcccaggggtgagtgcagtggcgcgatctcgcctcactgcaacctctgcctcctgggttcaagcgattctcatgcctcagcctcctgagtagctgggactgcacgagcacgccaccacccctggctaatgtttgtatttttagcagagacagggtttcaccatgttggtcaggctggtctcgaattcctggcctcaagtgatctgcttgccttggtctcccatagtgctgggattgcaggcgtgaaccactgcgcccagccttgtgttgttacttttaaatgggatagctgtagcaaaatgccttgtctcatttgtttggtcccttaatagaatgtctggtctgtggttcaaggcttattattcctaataattagattctgaactaaacttagatttctattaatttgttaatcatctttgtcttctaccatggtagtaaattttctggttatatcagtcacagcactgctttctgaattttcttcaaccatattttgtgtctaaaacagaaaaatcccttggtttgttaagctacagaacagacttttgtcatcaagaggctgtatatttgggcaagtagtaaggagccatgtaacatgttcagtgcctctgtggtgctaggtagtagccctgatccctgacccctgccttctagaggttagctctttgagaatagcatacataaatcccaaggggaacattcttccagtaactgatcaaggactttggtcactaaatttcctaagggagaaatgtggacagctaaaatctgaagccttactgagaagatagagaccattgttcatgacctacagctttgaagagagtagtcatgttgtagtggggaagccaatattgctagaattacagaagttacctggctttggggagggaagtgatcaaagtggatgtttattatggcagaaagtgaaaggcggattcccagttgaattgagaaagctctgtttggtcagctcaggcctcccctggctggggctttgcatcttctggttcaggtcttcctataggtaaccagtgccctatatcattccttagaagcagaagacattgttcatagccctttggtgttttactgttgaaactgtctgatgatcctatggtcagatcatctcaactcagtgttgccttggttttgtgacaaagacaaatactagtgagggattgagcaggcaatccctgatgtgagtattttacttacatcagtgtttactcccaaaggtcagtagcaccttctttcctaggattggtatgtatcttccttcttttgtttagtttggctacttggtatagctctttgtttaagtggagagaacagcattaggggccttgggatcctaaattacatagaaaattatgctgcctggcattgtgagcacaatgaggatagaaaaaaaattccacaagagaggactggtgaaactgtgtgtgttctaggctgacttggtttataaagcattgttctttaattttatcagtgtgaccaagacagtcatgcaaaacattctataggttctttcttaggacttttaccctaagaaaggaatctgaattctaagcctcatttttcttgctgagcagttctccttatcaccagggttgagatgacctacttttgatggcaattcccaaattgccttcaggtatttccacggggaggaagaggctcagtggggtctgtcaagtattgcacgagggcatattactgtgcatgtgtcttcgtgtttctcatctacatcttgtttccctctgagcatctctatgttgcaggttctcaccagaaaatacagagcttcttacaactttaggattactctacttacaggtaatgaaaactctgtactcattcatgcactgatgttagaaatggttttgggtttgtgtgtatggtggttttcctgcattctgatatttattttattaaaggtcatataaagttcatgaactacactctctctattcgatactctttgctaaaggaattaattttctgcatttaaattggaagcaattctattttagcctagtgcaattataattcttatctaggctgggtgtggtctcatgcctgtaatcccagcaatttgggaggctgaggctggtggatcacttgagctcaggagttggagaccagcctgggtaacatagtgagaccctgtctctacaaaaaataaaaaaattagccaggcatggtggcatgcttctgtagtcccagctacttgggaggctgtgatgggaagattgcttgaactcggaaggcagaggttgcagtgagctgagattgagtcactgcactccatcctgggtgacagagccagatcctgtctcagaaaaaaaaaaaaattcttatgctatccaggaaagagcatatatgagaaataactctggtcttggaggctgttattttgttgtgaggagagaaacagatacaagtgagcacttagggctttggggcaaagccatttcttttgatctttcttcccagccagagtcttattggaaagagagaaggcaaagtatacttttatctagaataagaagttttctgtcccctcaacattcctgaatgtgaatgggattcttttagctccattgattctctggctgaggacccagggcccaggtatccaaggggcttttccctcttccccaatatacacatttgccaagttccttggtcagctgattctgcctccagccctgcctctgtggtggcctttatgtctatttcatttttctttaaaaggaatcaggagcttaaccctgggtcttcctgggctttggcttgggaggttggctccacgggagatgaggatacccagctcatttcctgcaaagaggcattaatgtggaacagtactagtgtggcagagatggttcttatcaaatagatactttgaccttatcaggtgacaaattaacaaaaatagaaggaaaaccatgactggggatttttagttttctttctttattatctggtaactgtagctgctttttttttttttttttttttttttaaagtcaagagaactcaaaaaagccagagcatttctgttctgggtgaggttggccagactgtttttttttttttttttttggagacggagtttcactctttttgcctaggctagagtgcaatggcgtgatctcggctcactgcaacctctgcctcctgggttcaagcgattctcctgcctcagcctcccaagtagctgggattacaggcatgtgccaccatgcctgggtaattttgtatttttagtagagatggggtttctccatgttggtcaggctggtctcgaactcctgacctcaggtgatccacccaccttagcctcccaaagtgctgggattataggcattagccaccacgcctggtctggccagactcttttaactgccgtctccttgctgatgtaaattgtcttgtttgctttttttccaagctcggcatttaccagaaggcatttgaacatcttggcaatgcactgacttatgaccctaccaactacaaggtattacaggctgtgaaggctctggccttcatatagacggtcccactgctcctagaggtgatctgaccctggaaagcaaaggaatagcttcttaaatttggatacctgagaaatagaaaaaatataaataaaaggtggctcttcttatttgaaaatagtgtcaagtatgctctacttatcttctaaaagtgcacatttgttataatagacgtgtaacccctgcagaaggcagatcatagtgctagtaaagcttatgtgttacttaggaaattagcaatgcctccacaactattgtcaaaaataaatctgcggcccggcgcggtggctcacgcctgtaatcccagcactttgggaggctgaggtgggcagatcacgaggtcaggagatcgagaccatcctggctaacacagtgaaaccccgtctctactaaaaatacaaaaaaattagccgggcgtggtggcgggcgcctgtagtcccagctcctcgggaggctgaggcaggagaatggcgtgaacccgggaggcagagcttgcagtgagctgagatcacgcgccactgcactccagcctgggtgacagagcgagactctgtctcaaaaaaaaaaaaaataaaaaataaaaaaaataaatctgctgggcatggtggcttatgcctgtaatcccagcactttggaatgctgaggcaggaggatcacttgaggccaggagttcaagaccaggctgggccacatagtgagacccccatttctacaaaaaaaattatccaggcatggtggcacacacctgtagtcctagccactcggaaggtggaagagggaagatcacttgagcccaggagtttgagtctacagtgggctatgatggcaccactatactccagcctgggtgacagagaccctgtctctaaaaagaaacaataattatgttgaaatgacttctagagtcctaatgatttgatactacaactttttttctagatgtgactttgggaatgagaaggaatagcatcaaatggatgaacatcattgaggagatgcagcaagacaagctgtttattaaaggatacaaactgaattctgatttaggaagtaacattagactgtcagctcccaccttgatacctttccttagagaaatgaaagggctgggctgatgaagcctaaagctgactcgccctctgttctacggtagaaagaaatttaccttaagtagccacgtacaggtgtatttcaggtatctagaacacttggtataccaaataggggctgcagagaacagattaaaggaagtttttacttaaagggctctggtattcattctgaaatactgactttcctggctagaagtaggaaacagatgggtaaagcaagtaacattttatctttttttttttttttttttttttttttttttgtgctgtgccagagagccacagtgtagagtgcaaggacattcctcaggaacatttgtcccaataggttggatatatttatgtccctggaagaaattttccagtcccatctatgctgatgggcctgctgagtatagactcaggaaagctgccccactgctacagccttttgggaatgactgaatgactttctctgtgccatgttttcaggccatcttggcagcaggcagcatgatgcagacccacggggactttgatgttgccctcaccaaatacagagttgtggcttgtgctgttccagaaagtcctccactctggaataacattggaatgtgtttctttggcaagaagaaatatgtggcggtgagtgtcccctcatgttctttgtttgtatttctacatgtggttattgggtctgtttagcttgcccttctcattgagtgccccttctctctcataggccatcagctgcctgaaacgagccaactacttggcaccctttgattggaagattctgtataatttgggccttgtccatttgaccatgcagcagtatgcatcagcttttcattttctcagtgcggccatcaacttccagccaaagatgggggagctctacatgctcttggcaggtaagaaacatttatgtggaaaactctctctgccatctgtaatgagggaaaaatggattagaatcatagaagatcagtggctgtctcataggagccattcccttagagatcctgtaggaatctggattactgtcctggagcttgaagaaatagaaaaagatgacaaaggaacttggttgtttctaacttgggggagtttgactcagagaccaacaggttaaataaagatcatccctagttcaccttttaccagttttttcctcttgccttgacaattcatttatgtatatattgagtccaactaagttccagacagcaagtgttaagagcttgggttttaggtagggtcctgcctctactacttattatatgtacctagggctgatgtgaggattgcatgattaagctctcaattaataatactggttttgttgaaatactgatttttgaaaactgttggttttactgtggttatataattggtctattattatcaatattgttgttactataattggcccctaggtgatacttccaagtcaagctaccttatgttgaaacccttatctcttctgagcatgttatatagaatgccattctcttcctgaaactccattttatgccatgcaaatactaaaattgatcataaaaataagttaaaattaatcaaacactttaacaattatgcacaaccattttaaagtactgactagtctttctaggaatttttttctccatatacatttacttactaaatgtaagacccaaagcagatttccatgtcctcatttggcagtcgtcttccagtggctttttgttcattactgtgggttcttatttaaaagagaaagcttgcaaaagcaattgtggttatttgagggttgcctgaatacaaagataactttaaaaaaaaaacataggttttattattattcagatatggtatgggcaacagatcagaagacatctgccactggaaagatagtctgttacaattcctgagaaggagggcatgctacaccgtgcagggccacatggggaagcaccaggtcaatcaggaggtagagggagcaaggggtaaatgtgggcacaattctttattgtagttttcatgggtagaaatgccctccccggggcaagaccgggaaagcaggttaaccaggttggggattggccagtttgaataatttcagtgggctctgggctatagggctgtctctaggtgtctggtacctgaccctcgggtgactaggactagggaatattggcccagtgtcagggcccagtaaaggaggcagttaagaatatgaacactgggttggtcggtctgcatacagaaggtactcttgtaggggttatatctaggaattagctgactgtgggagggacagtctccccagggtcagtaaggccccagatgtcaaaacatcagaataaaaaggctaaagtggggtgtgatggtacatacctgtagtgctggctacttgggaggctaaggcaggaagtttgcttaagcccaggagttgggagtacagcctgggcaacacagtgagactccattcctctctctttttttaaaaattttattttaggttcaggggtacatgtgcatcctgttacacaggcacgtgtgtcatggggattagttgtacagattatttcatcacccaggtactaagcctagtacccaatagttatttttttctggccctccccctcctccagtaagctccagtgtctgtttccctctgtgtctccatgtgttctcatcatttagctcttatagtgagaacatgcaggatttggttttctatcctttattaatttgctaaggatggtggcctccagctccatctatgttgctgcaaaggacacgatcttgttcttttgtatggctgtgtcgtattccatggtgtacatttacattttgtttatccagtctaccattgatgggcatttaggttgatttcacatctttgctattgtgaatagtgctgcattgaacacacacatgcatgtgtctttatggcagaacgatttacattcctttgggcatatacccagtaatgggattgctgggtcgaagggtagttgtatttttagctctttggggaattgccagattgctttccacaatggttgaactaatttacactcccatcaacagtgtataagcattcccttttctctgcagcctcaccaggatgttatattttgagtttttaataatagccattttgactggtgtgagatggttatctcactgtggtttcaatttgcatttctctaatcagtgatagagtttttcatatgcttgttggctgcatacatgacttcttttgaagtgtctgtttatgtcctttgcccattttaatgggattgtattcttcttgtaaatttgcttaagttccttatagatcctggatattagacctgcatggtttgcaaatattttctcccattttgtacattgtctgtttactgtgttgatagtttctttagatagctgggttctaatggaacacagaaatgtaaacagccataatgtaagagataacagcgatgctaactttacaaagtagagatggcattcaaactggatcctgaacaacaagctaaaatggaatagcacagaatggctgaggagccactgtgaagaaaggcatgcagccatgaaactgcagtgtcccttgctgttagtgggggttagtgttagagaatatgatgggagatgaatcaggaaagatattctggggtcagattatggaggtcatgcgtacagtgcaaggactttatcttagaggccatgtttgtccagctgtcttcctagatctcctcttaggtgcctggtaggagtgagtgcatagctggtggggaggtggaatgggcagggcttccagagcagctgtttttgttttatatattaggtgtcaaggaaatactgattttaaaaagtggggggagtgttttactgctaaatgaaagtgtaaagatcatggttatagatgtggggggccagtgaggattcctaagtaggatggtaatgtggtcagatttgtaaggcagtgagatacctggcagcgctgtggaaggtggaatggaggcaggtggggactttgacactggggaataaatggaaagcctaaaactacttgggcctgaacaagggcagtgtcagaaaagaaactgcaaaaaaaggatgcatagaacctggcaactgattgactgtagaagagatggttgaagatagcaccaggtatctaagctgacttagtaaactctggtgccatgagctgacagggtgaagtttactttgggggtagtctttaatactccttttgtcttctaagctgagctctccagctgcagtgctttctttgttgcagtggctctgaccaatctggaagatatagaaaatgccaagagagcctacgcagaagcagtccacctggataagtatgcactttgttgagaatggtactggcgggggttggactctccaaagccatgaggtggtgccatacatagcattggtgctgcctgtgtcagcccagctgttcctctatggcattagtacatagcagacctcagtgtggagggatgtgtctcctaagtatgtggtggctcagcaggaattgacactctgagaaaatgtttccagtcctaaactgagtaatcaggaggctagagaatgtcagaactggcagtgggcttgggttgctgatagctatgggctagctggaatatcagatgggactctgggctgtttaattcaagataaaacttgactcttccaggatttactccgctggcatcttctagacagcagggtagagatccctttttcaaccctggcctaggtagtctctgttgagggctgagatgccagatttggtcccaataccagctttgcttgttaggccattaactccttgattcttctccacaggtctgcttagcacgtatgtacctaccttgctgcataatggagaaatctctacttaaccagttttgttttgtttttgtgtaatgagaaggatctctaaatgaccatttgttgcagagcccccagctccatagaatctctgtctgccacaggtgtaaccctttagtaaacctgaactatgctgtgctgctgtacaaccagggcgagaagaagaacgccctggcccaatatcaggagatggagaagaaagtcagcctactcaaggacaatagctctctggaatttgactctgaggtatgtcttttattagctcccaagagtcataagtaagctctcaggagacttttaaaaatcaagcccagatcatccaaatccaaggtattacacgttcatggctgttctggctttgatgttcctagcagcatgagttcatcaattaataacagcctgagaaaaactttcctagaataataataaaaggaaattcaggcttactgagttgttattgctaattcaactcatcaaagttgaggtctgtgtctgtctgtagcttccttctatttcactttttttttttttttttttttgagacggaatctcgctctgttgcccaggctggagtgcaatggcgcaatctcagttcactgcaacctccgcctcctgggttcaagcaattctcctgcctcagccttccaagtagctgggactacaggcgcgtgccaccacgcccagctaatttttgtatttttagtagagacggggtttcaccatgttggccaggatggtcttgatctcttgacctcgtgatccacgtgcccagccctatttcacttgttgtaggaaatgcactgtttggcccggtaatgcaccaggcttgaattgttgggttttgagatcctatgtgaaccaccatgccatccagtaaaggcaatctgtaatctctactgtttgataagtacttcctgcctcaactgctagtacgaccagacactatttcagctaaaaccccagctcgaagaccaaagaagtgggttggcttgtctctgacagtcacgcttttgattcttttacttcctttgtggacacaagatggtggagatggctcagaagttgggagctgctctccaggttggggaggcactggtctggaccaaaccagttaaagatcccaaatcaaagcaccagaccacttcaaccagcaaacctgccagtttccagcagcctctgggctctaatcaagctctaggacaggcaatgtcttcagcagctgcatacaggacgctcccctcaggtaggaccatacagagctccatgaagacctggcaggtacaagccacatgtgtctgtcagcagagattatagctttcagtgaggttctcttcagactcatatgtccaacgtagtattggccacaaggggagaaaaaaaacacagggtggctaaattggcacttgtttccttaaggcgagctatgtagtaggtaacagctactcacagacttagttggatggtctatacactggtctttccaattttagcaatatgttattaagtatatcctgttatgcaatgtttaatttttactgctttatcagaagttgacacgtaaatatttttcagtgactcattgaaggcaaacttgactgttgctttatttctcagttatagtcttcccttatagttaatgggtcagtcccactggttccagaaaatatggggtttcctcttgaactctaacagcaaaaaagaatgatttcttctgaaattgtggaacatgaggattcaagtttttattttgttactaggtgctggaggaacatcccagttcacaaagcccccatctcttcctctggagccagagcctgcggtggaatcaagtccaactgaaacatcagaacaaataagagagaaataagaatagaatgaatgaccccaaaatagggttttcttgggcgaggatgtgctggattaggaaaggtgacatgacacaggcagagcagagtggcacccaccacagaatacagtgtgtgttattacgaggagccagcagttgagcctaaggtccttctacctacctggtattggcatttgaggtcggaaaccctctactgccccataagccaggaaaagtgaaaagagaacacagttcctt

SEQ ID NO: 15488 - DNA, 45375 bp, Homo sapiens
gagagagtcgcgacggtgagcgccgagattctctttagttgcccggccgcagggcaaggcaagctggcgggtggcttttgtcccatgcagcggttcctggagagaggcggagctgggtgccgagcgtctcagggtgggcggggcgacacggtcccctttttactgtcccgggaactggtcgcctggggcaagtctggatacttagcagcacaggtcctgttctaggactgtagtccctcttggggtgcgctggacggagaagggagacttttcaccagtaatggctcttaccgtagtgccatctttttctgtctcgggggtttggaaggtaatgactagcacttgtgtagacagttcctgttaatcccgtgaattgggaatttaacatgcctggaagcttgcagcgtcactgccttctgccagtggagcgggactgtgttttttctgtggtgattaagtttaggaaagtacggttttggaattcatctgaaggctgagttgggcgttcactccacagaactgctaatatagaggaacccgatgaattcaggatgacctagtcgctattttttgaggcatatatctataattggatctaatttcggtaaagtgccaagtgtgaagctttgtttaccttgctttagtgttgggtttgaaagcctgttctgtccatttgttagaatgattttaggtattcggaatttattgtctttcgaaaaacgccctggaaaacagtacaaatagcagcctttggctgttttacaacttagttttggctaagcagcaaggttagtgttattgttagagggccttttgtttgttttctactctcatttgcagagtagtcatattattctagtctaattagaaaactctgaagacagaaacttttttttttgagacggagtgtcgctgttgtcggcccgggctggagtgcaatggcgcgatctcggctcactgcaacctccgcctcccaggttccagcaattctcctgcctcagcctccggattagctgagaatacaggcgcctgccaccacgcccggccgaaacatttttattaagctaagaaatttaaaatagctaggccggacgcggtgcatcacgcctgtaatcccagcactttgggaggccgagacgggtggatcacttgaggtcatgagtttgagaccatcctggccaacatggtgaaaccccgtctctactaaaaatacaaaaattagcggggcatcgtggcgctcgcctgtaatcccaggtacctggaaggctgaggcaggagaatcgcttgaaccccggaggcggaggttgcagtgagccgagatcatgccattgcactccagcatgagcgacagagacagactccttctcaaaaaaaaagaaagaaaaaacagattttaaaataattaaataggccaggctcagtggctcacgcctgtaatcctagcaccttgggaggctgaggtgggtggatcgcctgaggtcaggagttcgagaccagcctggccaacgtagtgaaaccctgtccctactaaaaaaatacaaaaaattagctggacgtggtggcgggcgctggtaatcccagctactagggaggctgaggcaggagaatcgcttagaacccaggaggcagaggttgcagtgagccgagatcgtgccatttcactgcagcctgggcatccagagcaaaactccgtctcagaaaaaaaaaaaaagtaaatagcatggttaatgttactgggttttaaatattaaaaacataggaaagaaaatacttccactccagcctgggtgacagagcaagactccgtctcaaaaaaaaaaaaaaaaaaaaaaagaaaatacttctaagtaatcttaaagtgtaaaagataatgggtaacataacattgctacaaatatagcttatcctctagtgctcatcacaagtgtttgtgtaatagaatatgaacttgagtctgtgacggcagaattgtcatgtacatttgaatgtctaatactgttttaaagagaatagcttttgtttcgatatgacttagcaattaagcctgaagttaactgttttcattgttgtcaaatttattgctagtagtgttacgtttatagtaattttcatcttttcaagttaccaatgcatggaaatgtgaatttctgtccttttaggaagtggtattttatcttttttttttttttttttttgagacggagtctcactttgtcgccctgtctggagtgcagtggcgtgatctcagctcagtggaacctctgcctcccgggttcaagtgatttttctgcctcagcctcccgagtagctggggttacaggccctcaccaccatgcctggcttatttttgtggagatggggtttcaccacgttggccaggctggtcttgaactcctgaccttgtgatctgcacgcctcggtctcccaaagtgttgggattacaggcgtgagccatggccccctgccttattttttaatacaattaaaagaacccagtaatcctactcctagacctgtgtcccacagaaaaaagtgttaaacatgagcgtgtagtactagggcattcgttgtagtactatccgtagtggcaaaacgctggaagcaaattaaatgcccattaatagggtaattgatgacttcagatatttccatactgtggaatattatgcagtcattaaaaagaatgttacaactaattgcttttcctctcagaagcccctctctctcactagagaaagctgttctcctttctttcttctgcctattaaacctccattcctaaactcagaaagaaaaaaaaaaaaagagaatgttacgactaattgacttggagggacttccatggtgtacatttaaataaaaggtagatgtgaagtggggtatattatgtgatcttaatttcataacacaaaggaaaacatatagatccgtagataaggatatatggatatggaggagagaaaaggaaaagactcaaaactcacagaatttttgaagaaatgtatagctaaaaatctaagaaggctacagtcaaggccttgaggccagaagacaccccatcaaaactgagtaaaactagcccagtgtgggacgcagaaattctagtatgctaccaaaattacttacggattgctaccagttccttagaaggaaaactgaggactaatatttgtattttcagtatagtttagaattcttaaaaaatgagcaaacaggctgtacttggtggctcatgcctgtaatgccaggacttgtggaaactgaggtgagaggataacttgagtccagaggtttgagaccagtctgggcaacatgttggagccccatttctacaaaaaacacaaaaattagccagacgtggtggcacgcgcctgtcttcccagctactggggaggatcatctgagcctgggggaagttgaggctccagtgagccatgatcatgccactggactccagcaggggcagagtgagactttgtctgaaaaaaacaaaaaatgaatgagcaactaactctggctttcatgatttgtgcttataaatctttttatttatttatttatttatttatttatttatttatttatttattttgagacggagtcttgctctgtcgcccaggctggagcgcagtggcgcgatctcggctcactgcaacctccgcctcccgggttcacgccattctccagcctgagcctccggagtagctgggactacaggcgcctgccaccacgcccagctaattttttgtatttttagtagagacggggtttcaccgtgttagccaggatggtttcaatctcctgaccttgtgatccgcccgactcagcctcccaaagtgctgggattacaggcgagccactgtacccagcctataaattttttttataatgccctgattcccattatttgatgtatttggataaatatgtcatcctgtaaattgaaggattaaactgataagagcagaaaacagaaattagtacactagttgatctggctcagatatagtgcctatgtatcaggtgctccatgaatatttgttggatgaataaatgatcataaaactatataaaaatgaagaaataacagaataaaataatttgttctatataaatcctatgaatgagattgagtgggctaatagaatcctttccatctcaaaatgttctggaaagtcttgagtaaaagactcatcaaaaaaataattctgctttgtgcagaaagaagggttgctgacctttgaaggtgctttttgagtctttaacattctttagtagtatattccccaaagttaagaaattctagttagattttaaaaaattgagttaacatttaaaaaacagttttgttgaggtataatacacgtaccataaaatttactcaatttaagtacaaagtttgatcagttttagtaaatttatatagttgcacagctgtcatcagaggctgcttttaaaacatgtccatcactccagaagggttcctgtgtcaatggaattgctgggttatattgtttaagtatttgtttaaaaaaacagaaacaaatctgcctaacttctgcaggctatatacgagttaacatttccatgagcaatgcatgagggttgtgatttttccacatccctgtcaacacttggtttgtcagtttgtttttatttagctgttgtagtggatgggtagtgatggtgtatggtggttttaatttgtatttccttcatgaataatgatattgaagattttttatatgtttattttccacccgtatctctttggtgaaatgtctttataaatttttgtgaatttttaaatcaagatcattaaccaaatgagcccctcatttgggctcaagtgatccttccacctcaacctcccgagtagctgggaccacaggtgcaggccacgcttggctaatttttgtatattttgtagaggcggggttttgccatgttgcccaggctggtcttaaactcctgaactcaagcaattggcctgcctcacataagtattctcttttattttgaggattaatttttgttgttgtgaaatatatcctacctgtaaaagagtgcttaaaatgtcgtatgtgtgctttaaaggataatataatggaaacttgtgttcctactgcccaggttaggaaatgggttattaataactttgaaacctcctaaatgcctctctcctactgcattttccttcctccacatcagatgtagtgtttcttcaattttatattaatattttgtactttttatagttttaccatatatgtttatatatatccttaatatattagtttttaaaatttgttattaaccttcagtttattcattatttcaacactgtatagtatcttattgtagtaaagtatgtcaattaacttatccattccactagatggagatcgggattatttctggtttttagttattaaaaacaatgctgctgctgggtgcagtggcttacgcctgtaatcctagcactttgggaggccgaggctgcggatcatgaggtcaagagatcgagatcatcctggccaacatggtgcaactccgtctctactaaaaatacaaaaattagcaggatgcggtgctgcgcgcctgtagtccctgctactcgggaggctgaggcgggagaatcacttgaacccaggaggcggaggttgcagtgagccgagattgtgccactgcacttcagcttggcagagcgagacttcgtctcaaaaaaaaaaaaaaaaaaagctgctataaatatggccaagactaaggaaaggtaagtgaggtgcttagggttcacattttatggagtaagagtaagtaccttcttaaggtttataccctaggttcttcacatgcctcactttagtcctagccctgagcattattatgtaggtcttctgatgcaatatctaagagtttctctaaggtatacctagaaatagattgctaggtaatggagtaactttattacttacaggaaactatatggtggttgtaacaatttatgcttctgccaccagtcatggtggatatgaaattatgtcttaatgtgataatttacattgcaatttttttttttttttttttttttttttttgagacagagtcttgctctgtcacccaggctggagtgcagtggcgtgatcttggctcactgcaacctctgcctcctgggctcaagtgatccttccacctcagcctcccgagtagctgagaccacaggcgcaggccacacttggctaatttttgtatattctgtagaggcggggtttcgtcatgttacccaggctggtcttaaactcctgaactcaagcaatcggcctgcctcagcctaccgaagtgctgggattagaggtgtgagccaccacacctggctgtttgtttgttttgagcctgttcctcaggctggagtgcagtggtccaatcatggcttgctgcaactccgcttcctgggcttaagagatcctcccacctcagccttctgagtagctaggactaagggcacctgccactatgcctggctaatttctaaagttttttttatagaggcagagtctcgctgttttgcccaagctgttctcaaatttctaggctcgtgtgatcctcctgcctcagcctcccaaagtgctgggattataggtgtgagccaccacacctggctgatctatctgtcttaaactggagaattgcatttttttctacctcctttcttttttttaaaaaaactgaatttccatctgttacccctccctttctgctcctcttatttcatgccttggaagttatactttgccttcctttaatgagtaccaaagaaattaaaaaatacatgtttactgtaagtccaggcctaaatgttgctactacagggaccatcaaatgctttactaccatctattgccatctgcaaatgtatgccattgttgtttagttttgtagttcttaatgtattttaattaaacaccacaaattatgctttttgtttgttttattcagtcagtagatgcttagaatacttgcttattttaccaattcctttgcttattccactcctttgttctgggattatttttctttttcctaatatattttcattaaaagtttatttggtgagaatctaaaaactctcaaattctgaaagttttaaaaatttgcctttgttgttgaaaattagttttgatgggtgagagaatctagatcaggtgttagcaaacctttttttgtaaagggccagatagtaaatattgtgggctttgtgggccatagagtctctctgacaactactcagcaatgctgttgtaggacaaaagcaaccatagacattatgtaaacatgagtgtgggtatgttctcacaaattttgtttatagacactgaaatttgactcaattttcatgtgttaaaaattattattttttgaatttttttaaccatataaaaatgtaaaaatcattcgtagcttgtagaccaaataaacaggatggatttgacctgtgggccatagtttgctgacctctggtctaaattaacattcattttacttagtacctgacactggagtaattattcttatgatgtcttattgtgatattgtcttccatttttaattgttgaagagccagctgtcagtcttttttgtttttctttttcttcttcttttttttttgaaatggagttttgctcttatcgcccaagctggagtgcagtggtgtgatcttggcccactgcaacctctgccttctgggttcaagcgattttcctgcctcagcctcccaagtagctgggattacaggtgcctgccaccacacccagctaatttttgtatttttagtagagatggggcttcaccatgttggccaggctggtgttgaactcctaacctcaggtgatccacctgccttggcctcccaaagtgctgcaattacaggcatgaggcacggcgtctggcctttctttcctttttttttttttttgagacgtagtcttgctctgttgcccaggccggggggcgatggtacgatcttggctcattgcaacctctgcttcccaagttcaagccattctcctgcctcagcctcccaagtagctgggactataggcacgtgccaccatgccgagctaatttttgtatatttagtagagacggggtttcaccatgttgtccaggctggtcttgaactcctgacctcaagtgatcctctcgccttggcctctcaaataactgtcctttctttgttggtaatctggtgatatgttttcttgtttggctgcttttaagagctgcttcttgtctctggtgcagttcgctatgatgtatctaagtatgtatttattttcatttaacctggtcaggatttgttgagtatccagaaactaaggattggtgtttctcattacatctggaaaaatttgagccattatttttgcttatattgtggtatgtcataggaagttgagaaaagaaaaattcatttgatggttttctatgaggttatagtggaaaataactatctcccttttagaattgagtgctagacagtttctgtgtagatgatctcataagcttccttttatcaaacagcgatcacttttttggtttggctgctgagaagtatggcatcaagtataatactcatatgaggtgtttaagaactgagtatatttcttatgcacattttactatatactataattatacattaaaaatgcacattgtaaatattataaatatgtgttatacattgttaatagtttggatagcaaaagtatgacttgacatttgttttttaaaccatatttaaagtaactctatcacaatatggatttaatggattaattgcataattggtgagctactgattattcttgttatttggatgcttctttaagttagcaagtttatattgtggtgcttcaatatagactacttatttcatttcagagaactcaatttcctgtatctactgagtctcaaaaaccccggcagaaaaaaggtctgtatgcagtttcatggtatgtgtatgtttgcacagacagatttctcttttatttatttatttatttttttttttggaggcagagtctcactgtcacccaggctggagtgcagtagcacaatcttggctcactgcaacctttgcctctggggctcaagcaattctcctgcctcagcctcccgagtagctgggattacaggtgcacgccaccacacctggctaacttttgtgttttagtagagatgaggtttcactgtgtttgccaggctggtctcgaactcctgacctcaggtgatctgcccaccttggcctcccaaagtgttgggattacaggcgtgagccgccacgcctggccagatttctctctcttgttgattcttttatctattctatattatttcaaaatgagtgttgggaaaagaagtaatagtctaaatgttctgtcacatctagcttttatttaatagagttattagatattaggaggttggtttgacctggaaattatttaaatggggtttgattattatgtaagtgtgtactaattttctgcttctggaaaaaccactttgtgaagttccaggtatctttttgctttgttggtttctagtttaattctattgtgggtagagaacattctttatatggtttgttttatggcccacaatgtggcctgtgttggtgcatgtcccatgtacacttggaaataatgtgtattctgctcttgtaggatgtagcattctgtaaatgtcaattaggtcaagttggttgatagtgttctgtatatacttacaattacagatattcatattcttactgatgtagttactgattggaagggtgatagaagagtgttgaagtgtgcaaatgtaattgtggatttgtttctactttcagttctatcaatttttgatttgtgtattttgaagatctgttgttggatgcatatacatttaggattgtctgatttcttggtaaattgacccgtttgtctttatataatattcctcttcaatttctgataatattccttgtttgaagtctactttgcctgataatattttagttttagttatttatttagctattttagttttgctttggccagtctttgaatggtatcaacatataattttcgtagagtaaaattccctttttttagtacaaattctgagtttcgacaaatgaaactagccatgtaaccactagtagcaccataatcaagttataaaagtttaattactcccccaaaagtcacctttactttgtagtaaaccacttcttccattcccaattgcgggcagccattaatctgtttctttcttcctagttttgcctttcttggaatgccaaataaatggaatcatacattattattattttgagagagagggtctcgctctgtcacccaagctagagtgcagtggtgtgattatagctcactgcaacctgaaactcctgggttcaaatggttttccccagtagctgggtctacaggtgcatgccgccatgcctggctaatttttatgtattttttttgtagaaatgggggtctggctctgttgcccaggctggttttgaactcctggcttcaagtgatactccatcttcggcctcctgaagtactggcattacaggcatgagctattgcacctgggttatgtaaatttttcagtggcttttaaacctcatataatgtttgtttgttggtttgtttttgaggcggaggctcgctctgtcacccaggctggagtgcagtggtgcagtctcagctcactgcaacctccacctcctgggttcaagtgattctgctgtctcagcctcccaagtagctgggattatcggcatgaaccaccatgcctggctaatttttttatttttagtacagatggggtttcaccacgttggccaggctggtcttgaactcctgacctcaagtgatccacctgctttggccccccaaagtactgggattacaggcatgagccactgcatccagcccaatatagggaggtattaagaaaagagaagaactatcatccttaagtattaacgggactttaacaaattaaaaaagtagtactttgaataaaaagctgtcacattttactgtgaaatccttagactttttttatacctctagttcaggttttttcagctttggcatgaatgatattttgagcaagataaatctttgttggagttgtcctgtatattgtaggatggttaacaacatccctggcttctacctggtagatgacagtagcacttaattgtaacaaccaaaagtgtctccagatgttgccagttattccttctggggcaaaattgttcccacttgagaaccactgctctggttaagtagtgtaatacttggaaatagaaggcagaaagttggtaagtgcataaagaattcacacagaagttggattagcaagctgagagacgttatttgaacaagtagcaattggaggcattttgactgagaatggatgttgtgcctctccctcactctttcctcctcagcttgagaggtccatattctctcaaagtttgactctttagttttgagggtgatgactgccaactgtggaagggataaacagatttctgtttggtatttttgtccaaatatatcaggactttttcaagaacaggcaatgaaattattgatcagaactacttggtggttctgagaaaataatatgctacatgaggctactgaagtcctcttccttttgccccatgatgtaaccttaggtgactttcttctggctttcagttgaagatcttacccatcattgaggtgagcgaactgatttactgcttgagtctattttcttccttaaaggagtcttcattgaaaactttacccattttggggtggccatagctgaggatgagttttgtccacaacctgagacaacatactcactatgtaaaaaacctgatctcagcttgatatctggttttagactaattgtttaatagaataatttattattgtaaaatatatataaaatttaccatttttaagtgtgtaagtcagtggcattaagtacatttacaaagttgtgcagccatcaccactgtccatttctagaagtgtttcatcattccaaacagaaacactgtacccattaaacaataaatctccacatccccttgcctccccagatcctggtaatctccattctattttctgtatctatgaatttgactattctaggtttttcatgtaaggtgaatcatacaatatttgcccttttctgcctggcttattccactcagcattttcaagattcattcatgttgtagcatgtgtcagaatttcattcctttttaaggctgaataatattctagtgtatgtatatatcacattttgtttatctgtctgttgatgggcatttgggttgttttccttagagtctttatatgtcagtaattcttaaagaatttaaaagttgtagaaactaggaattttgtagatattctagaaatatgtcatttcctgtactgtatataataatttattctacagactaattactgtgtatatatttggttctcagacgtgattttgattttgtagatgctgtacatgctcttcacttcattaatcttttccttttgctaattttggttcttgtgtatacagaattatagagttacaaggtaatttagttgttacctaattcaccctaaagtctacatgaaaccactgtcacagtctttgataagtagttaccaaatctcactatttctactgtgatagtgaatgactttcattgattagctttctgaaagaatagtttatcttacttgtcttggtatcctcacctctgagtctatttgtctattgtaatctggcttttgctccaccgctccactgattaaatggatgagctaagcatttttttttttttccactgcaacctctgcctcccgggttcaagtgattctcttgcctcagcttcccgtgtagctggtattacaggtgcccaccaccatgcctggctaattttttgtctttttagtagaaacggggtttcactatgttggccagactggtatcgagctcctgacttcatgatccaccccaaagcctcccaaagttctgggattacaggtgtgagccaccgtgcttggcccaattctgtttaatttttgaggaacaatgttaacttctaatttaaatggaaggtagtatatatctaatttttccctattatttttaatttcaatgctagtaaatctttaaatctgaaatacacactcttgaattttgacagatatgtatactcatgtacatatttatattcctgtaatcatcagatcaaattaaacatttttatcacttagaaagtttcctcatgcctttttccagtaagtcttctgcttcacttcgccagatgcaaccaccattctgatttctgcctgtataaattgattttgaactttcctataataagttgtgcttgaacttcacacaaagggagccatacagtatctactatttagcttttggcagctttcatacaacatgttgttttggagattcatccgtgttgttatatgtatcagtagttcttttatttaaaaaatgctgtttagtattcagttgcatgaatataccaccgtttgtccattctcctgttaatgagtatttgcaatgtttccagtttttgagtactgtgaaagtttctatgaacatttatttatttagagatggagtctcgctttattgcccaggctggagtgcagtggtgcgatctcagctcactgtaacctccgcctcctgggttcaatcgattcttcagcttcagcctcctgagtagctgggactataggtgtgtgccaccatgcccggctaatttttctatttttagtagagacgggatttcaccatattagccaggctggtcttgaattccttacctcatgatccgcccgcctcagcctcccatagtgctgggattacaggcatgagccactgcacccggcctgaacatttatttactggttttttttgtgtgtgcatgtgtgtgcaagttttcacttgaataagtgcctagggagtggaattgcttggtcatatgtgaactgtttgttttaactttataataaactgccgaagtattttccaaagtggttgtacagttttacccgaccgccagcaacgtgtgaggattctgtttggctacattcttgccaacatttgttactatcagtctttttcatattagacttgctggtgggtatattgtgttttattgtgattttaatttgcattacactaatgactagtgatgttgaacaccttttcatatacttattggtcatatcttttgtgtagtgtctgctcaagttttttgcctatttttaaatttcttttttccttattattgatttgtgagacttcttaatatattctgaatgtacgtcctttgtctgttatatatgtggtaagtatttccccccagcctgtgttttactactttcattttattaaggtatcttttgatgatcaaaagttttaattttgatgaaggccaatttactattatttttcttttgttattaatgccttctctgtcttgtctaggaaatcttgatccttaccccagactgagttgtgtgtcctctcccttttctgcattaatattgcagaaattaattttttggttttagaaaatgtctaatttggctcaatcagtaatttttgatatctttctattgaaatatatatacagaaaagtacatacataaatcataattgtactgtgcagtgaatttttacaaagtaaacatatccatgtaatcaccatctagattaaggtatagaatattatcagtgccctccaggccgcctccttattccctaccagtcattaaccacccctcccaaaggtagtaacttgtatttaacttctatcttctacatcagttttgcctgcttttgaatttaatgtaaatggaatcatgcagtgtgtactttttaatatctaacttcgttgctcagaattatgtttgtgagattcatttatgttgttgcatgtagtagtggttggttgttttcttccttgttatatatattccattgtggggctctacctaagtctattcattttatacttgatgaacatttgggatatttttattgtgatgtattatgaataatgccaccatgaagagtcttgtacatgttttttggtacacatacatacttaggagtaggattttcagggtcaccaggaaggatatatttaggctcagtgaatactagcaagcaatttttaaaatgcggtcaatataatccccatgtgtaaaataaaggtgtacaaacgcacacacacacacttgctcatatgcttatatgtgcatagaaattccttgaaaatactcaagaaatgcttcacctctggtaagggataggaatggaatgggtcttttgtttagtatcctatgtgccctttgaattttgttttactgtaagtatgtatttttaagaaaaccaactagttatttttaaaaatcatttgaaagtcttcctactttgatatatgaaaaacactggttttaaaaaaaataatagaaaagctttaaaatcattattatttttttgagacggagtcttgctctgtcgccaggctggagtgcagtggtgcgatttccgctcaccacaacctttgcctcccggattcaagcaattctcctgcctcagcctcccaagtagctgggactacaggtgtgtgccaccaggcccagctaatttttttttttttttgtatttttaatagagatggggtttcaccatgttggccaggatggtctcaatctcttgacctcgtgatctgcctgcctcggcctcccaaagtgctgggattacaggcgtgagccactgtgcctggccgctttaaaatcattaatgttgcgttgctcagttatgtctaattgacagcccaaacatttacattgtaatattagaaaatcctttatgattgggcagaaacttggtttaatgtgtcaccttggagacctgggttatagtcctgcctcttccattaactacttgttgaatgtggacaatttacttaacctttagggccttaatttcctcctttataatgtgagaatgttctctgaattgcataactcactggccttacgtgactattcagtggaataataagagagaaaaactttgagatacatgcacacacacccttaagaaggatataattgttaaattttgctttgaggaaataaaataatctaagctataaagtaaaaccataattagctaatcttttatatgacttttttcttcctcatttcaagctaatgagaagcaaacaaactggatagcagcaatataattaaaaaattataggccagcttctagcatgtattcttgagtcaatactgactcagcccagtctcttcctcttccttcatcatcatttatgtacctgaacagagtagatgtttctcttgatcctgggcctgttcgccctcagatccattccttgccttctcttctctttttggtatagtgaggagctgactctttttttttttttttttttttttgagacggagtctcgctctgtcgcccaggctggagtgcagtggcgggatctcggctcactgcaagctccgccttccgggttcacgccattctcctgcctcagcctcccaagtagctgggactacaggcgcccgccactacgcccggctaattttttttgtatttttagtagagacggggtttcacctttttttagccgggatggtctcgatctcctgacctcgtgatccgcccgcctcggcctcccaaagtgctgggattacaggcgtgagccatcgcgcccggccgaggagctgactcttgcagcctccttttcttcccaggcttccgtgtcagcagtttctggctggattagcaagtggaggaactggcaggagattagaaggcaagaggaaagagaagacagggcttccctccccgaccttcaggcctcagagtcgtagtggttttttgctcatgcagacttctgatttgtctcaccattccctgttgggcctctcatttcttccattgcctgttctctgcattaaagtccttgtgtttcaaatcctcaagtggctttttgttaggctttgactgatacagggctcaaaatgatagtaatgaaaatgtcttacatttatattcttttcaagatttgttatctcttttgataccccaaatatcctattgaggtagaaaagtgttataattcctgtttggcatgaggaaattaacatttattgaatgactattttcagattctttggattttcgggtgaaaattttaggggggataaatggaggcccagagaagtgaaataacttgccctaggccccatagaaggctggtattgaatcaagattgaaattctgcatgtgaaaacttttacgtgctacatgtctgctagtcctggaagaaatcctttctttgatgagtattttttttaaaggctttacttgcaatatatttacaaaagccttagttatttagtaaatttttcaatgaaaaatctgaaccataataattttctgcttagtacttatatagctagcatactatccctagcattaatcaaagtgtcatgtaaaggtttgatttttgagcctaagcagaatttgaaattcttctaagagaatttagcacctagggcaaactacaggggagaattcttgaggtgtcatgtttattcacttctggaattgtttaaaatatgtcaggtgcatccttaaagggagaaagaagggggaagagatgttacaaaagagtagaatggggcaagagaagtggcaagggagtattgttgctaggttgccagccttctgcccccactgtcttggtgatggtggaggggtagtgtggcagctgggatatgaatgaggtcttttttataactcactaaaagccattaccttgtcttcatctcgtcagctggctacctgacctctgtggtaacataggctcctgaaatgtagcattggagatgatcactgtgctttattgcaaaataggggagactctgctctgcatttacatgcttatgttttgtggaggatctttcaactagtaattctcataatacctgtgaaagcatataagaaccagtatctccatttttagggggagttggagtgagcaatgatttggaataccagaaattcaacttatatatttacaggtaaaattctaattgtaaattcaggattcatagattctagggatttctgaggtatccagaattccttcatctttgatgataagtagataataatggtaataaaaataacagcaacaggcccagcacagtgacccacacctgtaatcccagcactttgggagactgaggcaggtggatcacttgaggtcaggagttcaagaccagcctggcggacatggcaaaaccccatttctactaaaaatgcaaaaattagctgagcatagtggcatgtgcctgtaatcccagctactcagtaggctgagtcataagaatcatttgaatctgggaggtggagattgcggtgagctaagatcgcgccactgcactccggcctttatgacagaactcgactccatctcaaaaaaacaaaacaaaacaaaacaaaacaaaaacaaaatgcaaaaaaacagcaacaataataggtaacatttctttaaggcctactatgtaccaggcactatttgaacctctttatatattaggtaatacgatacaactctatgagaatgagtattttatttcctgacccttctatttaaaagtaaaaccccccacccggcactgtttctctttcctgctttatttttctccatagaaaaatatcactcataagtgtaacatactttattatctgtcctgtgtggtagtagcccctgccctcaattataaactccatgaaatcagggagtcagttttgttcactgctgtattcccagtgcctagaacagtgcctggaatcatggtaggtacccagcgaatattggttgaatgaatgagtcttggttttacagatgaggaaactataaatttcccaggtcacacatttggtaataggacagttgtgtacactgaaatgttctctaaaatatttgatggaacgaaaattagcttttggacagctacatctccaagagtgtgaaatgaccttcagcactggatttggtggattttcctttttctaatccctagagttccatttaatgagcgtttgggttcttgagctaccttacaaattgaacacttttttctccagctttcactcaagaaacacaaaacatggcttgtcctttttttttttttttttttttttgagactgggtctcactctgtcacccaggttggagtgcagtgcacaatcatggttcattgcaacctctgcctcccaggctcaagcaatcctcctaactcagcctcctgagtagctgggactacaggcttgtgcctccactcctggctaatttttttgtattttttgtagagatggggtttgtccaggctggccttgaagtgctggactcaagtgatccgtccacctgggcctcccaaagtgctggggttacaggcgtaaaccactatagctagccctgattgtcttttattgtgagattttaataacagctaagacttgaaaattaacattttataaattttcttttagactacttagtgatatactaagtatctaaggtttgtaatacttagtataaactcaaaagggttcagtgcctcattctcttttactctttccctttagtagataggtgacagaggactgggtcatgcagttgagacttggtccaagatgacttagtaagctacttgtcccagaactatttatttatttacttatttttgagatggagtctcgctctgtcgcccaggctggagtgcagtggtgtgatcttggctcactgcaacccccgtctcctgggttcaagcgattcttttgcctcagcctcccgagtagctgggattataggtgcccgccaccactcccggctaattttttgtatttttagtagagacttggtttcattgtgttagccaggattgtttcgatctcctgacctcatgatccacctgcgtggacctcccaaaatgctaggattacaggcgtgagtcaccacccccggaccctggaactatttatgacggtgcactttatgcacttaacacactcacatgtctttaagcttggtgactcgtgtggctttttcgaaggagatttgattctggaagtggttaagtaggatgtgaatggctaaggtctggtcattggtgaagcctaggggaagaaaagaaaggaaacacaagtcttagaagaatttcagatcggccccaacgactagaagggtggttctactaagaaaatgtgtgtagtcagaaaatgaagagtcagttgcttaaaattttactttttttcttgttcctggcatgtaaagtcatatccatactttctgttataatttcttcttacaaattccattgataatccctattcttggatagcaatgagcagcattacttcttttttatttttttaaaaaaattaaattttttgttgaaatgagggtcctgctgtattgcccaggctggtatcaaatttctgggctcaactgatcctcctgcctcagcctcccaaagcgctgggattacagttgtgagccagtgtgtctggttgtaccttttaatttttgtgttcaggcaacattaactctgagtcacagtaagctttttttttcttcctgtcatattatggacatagaagttttttggttttctttagattgtttctccttaggttgcagaacatcaagaaatggattacagtcattttcctctcttccccatgctcttccctttcttttccttttttcttttctttttttttttttggagacagaatcttgctctttggccgaggctggagtacagtgtcatgatcttggctcactgtaacctccccgcaccaggttcaagtgattctggtgcccaagcctccctagtagctgggatgtcaggatgcgccaccacaccctgctaatttttgtatttttttgtagagatggggtttcaccatgttgtccaggctgacctcaaactcctggactcaaatgatctgccctcctcggtctcccaaagtgctgggattataggcatgagccaccacatctggcctcttttccatttttaaaaaggactgtctccaacatattaaaattcacaaaaaataatataaacacacatgtactcactggctaggcttaataaaaaacatttagtcatgtttactttaaagctttttatttttttgagaaataggcattaaagagttgaagtctcctttctgtcttttcataattctgttcttccctcttccttccttgagatcttcactattcttgggttaatttggatctttctactccttgttaccacagaaaagtaattcttaatgaatttgaccatattttaaacttctgatttcagtgggcaggtaactcattttatggtttctgtattgtgagccattttcaatgactcaactagatttttttcatcgttgacttctcatttctgggcaacagcataatgttctcatttgagctatttctaaagattgtgtttaactatttaaaatatttgtggtactctgatcatcagatgtgatttttttttttttttgagacggagtctcactctttcaccaggctggagtgcagtggcgcgatctcggctcactgtaacctccttctcccaggttcaagtgatgctcctgcctcagcctcccaagtagctgggactattggtgcgggttaccacacccggctaattttttgtatttttagtagagacagggtttcaccatgtttgctaggatggtctcgatcttctgacctcgtgatctgcctgccttggcctcccaaagtgctgggattacaggcgtgagccactgcacctggccagaagtgatattaactatcttatatgtatatttctgttgcgggaagtcaggggccccaaacggagggaccggctggagctgtggcagaggaacgtaaattgtgattatttcatggacacttaccagttcccaaataatattcttataatttcttacacctgtctttaatctcttaatcctgttatcttcgtaagctgaggatgtacctcacctcagggccactatgataattgtgttaactgtacaaattgattgtaaaacgtgtgtttgaacaatatgaaatcagtgcaccttgaacagaataacagcaattttagggaacaagggaagacaaccataaggtctgactgcctgtggggttgggcaaaatagagccatatttttcttctttgcagagagcctataaacggacatgcaagtagggaagatatcgctaaattcttttcctagcaaggaattttaataatactctggagaaggaatgcattccttggaggaggtctatagggcatgtctgtcttatgctgttgacataaggactgaaatacaccctggtctcctgcagtaccctcaggcttattagggtggggaaaaaaccccaccctggtaaatttgaggtcagatcagttttctgctctcaaaccctgttttctgttgtttaagatgtttatcaagacaatttgtgcaccgctgaacatagactcttatcagtaattttgcttttgccttttgccttgtgatctttgttggacccttatcaggagtttctgattttgcccttgtcctgtttcctcagaagcatgtgatctttgttctcctttttgccctttgaggcatgtgatctttgtgacctactcactgttcttaggccccctccccttttgaaatccttaataaacacttgcttattttgcagctcaggtgggcatcacggtcctaccgatatatgtgaggcccagctgtgaaattcctctcttcgtactcttatttcttagccggctgacgcttatagaaaatagaaagaacctacattgaaatattgggggcaggttcccctgatatatttccttagtgacattcctgcaatctcctttagaaagtctttctgttcaccttctataaccagggaaggagagattgagaagagacgaaggatgattttatgtttttcagtcccagtcattatttgatgagaaactgatattacaagctttaaaaactcaagatatgtattcaacatgtagtagtagaacaagtatcttagtttaatagtctataaatttttgatgcactataatatattattgtagtcagtagcatcaaaattttaatgtgatattgcagtatgtttatggttagtttagacatgaggacagtgctaaaggagaaaatctaatgactgtgttgtttgttttgtcaaaatatgctgcctagctccagagtttcctattttggagaagcagaactggttgattcatcttcattatatccggaaagattatgaagcctgcaaggtaagagattgccataataataaaaatgagaggcaggatgttgggtaggcaactaacagtgcctgctaaacagagtgtggcagtttatatctcagtgataaaacatgaattccttcttccccatacttcatacactggttatcttttgctatggtagtgatgtttaacatacaacctcaatatttcagtggcccccaacaaacaaatattaattgctcatgggctttcagatcagctgtgggttggctgggtttgactgcaggctgtgggtcaggtttaggtgtgttccatgtgtcttctcatgtcaagagcaaacaactctcttggacatgttggtcttctggtggaggcagatgttcaactcagcatattaacttttttatctttggatagatgaaaaatggtattttgtcgagtttttttttttttttttttttttttgagatggagtctcactgtcacctaggctggagtgcagtggcatgatcttggctcattgcagcctttgtctcccaggttcaagcaattcttctgcctcagcctccccagtagatgggactacagatgagtgtcaccatgcccagctaattttttgtatttttagtagagatggggtttcaccatattggccaggctggtctcgaactcctgaccttgtgatctgcccgccttggcctcccaaagtgctgggattacaggcgtgagccaccgtgcccagccctgagttttattttttaatttctctcttactgcaaggttgatcatcatgtgtatatttaaaaaccatttgtatttccctttctctgtatctttggtgacataccatatgtgttacaaacttgcaggcagacagtggtagtactaacatgcagaatgtatccttggtgtcatcttttttggtatccagagctttgtgacccatctaaggtttttaatttatacccatggcatttatacctatggcaatgcacagaactaattcatactggtatgacaaagattcataccagtttttttttttctttttttaagtggagttttgctcttattgcccaggctagagtgcagtggcgcaatctcggctcactgcaacccccgctttccagtttcaagcaattctcctgcctcagcctcccaagtcgctgggattacaggtgcccgccaccatgcccagctaatttttttttttttttttgtatttctagtagaggtggagtttcaccatgttggtcaggctggtctcaaactgctgacctcgtaatccacctgcctcagcctcccaaagtgctgggattacaggcgtgagccaccgcacccggcccataccagttttttttgacaccgctgatccgaaggcagataccagtatgaatctttttttttttgagatggagttttgctcttgtcgccaagggtggagtgcaatggcgtgacctcggctcaccacaacctccgcctcctgggttcaagcgattgtcctgcctcagcctcctgagtagctgggattacaggcatgtgccaccacgcctggctaattttttgtgtttttagtagagatggggtttttccatgttggtcaggctggtctcaaactcccgacctcaggtgatctgcccgcttcggccacccaaagtgctgggattacatgcgtgagccaccgcgcctggccaccagtatgaatcttgaaaggttctctttctttttcatctgtgataatacttggaaatcttatcacacttttcttagcttgcctagttagattttagacaggggttggcaaactttttctgtaatgggccaacaatattttagggtttgtaggccacatacagtctctacatcatatttgttatcttattttttataaccctttagaaataaaaaaaccactgttagcttgagagctgtacaaaaatatacagggcctgtaagccctgtagtttgcaaatccctgttctagaagaagtaatcacaacaagggagttgaaattttaagaaactgaatgaactaatactttactaggcattattaatactctaggtttttttacatatgattcttgtccacgtctgctttttcattactatttgttttcttttttttttcagacagagtctcactctgttgcccaggctggagtgcagtggcgctatcttggctcactgcaacctccgcctcctgggttcaagcgattctccttcctcagcctcctgagtagctgggattacagacacgcaccactactgcccggctaatttttgtatttttagtagagatggggtttcaccatattggttaggctgatcttgaactcctgacctcataatctgcctgccttggtctcccaaagttttgggattacaagcatgagccaccgcacctggcctgtccatgtccactttttcttaaagacacctgaagaaacttaaccactgctcagaagcatttttctccctctttcaggctgttatcaaagaacagcttcaagagactcagggattgtgtgaatatgctatctatgtccaaggtaagacacatacttcttgtcttcttgctagagaaatacacttttcctaggttcttgaaaaagatcaggcaattgaagaaacaagttcaagtacagtcatgcaccacttaacaatggagatatgttctaagaaatgtgttgttaggcaattttgtcattgtgtgaacattacatggagtgtacttacacaaacatagatggatgatatagtgtactatacacatgatatagtctgttgctcccaggctacaaacctgtatgagcaggtgttataccgaatactgtaggcagttgtaaaacagtggtaagtgtatctaaacatagaaaaggtactgtaaaaatatggtataaaagataaaaaatagtatacctgtatagagtacttaccatggatggactggaagttgctctgggtgagttagtggtgagtgaatgtgaaggtctaggacattattgtatactaatgtagactttatgttgtatactaatgtagactttataaacactgtacacttagcctacactaaatttatttaaaaatattttttctacaatgataaattaactttagcttactataactttttactttataaactttaaaactttttggctcttttggggtaatacttaaaacacacaacaacattgtacatttgtacaaaaatagtttctttaggtccttattctataagcttttttctttttctttcttttttttttttggtagagagacagagtctcactttgttgcccaggctggtcttgaactcctgggctcaagcagttctcctgcctcagcctctcaaagtgctgggattataggcatgagctacgacacctggccctttatgctattcttaaaactttttatttttttacttttaaacttttttgttaaaaactacgatacacacactactacagtggtggtactaacatgtggaatgtgtccttgctgtcttttttggcattcagagctttgtgacccatctaaggtctttgtgacacacacacacacacacacacacacacacacacacgcacacgcacgcacgcactggtctaggcctacactgagtcaagattataaatatcactgtcttccacctccttatggaaggtcttcagtggcaataacatacatggagctgtcatctcctataacaataggaataccttctggaatacctcctgaaggatctgcctgaggcagttattcttttttttagtaagtggaaggagtacactctaaaataaagattaaaatgtatagcgtagtaaatacataaaccagtaatgtagtcatttattatcaagtattaagttctatatatatgtaattgtatatgctgtacttctatgtgactggcagcacagtaggtttgtttataccagcatcactacagataggtaagtaatgcattgcactgttttgattgctatgacgtcactgggcaataggaatttttcctcttcattataatcttaagtgatcatcatcatttatacagctgtcgaccaaaatgtcattacaggtgcatgagtttaaatgttccagaaaggttttattcagtattaatctttttatggaatctgaatataattactgtgttggatttgacttcagaaatgactagtaatgttaaaaaattgctatgattacccattttttagtttctggctagtgttttttggaatggatgcttaggattcctgcctaatgcagtgatttcagggccaaaagatgcttttggaaggattgcttgtaatcaagctaaaagagatgaagaagagcttgaggatttctgtaaggtgaatcaggatgaggggaagaagcctggaaataaacaagataaagcagagcataaattcagctcattagaaaccaaagataaggaccactcacttactttttttttttttttttttttttgagacagagtcttgctctgttgcccaggctggagtgcagtggtgcgatcccagctcactgcaacctctgccttccaggttcaagcgatcctcctgcctcagcccccctattagctgggattacaggcacatgccaccatgtccagctagtttttgtatttttagtagagacaaggttttgccatattggccaggctggtctcgaactcctgacctcaggtgatccacctgccttggcctaccaaagtgctgggattacaggcatgaaccactgcacctggcccactgacttaaattttcctctttagtggcataagtagcattcttagtttttccaggaactttctttttgactcttgggtgtaaataaatggttttgtttaccattcattgcatttgtagtcttcagattaacatataattttctgacataattgttaagatattgacaaatttaggacatcatggcaaaaaatgctcttattcccagtgtcacaagtatcagactttcagtgcctgataaattcttctggaaacataggcctaggaaaaacctctggttctaattggttgttacactgacaactgaagtcttaaatgttactttatcctttgccagaatctccatgttgaatttgaggtattgattccatttgccccatttgggggttcgctctgaaaactatcagttggaagtaaattatgataaatgaagcatctgatggggaagccccaaaatgttgttaatgtgaagagtttgtgtgataatttgcaaaggaactgattatctatgtgatggatcctgggagtagagagagaagtaggtaggtttgagctaccttgctaaaagacagttgagcttgtcagcagttttggttgttgtttcagcctgtccaaagccatatctgattgttttaaggatacagttgtccaaaggatttacttgatgtggtttcccagttttctcttctccaatttttctgaccccaggctccattcttcccagaacatggttttacttttttttgtattttctgtttcttggcagcattgatatttcgcctagaaggaaatatccaagaatccctagaactcttccagacatgtgcagttcttagtcctcagagtgctgataacctcaagcaggtggccagatctttgtgagtattggcaacctggaggccctagggcactcacagagaacagtgtaaaatgcattcctaggtccagcctgctgctggcagctgcatcagcctgatacacaagtgggggaatggtttaataggtacagtgggattcactctgaagagcatggattaagtttgaaatttgagaaaatgagataactagtgttaaggaactaagcattttaaacactgtgcattctagtttgatgggggaccaatattgtttatcatgtaaatagagacaccttgtaccctaagtcttctaaacttattggcaatccttggaatttttctcatctactcttctaacacttagtatttgtcacacagtaagtttttagtaaggacagagagttcctgacttctgatggttcaacttacataatttttcaactttacaatgatgtaaaattgttatgtattcagtagaaactgtacttcaagtatccatacagccattccgtttttcattttcagtatagtattcagtaaattacatgagatattcagcattttattataaagttggcattgtgttagatggttttgcctaactgtcagcaaatgtagttaagaaagtggagataggaactccatggaacagagtaagtgttctgagcatgcttaagataggctaggctatctatgatgtctggtagagtagatgtattacatgcatttttgaattacagtgttttcaatttacaatgggtttactgggatgtaaccccatcataagttgaggagcatctctatttgttgagtgaatgtcctaaagattcctagatggaaagaatctcaagtgtttataaactactaggtactcccttttcagtcctttgttccatggagttcctatctcccctttcttagccacattgccattcatacctgtgttgtttttgcatagagcttggttttccctgtttctctctaaactcaggatccaatatcaaggaaagagacttagtcttggaaggaaaggatgtgtccctaatgggtgatgataaatgatggtagttactgcttaacatggtatatcattaggcttatttcttttttggtctgcatttatagtacattgtagaagaaaaattccacaagactctcactaaaattggtatagaatgagaccaaggccttggaacagctgccagtgcaatccctactaagagagcttctgctgttagtgtatagcagcttcactgaccaaaccagcacaaccacctcatagagaaaaggcttctagaattctctgctggatgaaatatgattaaaatgtgggactagtagggttagtcttctaagaattttgaggtaataattatggaaaatatatcttttacagatttcttttgggaaaacataaagctgccattgaagtatataatgaagcagctaaactcaaccagaaagattgggtaagtagagaactttcagttctttcttattagtaaacttgctaatggttccatttatcatctggctgtcttatttctgaattcttacattccaaaaatgtcttgattttaacctcatacttaattcatgatttgtataagtataggatcaaaaaccatgtttcctcataactttgcaggcattgctgcatgattttctagcagtttgctgacgagcagtctcttaccagtctgattcttgttgatgacccctagaagctttgggtatttttttcgtcattggaattccacagtatcagcaataggcatctagttgtgtttcatgtctttttcccgtccccatctgtgtgacattcaattgactctttcattctgaagacccttgcctttctttgggtcagggcctttgagtagttctttatttttcccctccccttctctttgtgtcaattgaggattgtgtgtaaatgcaacagaaaatttgactaaacattggctttacaaattcgtttttgtttttttttttaattctcatgaaacaagatgtccaggtaagtagttgctggcattgatttggtggtcctaggatgtcaagactgagagtttttcctcatggttacaagaagactgctgcatccagcatcatatctgcattctagggaggcagaaagagaaagcaacaaggagaaaaggacagagcctatactgggaaagcacaactttcccagaagtcccccacagacttccacttatgtcatatcagctccccttctataaggaaggctggttaaatgtcgtttttaatctggtcacactgccactctaaacaaaattagggttcttttagtaaggaaaaagagaagagtaggtagcaggtaggcaagtagataactagcagcatctgccacactgttttccattctctatgagagatgttctctaactattctctacaactcttaacttgcctctcattttctacctctgtgtccttttctttgtgtgtggtgcgggggggtacagaggctcactctgttgcccaggctggagtgcagtggcgtgatctcggctcactgcaacctctttcttccaggttcaagtgattctcctgtctcagcctcctgagtagctgggattacaggcgcctgccaccatgcccggctaatttttgtatttttggtagagacggggtttcaccatgttggctaggctggtctccaactcctgacctcaggtgattcacctgccttgtcctcccaaagtgttgggattataggtgtgagacaccacgcctgaccctccttgtcattttattatatgttcaggacatgtattcagtcttatcttccatatcatcatttttgtttttagctatttgtattctgttatataccctatccatccaatattttttatttcatttccttttattgtatttttaatttccaaaaatcttgtcttttcttcaatgtctctgattcttgaagttcttttctgcttctcagaattatctttttcttcctctctgcattttggttcttctattttatgctgttggtatttttcaagtatttggtgattctcagagagacattcatatctgtgagtgaagaactagatttattagtacagagaattagcatggatttcctttgcagttcttacggggcactattatttttgaagtgtgttcaatttgttagtcgcttttcttctgtacatcggaagattgagttgagtctttatgccatggagtatgttatagctaacagccagagtgaaactacagatgaagaaaaattcatgtacttttcattcagtcggtttttcaaaaaatgagtatgtctgctatatgccaagcactgatctatgccctggagatgcaaagatggactgttggattataagatactcaactagaataggaaatgaaggaagaagagcaaggtttggaagaaggtgatggtaagaaatcagagttaaatcctgtctttcagaggattttggatatgataagttttaggttctgaggggatatctaaattgagatgtgtccagtaggattggatatagaaatctgaaactcaagtgttttggagtagagatgtgaattctggagtcagcaacataaaggtggtaattgaaaccattagattggttgacattaccctgcaatgagctgaggatgggaccctggaaaaaaagagttttttactttttttttgtctgtttgagacggcacaggaaaagttactgctttaatgcagggaggaagccctgcattctctatgggggccaggatcatgggggtggccagtgccacaaatggtcaccatacaggccagggaggagccagggcccaccaataatccctggaacatccctggatgctagcagttttttactttctaaatttttttttttttttttaagagacaaggttgcctaggctggagtatagtggggtgatcatagcttactgtaacctccaactcctgggctcaagtgatcctcctgcctctgcctcctgagtagctggggctacaggtgcaagccaccatgcctggctaaatttattttgtggaaatgaggtctcatgttacccaggctggtctcaagctcctgtcctcaagtgatcctcctgctttagcttcccagagtgctgggattacaggtgtgagccatcaaaaagcaattttgaaggactgagcagaagaagagaacccatagagggagatagggaagaggtaaagcaggagagctcagggtcacagggggaatggaacgtatttcttaatctatccagttggttgaaagagctcatttggtattactgactcacttgggataaccatcccattgttactagtagatgtgatcattcacaaaacagccattctttttttttttttttgttgagacagagtctcattctgtcacctaggctagagtgcagtggctcaatcttggctcactgcaacctctgcctcctgggttcaagcgattctcctcccccagcctcctgagtagctgggatttacaggcacccgccaccatgcccagctaatttttgtatttttagtagagatgaggtttcaccatgttggtcaggctggtctcgagctcctgacgttgtgatccgcccaccttggcctcccaaagtgctgagactacaggtgtgagccaccaccttttttttttttaactttaaaatttttctttaaaattttccccttcatggcatttttattttctttttagaatattttaatgattttgaattttacttttattaatagcccttacctaccctacatatttcataagtacctgtagaaaaccttatagtagctggagcatggtggctcatacctgtaataccagcactttaaaaggatgctgagtggggaggatcacttgagcccaggagtctgagaccagcctgggcaacatagagacccagtttctaggaaaaaaaaataaaaattagtggtcgtgtgcacctgtagtcctagctattctagaggctgaggtaggaggatcacgttagcccaggaggttgaggctgcagtgatgcggtgaactgtgattgtgtcactgcacttcagcatggaaagcagagcaagaccctgtctcaaaaaaaaaaaaaaaaaagaaacaaccttgtagccctactttcttggactcatcagggtattccacagtcttgctgcaacaggggaatagtaattcctcctgccattatcttagttgacttttggaacagttctgttaagtagggagaatttcccccattgacaagtgaggaagctaaggctttggaagatggaagttgctacagtgaggtagttgctgagccagaactggaattcagacctgtgatctaggatgatctaagattcctcgtcttaagactgtgatcttttccactgtaccaactgcctttgcaggatgtctgctgggttcccttacctcctgaaagataggatttgactctgatttgttctgttgccctttccaaatttcttttgcagttagtttgttaaaggtatattgctgccttctcaactatctatgtcaaagattttaaaaggtcagaggttagccttcaggacatctatttacttacctaccttaacaattcctactgtagagcaggacatttaaaggacaagaaaggctttatttctgccttgtctctctccatgcatgcattcttatagcatgacaaagttggcagtatacaagttttggaagcaggcctgagttcaaatcccaatgttctataatatggacatgatttgtgattgaataaaaaaaatttttaaatgtgcggcatttgtgagataattggaaattttaacgtaattgaatatctaatatcaagcagtcactactttttttcgagtgtgacgatgtgggtagtttaagaaaaaggccttatcttttagaaataaatacggaaacatttgtggataaaacgttgggctgttatttgcttacaaaagttgtgggagtagatggggtgtggattggatggttgttgggacaggatgattagtacctaattctgtctgcacttacgtatgattgaaattctccctaggatgtagaactaaaaaagaaaaaaaaaatcccaatactctctgtcttaagttaggtaatctactcaacctctctgagcttcaatttccttatctgtaaaattggaaagattataactatgttgcaggtttgctgaaaattaaagtaacatatatgaaaacatctggcataaagcctgatgttagtaggtgctcaaccaatggttgctgttttgttgtttttactatttttggagacttggaaaacattaaatcagttgttatctctgagcctgggggtccatgtttcctcagacagggacacatctccactactaatagggtagttcttactatgtttcccaagagcattttccttacccttgctttctccttttccaaagctaccttaaataaagggaggtttattataaaggaatttgagagtccataaaacagtatcaagagatgcaggttggtcttttagtgaagcagaactggaacgcttcagcatccaaggtagctactctgccttttctgcttcatcttttctttctgtagatcaaaggttggcaaactttttttgtaaagggccagttaataaatattttaatttgtatagcttcatacagactctgttgcaacgacttaactctgcagttctaatgcaaaagagccatacaaaaacaatagttgtgtctgtgttccaatgaatctgtacttataaaaaagggcagggaatggatttggcccatggaccatagttttcccatgtcagctctagacttctgcagatggctccaattacatgtattccatcacagcagactccaggtggcgctgtcagtcctcaagttcacatcacctagtaaatttagtacttgtaactaactagctctcttccaattccagattcctagggaaaggacttcagttgtgtcaggtgtcactatccaactgtgttgccttaagggcggaaatgtgtggctagcagccctctcagcaggggctgtgggtagtctctcctgagaagaaggagcaaagggtatgggtgatgggcaactcttaaagaaaaaaggtatggggatgggctgggtatgtgccccagggttccccatagatccaggaagatcacctgtttattctgcttttatttcttataatctgtatttttttatgttgaggaacttatttttaacaattaatttgagtatgaactctaataaaaagctgactgtaatgcatagtttaaagtttaaaccttgccgagcaataacaatctctagatgtctgttgtttcactctaatacttactgtggaattacacctgagttgttttccttcttttttatgagcctaggagatcagccataacctaggagtttgctacatatacctgaagcagttcaacaaggtaatttatagaagtggtgatagatttcactgagggtgcacttgttgcagaagttgttacattgctcatttggtattatccctagtgcttgcagaggtttttggaactgaaaattgaaagtacctttatacatttttttctgttttaattctcacttgtcattattcatctgttgttttctgcttgtaataagaacatggaaagttctagaaatatgagggaatggcagtttttctcctttcttctttttctctacctccagttaaatttcccagtttagaaacagatgcttaataaaacatacatatcaaaaagtggacccttaagtcttaaaggtgtgatcatgaccatgtgagctatctccatgccctgacggcaacttagtttttagggtcattgaaaataaattttaaattttaagtggatctgatttctgagttttcagttttaattttatagttattttccatgatgagaaattatatttcactgtgattaagctatagactcctatatcagagaagacaagttgagcttacctcaaatttggtactcaggtaagaaaaagtatatatcataattgaggagtagacaaaattactgagagctctaaaacttagtgatgagagcgttgggtagtttccttcatagagctcacagttagtgattgtgaagttttattctcctttctccgatgccaccaggactgagaatctgaattggttagtacccatttgacaatgtttagtttgtgtcaatttgcagactggtgtaactagtatcccacactggtgtgaaaaaaaatatgcacattagcagttggggtgtaaaagtaacttttctcctgagataacaatatatatacataaaatacatttagtgggccccttaggttttgtagatggatctatagttttatatacttggttaggagatttttctcttcagagacaatttcaaacaggcacatttctattcacaggattattctgagtcaggggaaaagaaggatttgtctttggttggatctgtgctgagaagaaatatatttagattttactgtacagctaacaggctaggcaaatacaatacctggcatttatataaatgcttgttgaatctgtgaatgactaaacaaagcccttttgtttactaggagaaggtaagctcctccagagcaaggagttggttttataaactcaaatatatttagcatctagaacagcaagcagttgggtgaataaatgagaacaatctatttattcatttatcatcacattgatggggaaacctggcccaccatagggaaggttgtgcacttggtcagtgttacagctgggatttagtttagtgtagtactctacactgtactatgatggcccttttgacttatgaagtatgagtcataggtgtgaatatcaggcagaaaacattcagaaagattaatcgtcttgtataaattcttccaagtggctccagaagcagatatcccatgttgccagctgtcttttcaacaaggacagttttggtatgttttggtctttgggtagtgggggctgtttgctgaaatgtgatgttcctatgtcaatacagcagaaagtgtctttacattagccatataaaggtatagttcgttcagtggtagtgatttggttttctttattttgttaaacttgtcaggcacaagaccagttgcacaatgccctgaatcttaataggcacgatctgacttatataatgctggggaagatccacttgctggagggagacttggacaaggccattgaagtctacaagaaagcagtggagtaagtgtatctgtttcctttaaaacagtgagaaactaaaaaaattgagtggatatgtgaactcccaagcctaaaagagtgaatatgtttgattaattacttactgtatgagttaaaggttaagctgaagtttaagagctcccagtagcttcaataaggtagactgtgtttctttcttacctataaggatgactgctgctttaggttagctgggcagctctattctacaaggtcagccagggatccaggtttcttccttattaactcaccattccttaggctgttgtctttacctgcatggttgatgctgaatgtaacatccacatccaggctgtggtggaaggagatggtttgggaagctaagcatggaataagcatctggctatatatatatatatatatagagagagagagagagagagagagagacatgatcttactccatcactcaggctggagtgcagtggagaacacagctcactgcagcctcaacctcttgggctaaagcaatcttcctacctcagcctcccaagtagttgggactacaggcatgtgccaccatgcccagctaatttaaaaaaaaaaactgtttttgtgttgacagggtcttgctgtgttgcccaggctggtcttaaacttctgggctcaagcgatcctcctgcctcagccttccaaagtgctggaattacaggtgtgagccactgcacctggccttggtaataagttttaaatgacccagaaattgcacacatcgttcctgcttacattccatggttcaaaactacatgatagttacaagggaagtgggcagacatgcactcaagaagaaggaaataacagatttaagagttggccgacagtctgccattttggtatcatatgttaataacagatcttctgttttcagagatattattagggacagaaatctcctgattcagtaaaaaacaaaacaaaacaaaacaaaacatttggccttattagcatgagaccagtatcttttttcccccttccccattttcccttccccttccccgttttccccttccctttccccgttttcccttcccccttttctcttccccctttccctttcccccttcccccttcccccttcctcttccccttcctccttccctcttcccccatcccccttcccccatccccctttccccatccccctttccccatccccctttccccatccccctttccccatccccctttccccatccccctttccccatccccctttccccatcccccttccccctttccccttccccctttccccttcctcctttcccttccccctttccccttttcccatctcccttcccctttcccctccctctctcccttccttcctttttctctcttttctttccatcctttccctccctcccattcccatctttctttgtttctttcttttcttcctttcttccttcctttctttccttcctttcatttatttcaacagtctcgctctgtcgcccaggggtgagtgcagtggcgcgatctcgcctcactgcaacctctgcctcctgggttcaagcgattctcatgcctcagcctcctgagtagctgggactgcacgagcacgccaccacccctggctaatgtttgtatttttagcagagacagggtttcaccatgttggtcaggctggtctcgaattcctggcctcaagtgatctgcttgccttggtctcccatagtgctgggattgcaggcgtgaaccactgcgcccagccttgtgttgttacttttaaatgggatagctgtagcaaaatgccttgtctcatttgtttggtcccttaatagaatgtctggtctgtggttcaaggcttattattcctaataattagattctgaactaaacttagatttctattaatttgttaatcatctttgtcttctaccatggtagtaaattttctggttatatcagtcacagcactgctttctgaattttcttcaaccatattttgtgtctaaaacagaaaaatcccttggtttgttaagctacagaacagacttttgtcatcaagaggctgtatatttgggcaagtagtaaggagccatgtaacatgttcagtgcctctgtggtgctaggtagtagccctgatccctgacccctgccttctagaggttagctctttgagaatagcatacataaatcccaaggggaacattcttccagtaactgatcaaggactttggtcactaaatttcctaagggagaaatgtggacagctaaaatctgaagccttactgagaagatagagaccattgttcatgacctacagctttgaagagagtagtcatgttgtagtggggaagccaatattgctagaattacagaagttacctggctttggggagggaagtgatcaaagtggatgtttattatggcagaaagtgaaaggcggattcccagttgaattgagaaagctctgtttggtcagctcaggcctcccctggctggggctttgcatcttctggttcaggtcttcctataggtaaccagtgccctatatcattccttagaagcagaagacattgttcatagccctttggtgttttactgttgaaactgtctgatgatcctatggtcagatcatctcaactcagtgttgccttggttttgtgacaaagacaaatactagtgagggattgagcaggcaatccctgatgtgagtattttacttacatcagtgtttactcccaaaggtcagtagcaccttctttcctaggattggtatgtatcttccttcttttgtttagtttggctacttggtatagctctttgtttaagtggagagaacagcattaggggccttgggatcctaaattacatagaaaattatgctgcctggcattgtgagcacaatgaggatagaaaaaaaattccacaagagaggactggtgaaactgtgtgtgttctaggctgacttggtttataaagcattgttctttaattttatcagtgtgaccaagacagtcatgcaaaacattctataggttctttcttaggacttttaccctaagaaaggaatctgaattctaagcctcatttttcttgctgagcagttctccttatcaccagggttgagatgacctacttttgatggcaattcccaaattgccttcaggtatttccacggggaggaagaggctcagtggggtctgtcaagtattgcacgagggcatattactgtgcatgtgtcttcgtgtttctcatctacatcttgtttccctctgagcatctctatgttgcaggttctcaccagaaaatacagagcttcttacaactttaggattactctacttacaggtaatgaaaactctgtactcattcatgcactgatgttagaaatggttttgggtttgtgtgtatggtggttttcctgcattctgatatttattttattaaaggtcatataaagttcatgaactacactctctctattcgatactctttgctaaaggaattaattttctgcatttaaattggaagcaattctattttagcctagtgcaattataattcttatctaggctgggtgtggtctcatgcctgtaatcccagcaatttgggaggctgaggctggtggatcacttgagctcaggagttggagaccagcctgggtaacatagtgagaccctgtctctacaaaaaataaaaaaattagccaggcatggtggcatgcttctgtagtcccagctacttgggaggctgtgatgggaagattgcttgaactcggaaggcagaggttgcagtgagctgagattgagtcactgcactccatcctgggtgacagagccagatcctgtctcagaaaaaaaaaaaaattcttatgctatccaggaaagagcatatatgagaaataactctggtcttggaggctgttattttgttgtgaggagagaaacagatacaagtgagcacttagggctttggggcaaagccatttcttttgatctttcttcccagccagagtcttattggaaagagagaaggcaaagtatacttttatctagaataagaagttttctgtcccctcaacattcctgaatgtgaatgggattcttttagctccattgattctctggctgaggacccagggcccaggtatccaaggggcttttccctcttccccaatatacacatttgccaagttccttggtcagctgattctgcctccagccctgcctctgtggtggcctttatgtctatttcatttttctttaaaaggaatcaggagcttaaccctgggtcttcctgggctttggcttgggaggttggctccacgggagatgaggatacccagctcatttcctgcaaagaggcattaatgtggaacagtactagtgtggcagagatggttcttatcaaatagatactttgaccttatcaggtgacaaattaacaaaaatagaaggaaaaccatgactggggatttttagttttctttctttattatctggtaactgtagctgctttttttttttttttttttttttttaaagtcaagagaactcaaaaaagccagagcatttctgttctgggtgaggttggccagactgtttttttttttttttttttggagacggagtttcactctttttgcctaggctagagtgcaatggcgtgatctcggctcactgcaacctctgcctcctgggttcaagcgattctcctgcctcagcctcccaagtagctgggattacaggcatgtgccaccatgcctgggtaattttgtatttttagtagagatggggtttctccatgttggtcaggctggtctcgaactcctgacctcaggtgatccacccaccttagcctcccaaagtgctgggattataggcattagccaccacgcctggtctggccagactcttttaactgccgtctccttgctgatgtaaattgtcttgtttgctttttttccaagctcggcatttaccagaaggcatttgaacatcttggcaatgcactgacttatgaccctaccaactacaaggtattacaggctgtgaaggctctggccttcatatagacggtcccactgctcctagaggtgatctgaccctggaaagcaaaggaatagcttcttaaatttggatacctgagaaatagaaaaaatataaataaaaggtggctcttcttatttgaaaatagtgtcaagtatgctctacttatcttctaaaagtgcacatttgttataatagacgtgtaacccctgcagaaggcagatcatagtgctagtaaagcttatgtgttacttaggaaattagcaatgcctccacaactattgtcaaaaataaatctgcggcccggcgcggtggctcacgcctgtaatcccagcactttgggaggctgaggtgggcagatcacgaggtcaggagatcgagaccatcctggctaacacagtgaaaccccgtctctactaaaaatacaaaaaaattagccgggcgtggtggcgggcgcctgtagtcccagctcctcgggaggctgaggcaggagaatggcgtgaacccgggaggcagagcttgcagtgagctgagatcacgcgccactgcactccagcctgggtgacagagcgagactctgtctcaaaaaaaaaaaaaataaaaaataaaaaaaataaatctgctgggcatggtggcttatgcctgtaatcccagcactttggaatgctgaggcaggaggatcacttgaggccaggagttcaagaccaggctgggccacatagtgagacccccatttctacaaaaaaaattatccaggcatggtggcacacacctgtagtcctagccactcggaaggtggaagagggaagatcacttgagcccaggagtttgagtctacagtgggctatgatggcaccactatactccagcctgggtgacagagaccctgtctctaaaaagaaacaataattatgttgaaatgacttctagagtcctaatgatttgatactacaactttttttctagatgtgactttgggaatgagaaggaatagcatcaaatggatgaacatcattgaggagatgcagcaagacaagctgtttattaaaggatacaaactgaattctgatttaggaagtaacattagactgtcagctcccaccttgatacctttccttagagaaatgaaagggctgggctgatgaagcctaaagctgactcgccctctgttctacggtagaaagaaatttaccttaagtagccacgtacaggtgtatttcaggtatctagaacacttggtataccaaataggggctgcagagaacagattaaaggaagtttttacttaaagggctctggtattcattctgaaatactgactttcctggctagaagtaggaaacagatgggtaaagcaagtaacattttatctttttttttttttttttttttttttttttttgtgctgtgccagagagccacagtgtagagtgcaaggacattcctcaggaacatttgtcccaataggttggatatatttatgtccctggaagaaattttccagtcccatctatgctgatgggcctgctgagtatagactcaggaaagctgccccactgctacagccttttgggaatgactgaatgactttctctgtgccatgttttcaggccatcttggcagcaggcagcatgatgcagacccacggggactttgatgttgccctcaccaaatacagagttgtggcttgtgctgttccagaaagtcctccactctggaataacattggaatgtgtttctttggcaagaagaaatatgtggcggtgagtgtcccctcatgttctttgtttgtatttctacatgtggttattgggtctgtttagcttgcccttctcattgagtgccccttctctctcataggccatcagctgcctgaaacgagccaactacttggcaccctttgattggaagattctg

SEQ ID NO: 15489 - DNA, 38369 bp, Homo sapiens
gcagcggtgggctgagctaaaatggctgaggagagagtcgcgacggtgagcgccgagattctctttagttgcccggccgcagggcaaggcaagctggcgggtggcttttgtcccatgcagcggttcctggagagaggcggagctgggtgccgagcgtctcagggtgggcggggcgacacggtcccctttttactgtcccgggaactggtcgcctggggcaagtctggatacttagcagcacaggtcctgttctaggactgtagtccctcttggggtgcgctggacggagaagggagacttttcaccagtaatggctcttaccgtagtgccatctttttctgtctcgggggtttggaaggtaatgactagcacttgtgtagacagttcctgttaatcccgtgaattgggaatttaacatgcctggaagcttgcagcgtcactgccttctgccagtggagcgggactgtgttttttctgtggtgattaagtttaggaaagtacggttttggaattcatctgaaggctgagttgggcgttcactccacagaactgctaatatagaggaacccgatgaattcaggatgacctagtcgctattttttgaggcatatatctataattggatctaatttcggtaaagtgccaagtgtgaagctttgtttaccttgctttagtgttgggtttgaaagcctgttctgtccatttgttagaatgattttaggtattcggaatttattgtctttcgaaaaacgccctggaaaacagtacaaatagcagcctttggctgttttacaacttagttttggctaagcagcaaggttagtgttattgttagagggccttttgtttgttttctactctcatttgcagagtagtcatattattctagtctaattagaaaactctgaagacagaaacttttttttttgagacggagtgtcgctgttgtcggcccgggctggagtgcaatggcgcgatctcggctcactgcaacctccgcctcccaggttccagcaattctcctgcctcagcctccggattagctgagaatacaggcgcctgccaccacgcccggccgaaacatttttattaagctaagaaatttaaaatagctaggccggacgcggtgcatcacgcctgtaatcccagcactttgggaggccgagacgggtggatcacttgaggtcatgagtttgagaccatcctggccaacatggtgaaaccccgtctctactaaaaatacaaaaattagcggggcatcgtggcgctcgcctgtaatcccaggtacctggaaggctgaggcaggagaatcgcttgaaccccggaggcggaggttgcagtgagccgagatcatgccattgcactccagcatgagcgacagagacagactccttctcaaaaaaaaagaaagaaaaaacagattttaaaataattaaataggccaggctcagtggctcacgcctgtaatcctagcaccttgggaggctgaggtgggtggatcgcctgaggtcaggagttcgagaccagcctggccaacgtagtgaaaccctgtccctactaaaaaaatacaaaaaattagctggacgtggtggcgggcgctggtaatcccagctactagggaggctgaggcaggagaatcgcttagaacccaggaggcagaggttgcagtgagccgagatcgtgccatttcactgcagcctgggcatccagagcaaaactccgtctcagaaaaaaaaaaaaagtaaatagcatggttaatgttactgggttttaaatattaaaaacataggaaagaaaatacttccactccagcctgggtgacagagcaagactccgtctcaaaaaaaaaaaaaaaaaaaaaaagaaaatacttctaagtaatcttaaagtgtaaaagataatgggtaacataacattgctacaaatatagcttatcctctagtgctcatcacaagtgtttgtgtaatagaatatgaacttgagtctgtgacggcagaattgtcatgtacatttgaatgtctaatactgttttaaagagaatagcttttgtttcgatatgacttagcaattaagcctgaagttaactgttttcattgttgtcaaatttattgctagtagtgttacgtttatagtaattttcatcttttcaagttaccaatgcatggaaatgtgaatttctgtccttttaggaagtggtattttatcttttttttttttttttttttgagacggagtctcactttgtcgccctgtctggagtgcagtggcgtgatctcagctcagtggaacctctgcctcccgggttcaagtgatttttctgcctcagcctcccgagtagctggggttacaggccctcaccaccatgcctggcttatttttgtggagatggggtttcaccacgttggccaggctggtcttgaactcctgaccttgtgatctgcacgcctcggtctcccaaagtgttgggattacaggcgtgagccatggccccctgccttattttttaatacaattaaaagaacccagtaatcctactcctagacctgtgtcccacagaaaaaagtgttaaacatgagcgtgtagtactagggcattcgttgtagtactatccgtagtggcaaaacgctggaagcaaattaaatgcccattaatagggtaattgatgacttcagatatttccatactgtggaatattatgcagtcattaaaaagaatgttacaactaattgcttttcctctcagaagcccctctctctcactagagaaagctgttctcctttctttcttctgcctattaaacctccattcctaaactcagaaagaaaaaaaaaaaaagagaatgttacgactaattgacttggagggacttccatggtgtacatttaaataaaaggtagatgtgaagtggggtatattatgtgatcttaatttcataacacaaaggaaaacatatagatccgtagataaggatatatggatatggaggagagaaaaggaaaagactcaaaactcacagaatttttgaagaaatgtatagctaaaaatctaagaaggctacagtcaaggccttgaggccagaagacaccccatcaaaactgagtaaaactagcccagtgtgggacgcagaaattctagtatgctaccaaaattacttacggattgctaccagttccttagaaggaaaactgaggactaatatttgtattttcagtatagtttagaattcttaaaaaatgagcaaacaggctgtacttggtggctcatgcctgtaatgccaggacttgtggaaactgaggtgagaggataacttgagtccagaggtttgagaccagtctgggcaacatgttggagccccatttctacaaaaaacacaaaaattagccagacgtggtggcacgcgcctgtcttcccagctactggggaggatcatctgagcctgggggaagttgaggctccagtgagccatgatcatgccactggactccagcaggggcagagtgagactttgtctgaaaaaaacaaaaaatgaatgagcaactaactctggctttcatgatttgtgcttataaatctttttatttatttatttatttatttatttatttatttatttatttattttgagacggagtcttgctctgtcgcccaggctggagcgcagtggcgcgatctcggctcactgcaacctccgcctcccgggttcacgccattctccagcctgagcctccggagtagctgggactacaggcgcctgccaccacgcccagctaattttttgtatttttagtagagacggggtttcaccgtgttagccaggatggtttcaatctcctgaccttgtgatccgcccgactcagcctcccaaagtgctgggattacaggcgagccactgtacccagcctataaattttttttataatgccctgattcccattatttgatgtatttggataaatatgtcatcctgtaaattgaaggattaaactgataagagcagaaaacagaaattagtacactagttgatctggctcagatatagtgcctatgtatcaggtgctccatgaatatttgttggatgaataaatgatcataaaactatataaaaatgaagaaataacagaataaaataatttgttctatataaatcctatgaatgagattgagtgggctaatagaatcctttccatctcaaaatgttctggaaagtcttgagtaaaagactcatcaaaaaaataattctgctttgtgcagaaagaagggttgctgacctttgaaggtgctttttgagtctttaacattctttagtagtatattccccaaagttaagaaattctagttagattttaaaaaattgagttaacatttaaaaaacagttttgttgaggtataatacacgtaccataaaatttactcaatttaagtacaaagtttgatcagttttagtaaatttatatagttgcacagctgtcatcagaggctgcttttaaaacatgtccatcactccagaagggttcctgtgtcaatggaattgctgggttatattgtttaagtatttgtttaaaaaaacagaaacaaatctgcctaacttctgcaggctatatacgagttaacatttccatgagcaatgcatgagggttgtgatttttccacatccctgtcaacacttggtttgtcagtttgtttttatttagctgttgtagtggatgggtagtgatggtgtatggtggttttaatttgtatttccttcatgaataatgatattgaagattttttatatgtttattttccacccgtatctctttggtgaaatgtctttataaatttttgtgaatttttaaatcaagatcattaaccaaatgagcccctcatttgggctcaagtgatccttccacctcaacctcccgagtagctgggaccacaggtgcaggccacgcttggctaatttttgtatattttgtagaggcggggttttgccatgttgcccaggctggtcttaaactcctgaactcaagcaattggcctgcctcacataagtattctcttttattttgaggattaatttttgttgttgtgaaatatatcctacctgtaaaagagtgcttaaaatgtcgtatgtgtgctttaaaggataatataatggaaacttgtgttcctactgcccaggttaggaaatgggttattaataactttgaaacctcctaaatgcctctctcctactgcattttccttcctccacatcagatgtagtgtttcttcaattttatattaatattttgtactttttatagttttaccatatatgtttatatatatccttaatatattagtttttaaaatttgttattaaccttcagtttattcattatttcaacactgtatagtatcttattgtagtaaagtatgtcaattaacttatccattccactagatggagatcgggattatttctggtttttagttattaaaaacaatgctgctgctgggtgcagtggcttacgcctgtaatcctagcactttgggaggccgaggctgcggatcatgaggtcaagagatcgagatcatcctggccaacatggtgcaactccgtctctactaaaaatacaaaaattagcaggatgcggtgctgcgcgcctgtagtccctgctactcgggaggctgaggcgggagaatcacttgaacccaggaggcggaggttgcagtgagccgagattgtgccactgcacttcagcttggcagagcgagacttcgtctcaaaaaaaaaaaaaaaaaaagctgctataaatatggccaagactaaggaaaggtaagtgaggtgcttagggttcacattttatggagtaagagtaagtaccttcttaaggtttataccctaggttcttcacatgcctcactttagtcctagccctgagcattattatgtaggtcttctgatgcaatatctaagagtttctctaaggtatacctagaaatagattgctaggtaatggagtaactttattacttacaggaaactatatggtggttgtaacaatttatgcttctgccaccagtcatggtggatatgaaattatgtcttaatgtgataatttacattgcaatttttttttttttttttttttttttttttgagacagagtcttgctctgtcacccaggctggagtgcagtggcgtgatcttggctcactgcaacctctgcctcctgggctcaagtgatccttccacctcagcctcccgagtagctgagaccacaggcgcaggccacacttggctaatttttgtatattctgtagaggcggggtttcgtcatgttacccaggctggtcttaaactcctgaactcaagcaatcggcctgcctcagcctaccgaagtgctgggattagaggtgtgagccaccacacctggctgtttgtttgttttgagcctgttcctcaggctggagtgcagtggtccaatcatggcttgctgcaactccgcttcctgggcttaagagatcctcccacctcagccttctgagtagctaggactaagggcacctgccactatgcctggctaatttctaaagttttttttatagaggcagagtctcgctgttttgcccaagctgttctcaaatttctaggctcgtgtgatcctcctgcctcagcctcccaaagtgctgggattataggtgtgagccaccacacctggctgatctatctgtcttaaactggagaattgcatttttttctacctcctttcttttttttaaaaaaactgaatttccatctgttacccctccctttctgctcctcttatttcatgccttggaagttatactttgccttcctttaatgagtaccaaagaaattaaaaaatacatgtttactgtaagtccaggcctaaatgttgctactacagggaccatcaaatgctttactaccatctattgccatctgcaaatgtatgccattgttgtttagttttgtagttcttaatgtattttaattaaacaccacaaattatgctttttgtttgttttattcagtcagtagatgcttagaatacttgcttattttaccaattcctttgcttattccactcctttgttctgggattatttttctttttcctaatatattttcattaaaagtttatttggtgagaatctaaaaactctcaaattctgaaagttttaaaaatttgcctttgttgttgaaaattagttttgatgggtgagagaatctagatcaggtgttagcaaacctttttttgtaaagggccagatagtaaatattgtgggctttgtgggccatagagtctctctgacaactactcagcaatgctgttgtaggacaaaagcaaccatagacattatgtaaacatgagtgtgggtatgttctcacaaattttgtttatagacactgaaatttgactcaattttcatgtgttaaaaattattattttttgaatttttttaaccatataaaaatgtaaaaatcattcgtagcttgtagaccaaataaacaggatggatttgacctgtgggccatagtttgctgacctctggtctaaattaacattcattttacttagtacctgacactggagtaattattcttatgatgtcttattgtgatattgtcttccatttttaattgttgaagagccagctgtcagtcttttttgtttttctttttcttcttcttttttttttgaaatggagttttgctcttatcgcccaagctggagtgcagtggtgtgatcttggcccactgcaacctctgccttctgggttcaagcgattttcctgcctcagcctcccaagtagctgggattacaggtgcctgccaccacacccagctaatttttgtatttttagtagagatggggcttcaccatgttggccaggctggtgttgaactcctaacctcaggtgatccacctgccttggcctcccaaagtgctgcaattacaggcatgaggcacggcgtctggcctttctttcctttttttttttttttgagacgtagtcttgctctgttgcccaggccggggggcgatggtacgatcttggctcattgcaacctctgcttcccaagttcaagccattctcctgcctcagcctcccaagtagctgggactataggcacgtgccaccatgccgagctaatttttgtatatttagtagagacggggtttcaccatgttgtccaggctggtcttgaactcctgacctcaagtgatcctctcgccttggcctctcaaataactgtcctttctttgttggtaatctggtgatatgttttcttgtttggctgcttttaagagctgcttcttgtctctggtgcagttcgctatgatgtatctaagtatgtatttattttcatttaacctggtcaggatttgttgagtatccagaaactaaggattggtgtttctcattacatctggaaaaatttgagccattatttttgcttatattgtggtatgtcataggaagttgagaaaagaaaaattcatttgatggttttctatgaggttatagtggaaaataactatctcccttttagaattgagtgctagacagtttctgtgtagatgatctcataagcttccttttatcaaacagcgatcacttttttggtttggctgctgagaagtatggcatcaagtataatactcatatgaggtgtttaagaactgagtatatttcttatgcacattttactatatactataattatacattaaaaatgcacattgtaaatattataaatatgtgttatacattgttaatagtttggatagcaaaagtatgacttgacatttgttttttaaaccatatttaaagtaactctatcacaatatggatttaatggattaattgcataattggtgagctactgattattcttgttatttggatgcttctttaagttagcaagtttatattgtggtgcttcaatatagactacttatttcatttcagagaactcaatttcctgtatctactgagtctcaaaaaccccggcagaaaaaaggtctgtatgcagtttcatggtatgtgtatgtttgcacagacagatttctcttttatttatttatttatttttttttttggaggcagagtctcactgtcacccaggctggagtgcagtagcacaatcttggctcactgcaacctttgcctctggggctcaagcaattctcctgcctcagcctcccgagtagctgggattacaggtgcacgccaccacacctggctaacttttgtgttttagtagagatgaggtttcactgtgtttgccaggctggtctcgaactcctgacctcaggtgatctgcccaccttggcctcccaaagtgttgggattacaggcgtgagccgccacgcctggccagatttctctctcttgttgattcttttatctattctatattatttcaaaatgagtgttgggaaaagaagtaatagtctaaatgttctgtcacatctagcttttatttaatagagttattagatattaggaggttggtttgacctggaaattatttaaatggggtttgattattatgtaagtgtgtactaattttctgcttctggaaaaaccactttgtgaagttccaggtatctttttgctttgttggtttctagtttaattctattgtgggtagagaacattctttatatggtttgttttatggcccacaatgtggcctgtgttggtgcatgtcccatgtacacttggaaataatgtgtattctgctcttgtaggatgtagcattctgtaaatgtcaattaggtcaagttggttgatagtgttctgtatatacttacaattacagatattcatattcttactgatgtagttactgattggaagggtgatagaagagtgttgaagtgtgcaaatgtaattgtggatttgtttctactttcagttctatcaatttttgatttgtgtattttgaagatctgttgttggatgcatatacatttaggattgtctgatttcttggtaaattgacccgtttgtctttatataatattcctcttcaatttctgataatattccttgtttgaagtctactttgcctgataatattttagttttagttatttatttagctattttagttttgctttggccagtctttgaatggtatcaacatataattttcgtagagtaaaattccctttttttagtacaaattctgagtttcgacaaatgaaactagccatgtaaccactagtagcaccataatcaagttataaaagtttaattactcccccaaaagtcacctttactttgtagtaaaccacttcttccattcccaattgcgggcagccattaatctgtttctttcttcctagttttgcctttcttggaatgccaaataaatggaatcatacattattattattttgagagagagggtctcgctctgtcacccaagctagagtgcagtggtgtgattatagctcactgcaacctgaaactcctgggttcaaatggttttccccagtagctgggtctacaggtgcatgccgccatgcctggctaatttttatgtattttttttgtagaaatgggggtctggctctgttgcccaggctggttttgaactcctggcttcaagtgatactccatcttcggcctcctgaagtactggcattacaggcatgagctattgcacctgggttatgtaaatttttcagtggcttttaaacctcatataatgtttgtttgttggtttgtttttgaggcggaggctcgctctgtcacccaggctggagtgcagtggtgcagtctcagctcactgcaacctccacctcctgggttcaagtgattctgctgtctcagcctcccaagtagctgggattatcggcatgaaccaccatgcctggctaatttttttatttttagtacagatggggtttcaccacgttggccaggctggtcttgaactcctgacctcaagtgatccacctgctttggccccccaaagtactgggattacaggcatgagccactgcatccagcccaatatagggaggtattaagaaaagagaagaactatcatccttaagtattaacgggactttaacaaattaaaaaagtagtactttgaataaaaagctgtcacattttactgtgaaatccttagactttttttatacctctagttcaggttttttcagctttggcatgaatgatattttgagcaagataaatctttgttggagttgtcctgtatattgtaggatggttaacaacatccctggcttctacctggtagatgacagtagcacttaattgtaacaaccaaaagtgtctccagatgttgccagttattccttctggggcaaaattgttcccacttgagaaccactgctctggttaagtagtgtaatacttggaaatagaaggcagaaagttggtaagtgcataaagaattcacacagaagttggattagcaagctgagagacgttatttgaacaagtagcaattggaggcattttgactgagaatggatgttgtgcctctccctcactctttcctcctcagcttgagaggtccatattctctcaaagtttgactctttagttttgagggtgatgactgccaactgtggaagggataaacagatttctgtttggtatttttgtccaaatatatcaggactttttcaagaacaggcaatgaaattattgatcagaactacttggtggttctgagaaaataatatgctacatgaggctactgaagtcctcttccttttgccccatgatgtaaccttaggtgactttcttctggctttcagttgaagatcttacccatcattgaggtgagcgaactgatttactgcttgagtctattttcttccttaaaggagtcttcattgaaaactttacccattttggggtggccatagctgaggatgagttttgtccacaacctgagacaacatactcactatgtaaaaaacctgatctcagcttgatatctggttttagactaattgtttaatagaataatttattattgtaaaatatatataaaatttaccatttttaagtgtgtaagtcagtggcattaagtacatttacaaagttgtgcagccatcaccactgtccatttctagaagtgtttcatcattccaaacagaaacactgtacccattaaacaataaatctccacatccccttgcctccccagatcctggtaatctccattctattttctgtatctatgaatttgactattctaggtttttcatgtaaggtgaatcatacaatatttgcccttttctgcctggcttattccactcagcattttcaagattcattcatgttgtagcatgtgtcagaatttcattcctttttaaggctgaataatattctagtgtatgtatatatcacattttgtttatctgtctgttgatgggcatttgggttgttttccttagagtctttatatgtcagtaattcttaaagaatttaaaagttgtagaaactaggaattttgtagatattctagaaatatgtcatttcctgtactgtatataataatttattctacagactaattactgtgtatatatttggttctcagacgtgattttgattttgtagatgctgtacatgctcttcacttcattaatcttttccttttgctaattttggttcttgtgtatacagaattatagagttacaaggtaatttagttgttacctaattcaccctaaagtctacatgaaaccactgtcacagtctttgataagtagttaccaaatctcactatttctactgtgatagtgaatgactttcattgattagctttctgaaagaatagtttatcttacttgtcttggtatcctcacctctgagtctatttgtctattgtaatctggcttttgctccaccgctccactgattaaatggatgagctaagcatttttttttttttccactgcaacctctgcctcccgggttcaagtgattctcttgcctcagcttcccgtgtagctggtattacaggtgcccaccaccatgcctggctaattttttgtctttttagtagaaacggggtttcactatgttggccagactggtatcgagctcctgacttcatgatccaccccaaagcctcccaaagttctgggattacaggtgtgagccaccgtgcttggcccaattctgtttaatttttgaggaacaatgttaacttctaatttaaatggaaggtagtatatatctaatttttccctattatttttaatttcaatgctagtaaatctttaaatctgaaatacacactcttgaattttgacagatatgtatactcatgtacatatttatattcctgtaatcatcagatcaaattaaacatttttatcacttagaaagtttcctcatgcctttttccagtaagtcttctgcttcacttcgccagatgcaaccaccattctgatttctgcctgtataaattgattttgaactttcctataataagttgtgcttgaacttcacacaaagggagccatacagtatctactatttagcttttggcagctttcatacaacatgttgttttggagattcatccgtgttgttatatgtatcagtagttcttttatttaaaaaatgctgtttagtattcagttgcatgaatataccaccgtttgtccattctcctgttaatgagtatttgcaatgtttccagtttttgagtactgtgaaagtttctatgaacatttatttatttagagatggagtctcgctttattgcccaggctggagtgcagtggtgcgatctcagctcactgtaacctccgcctcctgggttcaatcgattcttcagcttcagcctcctgagtagctgggactataggtgtgtgccaccatgcccggctaatttttctatttttagtagagacgggatttcaccatattagccaggctggtcttgaattccttacctcatgatccgcccgcctcagcctcccatagtgctgggattacaggcatgagccactgcacccggcctgaacatttatttactggttttttttgtgtgtgcatgtgtgtgcaagttttcacttgaataagtgcctagggagtggaattgcttggtcatatgtgaactgtttgttttaactttataataaactgccgaagtattttccaaagtggttgtacagttttacccgaccgccagcaacgtgtgaggattctgtttggctacattcttgccaacatttgttactatcagtctttttcatattagacttgctggtgggtatattgtgttttattgtgattttaatttgcattacactaatgactagtgatgttgaacaccttttcatatacttattggtcatatcttttgtgtagtgtctgctcaagttttttgcctatttttaaatttcttttttccttattattgatttgtgagacttcttaatatattctgaatgtacgtcctttgtctgttatatatgtggtaagtatttccccccagcctgtgttttactactttcattttattaaggtatcttttgatgatcaaaagttttaattttgatgaaggccaatttactattatttttcttttgttattaatgccttctctgtcttgtctaggaaatcttgatccttaccccagactgagttgtgtgtcctctcccttttctgcattaatattgcagaaattaattttttggttttagaaaatgtctaatttggctcaatcagtaatttttgatatctttctattgaaatatatatacagaaaagtacatacataaatcataattgtactgtgcagtgaatttttacaaagtaaacatatccatgtaatcaccatctagattaaggtatagaatattatcagtgccctccaggccgcctccttattccctaccagtcattaaccacccctcccaaaggtagtaacttgtatttaacttctatcttctacatcagttttgcctgcttttgaatttaatgtaaatggaatcatgcagtgtgtactttttaatatctaacttcgttgctcagaattatgtttgtgagattcatttatgttgttgcatgtagtagtggttggttgttttcttccttgttatatatattccattgtggggctctacctaagtctattcattttatacttgatgaacatttgggatatttttattgtgatgtattatgaataatgccaccatgaagagtcttgtacatgttttttggtacacatacatacttaggagtaggattttcagggtcaccaggaaggatatatttaggctcagtgaatactagcaagcaatttttaaaatgcggtcaatataatccccatgtgtaaaataaaggtgtacaaacgcacacacacacacttgctcatatgcttatatgtgcatagaaattccttgaaaatactcaagaaatgcttcacctctggtaagggataggaatggaatgggtcttttgtttagtatcctatgtgccctttgaattttgttttactgtaagtatgtatttttaagaaaaccaactagttatttttaaaaatcatttgaaagtcttcctactttgatatatgaaaaacactggttttaaaaaaaataatagaaaagctttaaaatcattattatttttttgagacggagtcttgctctgtcgccaggctggagtgcagtggtgcgatttccgctcaccacaacctttgcctcccggattcaagcaattctcctgcctcagcctcccaagtagctgggactacaggtgtgtgccaccaggcccagctaatttttttttttttttgtatttttaatagagatggggtttcaccatgttggccaggatggtctcaatctcttgacctcgtgatctgcctgcctcggcctcccaaagtgctgggattacaggcgtgagccactgtgcctggccgctttaaaatcattaatgttgcgttgctcagttatgtctaattgacagcccaaacatttacattgtaatattagaaaatcctttatgattgggcagaaacttggtttaatgtgtcaccttggagacctgggttatagtcctgcctcttccattaactacttgttgaatgtggacaatttacttaacctttagggccttaatttcctcctttataatgtgagaatgttctctgaattgcataactcactggccttacgtgactattcagtggaataataagagagaaaaactttgagatacatgcacacacacccttaagaaggatataattgttaaattttgctttgaggaaataaaataatctaagctataaagtaaaaccataattagctaatcttttatatgacttttttcttcctcatttcaagctaatgagaagcaaacaaactggatagcagcaatataattaaaaaattataggccagcttctagcatgtattcttgagtcaatactgactcagcccagtctcttcctcttccttcatcatcatttatgtacctgaacagagtagatgtttctcttgatcctgggcctgttcgccctcagatccattccttgccttctcttctctttttggtatagtgaggagctgactctttttttttttttttttttttttgagacggagtctcgctctgtcgcccaggctggagtgcagtggcgggatctcggctcactgcaagctccgccttccgggttcacgccattctcctgcctcagcctcccaagtagctgggactacaggcgcccgccactacgcccggctaattttttttgtatttttagtagagacggggtttcacctttttttagccgggatggtctcgatctcctgacctcgtgatccgcccgcctcggcctcccaaagtgctgggattacaggcgtgagccatcgcgcccggccgaggagctgactcttgcagcctccttttcttcccaggcttccgtgtcagcagtttctggctggattagcaagtggaggaactggcaggagattagaaggcaagaggaaagagaagacagggcttccctccccgaccttcaggcctcagagtcgtagtggttttttgctcatgcagacttctgatttgtctcaccattccctgttgggcctctcatttcttccattgcctgttctctgcattaaagtccttgtgtttcaaatcctcaagtggctttttgttaggctttgactgatacagggctcaaaatgatagtaatgaaaatgtcttacatttatattcttttcaagatttgttatctcttttgataccccaaatatcctattgaggtagaaaagtgttataattcctgtttggcatgaggaaattaacatttattgaatgactattttcagattctttggattttcgggtgaaaattttaggggggataaatggaggcccagagaagtgaaataacttgccctaggccccatagaaggctggtattgaatcaagattgaaattctgcatgtgaaaacttttacgtgctacatgtctgctagtcctggaagaaatcctttctttgatgagtattttttttaaaggctttacttgcaatatatttacaaaagccttagttatttagtaaatttttcaatgaaaaatctgaaccataataattttctgcttagtacttatatagctagcatactatccctagcattaatcaaagtgtcatgtaaaggtttgatttttgagcctaagcagaatttgaaattcttctaagagaatttagcacctagggcaaactacaggggagaattcttgaggtgtcatgtttattcacttctggaattgtttaaaatatgtcaggtgcatccttaaagggagaaagaagggggaagagatgttacaaaagagtagaatggggcaagagaagtggcaagggagtattgttgctaggttgccagccttctgcccccactgtcttggtgatggtggaggggtagtgtggcagctgggatatgaatgaggtcttttttataactcactaaaagccattaccttgtcttcatctcgtcagctggctacctgacctctgtggtaacataggctcctgaaatgtagcattggagatgatcactgtgctttattgcaaaataggggagactctgctctgcatttacatgcttatgttttgtggaggatctttcaactagtaattctcataatacctgtgaaagcatataagaaccagtatctccatttttagggggagttggagtgagcaatgatttggaataccagaaattcaacttatatatttacaggtaaaattctaattgtaaattcaggattcatagattctagggatttctgaggtatccagaattccttcatctttgatgataagtagataataatggtaataaaaataacagcaacaggcccagcacagtgacccacacctgtaatcccagcactttgggagactgaggcaggtggatcacttgaggtcaggagttcaagaccagcctggcggacatggcaaaaccccatttctactaaaaatgcaaaaattagctgagcatagtggcatgtgcctgtaatcccagctactcagtaggctgagtcataagaatcatttgaatctgggaggtggagattgcggtgagctaagatcgcgccactgcactccggcctttatgacagaactcgactccatctcaaaaaaacaaaacaaaacaaaacaaaacaaaaacaaaatgcaaaaaaacagcaacaataataggtaacatttctttaaggcctactatgtaccaggcactatttgaacctctttatatattaggtaatacgatacaactctatgagaatgagtattttatttcctgacccttctatttaaaagtaaaaccccccacccggcactgtttctctttcctgctttatttttctccatagaaaaatatcactcataagtgtaacatactttattatctgtcctgtgtggtagtagcccctgccctcaattataaactccatgaaatcagggagtcagttttgttcactgctgtattcccagtgcctagaacagtgcctggaatcatggtaggtacccagcgaatattggttgaatgaatgagtcttggttttacagatgaggaaactataaatttcccaggtcacacatttggtaataggacagttgtgtacactgaaatgttctctaaaatatttgatggaacgaaaattagcttttggacagctacatctccaagagtgtgaaatgaccttcagcactggatttggtggattttcctttttctaatccctagagttccatttaatgagcgtttgggttcttgagctaccttacaaattgaacacttttttctccagctttcactcaagaaacacaaaacatggcttgtcctttttttttttttttttttttttgagactgggtctcactctgtcacccaggttggagtgcagtgcacaatcatggttcattgcaacctctgcctcccaggctcaagcaatcctcctaactcagcctcctgagtagctgggactacaggcttgtgcctccactcctggctaatttttttgtattttttgtagagatggggtttgtccaggctggccttgaagtgctggactcaagtgatccgtccacctgggcctcccaaagtgctggggttacaggcgtaaaccactatagctagccctgattgtcttttattgtgagattttaataacagctaagacttgaaaattaacattttataaattttcttttagactacttagtgatatactaagtatctaaggtttgtaatacttagtataaactcaaaagggttcagtgcctcattctcttttactctttccctttagtagataggtgacagaggactgggtcatgcagttgagacttggtccaagatgacttagtaagctacttgtcccagaactatttatttatttacttatttttgagatggagtctcgctctgtcgcccaggctggagtgcagtggtgtgatcttggctcactgcaacccccgtctcctgggttcaagcgattcttttgcctcagcctcccgagtagctgggattataggtgcccgccaccactcccggctaattttttgtatttttagtagagacttggtttcattgtgttagccaggattgtttcgatctcctgacctcatgatccacctgcgtggacctcccaaaatgctaggattacaggcgtgagtcaccacccccggaccctggaactatttatgacggtgcactttatgcacttaacacactcacatgtctttaagcttggtgactcgtgtggctttttcgaaggagatttgattctggaagtggttaagtaggatgtgaatggctaaggtctggtcattggtgaagcctaggggaagaaaagaaaggaaacacaagtcttagaagaatttcagatcggccccaacgactagaagggtggttctactaagaaaatgtgtgtagtcagaaaatgaagagtcagttgcttaaaattttactttttttcttgttcctggcatgtaaagtcatatccatactttctgttataatttcttcttacaaattccattgataatccctattcttggatagcaatgagcagcattacttcttttttatttttttaaaaaaattaaattttttgttgaaatgagggtcctgctgtattgcccaggctggtatcaaatttctgggctcaactgatcctcctgcctcagcctcccaaagcgctgggattacagttgtgagccagtgtgtctggttgtaccttttaatttttgtgttcaggcaacattaactctgagtcacagtaagctttttttttcttcctgtcatattatggacatagaagttttttggttttctttagattgtttctccttaggttgcagaacatcaagaaatggattacagtcattttcctctcttccccatgctcttccctttcttttccttttttcttttctttttttttttttggagacagaatcttgctctttggccgaggctggagtacagtgtcatgatcttggctcactgtaacctccccgcaccaggttcaagtgattctggtgcccaagcctccctagtagctgggatgtcaggatgcgccaccacaccctgctaatttttgtatttttttgtagagatggggtttcaccatgttgtccaggctgacctcaaactcctggactcaaatgatctgccctcctcggtctcccaaagtgctgggattataggcatgagccaccacatctggcctcttttccatttttaaaaaggactgtctccaacatattaaaattcacaaaaaataatataaacacacatgtactcactggctaggcttaataaaaaacatttagtcatgtttactttaaagctttttatttttttgagaaataggcattaaagagttgaagtctcctttctgtcttttcataattctgttcttccctcttccttccttgagatcttcactattcttgggttaatttggatctttctactccttgttaccacagaaaagtaattcttaatgaatttgaccatattttaaacttctgatttcagtgggcaggtaactcattttatggtttctgtattgtgagccattttcaatgactcaactagatttttttcatcgttgacttctcatttctgggcaacagcataatgttctcatttgagctatttctaaagattgtgtttaactatttaaaatatttgtggtactctgatcatcagatgtgatttttttttttttttgagacggagtctcactctttcaccaggctggagtgcagtggcgcgatctcggctcactgtaacctccttctcccaggttcaagtgatgctcctgcctcagcctcccaagtagctgggactattggtgcgggttaccacacccggctaattttttgtatttttagtagagacagggtttcaccatgtttgctaggatggtctcgatcttctgacctcgtgatctgcctgccttggcctcccaaagtgctgggattacaggcgtgagccactgcacctggccagaagtgatattaactatcttatatgtatatttctgttgcgggaagtcaggggccccaaacggagggaccggctggagctgtggcagaggaacgtaaattgtgattatttcatggacacttaccagttcccaaataatattcttataatttcttacacctgtctttaatctcttaatcctgttatcttcgtaagctgaggatgtacctcacctcagggccactatgataattgtgttaactgtacaaattgattgtaaaacgtgtgtttgaacaatatgaaatcagtgcaccttgaacagaataacagcaattttagggaacaagggaagacaaccataaggtctgactgcctgtggggttgggcaaaatagagccatatttttcttctttgcagagagcctataaacggacatgcaagtagggaagatatcgctaaattcttttcctagcaaggaattttaataatactctggagaaggaatgcattccttggaggaggtctatagggcatgtctgtcttatgctgttgacataaggactgaaatacaccctggtctcctgcagtaccctcaggcttattagggtggggaaaaaaccccaccctggtaaatttgaggtcagatcagttttctgctctcaaaccctgttttctgttgtttaagatgtttatcaagacaatttgtgcaccgctgaacatagactcttatcagtaattttgcttttgccttttgccttgtgatctttgttggacccttatcaggagtttctgattttgcccttgtcctgtttcctcagaagcatgtgatctttgttctcctttttgccctttgaggcatgtgatctttgtgacctactcactgttcttaggccccctccccttttgaaatccttaataaacacttgcttattttgcagctcaggtgggcatcacggtcctaccgatatatgtgaggcccagctgtgaaattcctctcttcgtactcttatttcttagccggctgacgcttatagaaaatagaaagaacctacattgaaatattgggggcaggttcccctgatatatttccttagtgacattcctgcaatctcctttagaaagtctttctgttcaccttctataaccagggaaggagagattgagaagagacgaaggatgattttatgtttttcagtcccagtcattatttgatgagaaactgatattacaagctttaaaaactcaagatatgtattcaacatgtagtagtagaacaagtatcttagtttaatagtctataaatttttgatgcactataatatattattgtagtcagtagcatcaaaattttaatgtgatattgcagtatgtttatggttagtttagacatgaggacagtgctaaaggagaaaatctaatgactgtgttgtttgttttgtcaaaatatgctgcctagctccagagtttcctattttggagaagcagaactggttgattcatcttcattatatccggaaagattatgaagcctgcaaggtaagagattgccataataataaaaatgagaggcaggatgttgggtaggcaactaacagtgcctgctaaacagagtgtggcagtttatatctcagtgataaaacatgaattccttcttccccatacttcatacactggttatcttttgctatggtagtgatgtttaacatacaacctcaatatttcagtggcccccaacaaacaaatattaattgctcatgggctttcagatcagctgtgggttggctgggtttgactgcaggctgtgggtcaggtttaggtgtgttccatgtgtcttctcatgtcaagagcaaacaactctcttggacatgttggtcttctggtggaggcagatgttcaactcagcatattaacttttttatctttggatagatgaaaaatggtattttgtcgagtttttttttttttttttttttttttgagatggagtctcactgtcacctaggctggagtgcagtggcatgatcttggctcattgcagcctttgtctcccaggttcaagcaattcttctgcctcagcctccccagtagatgggactacagatgagtgtcaccatgcccagctaattttttgtatttttagtagagatggggtttcaccatattggccaggctggtctcgaactcctgaccttgtgatctgcccgccttggcctcccaaagtgctgggattacaggcgtgagccaccgtgcccagccctgagttttattttttaatttctctcttactgcaaggttgatcatcatgtgtatatttaaaaaccatttgtatttccctttctctgtatctttggtgacataccatatgtgttacaaacttgcaggcagacagtggtagtactaacatgcagaatgtatccttggtgtcatcttttttggtatccagagctttgtgacccatctaaggtttttaatttatacccatggcatttatacctatggcaatgcacagaactaattcatactggtatgacaaagattcataccagtttttttttttctttttttaagtggagttttgctcttattgcccaggctagagtgcagtggcgcaatctcggctcactgcaacccccgctttccagtttcaagcaattctcctgcctcagcctcccaagtcgctgggattacaggtgcccgccaccatgcccagctaatttttttttttttttttgtatttctagtagaggtggagtttcaccatgttggtcaggctggtctcaaactgctgacctcgtaatccacctgcctcagcctcccaaagtgctgggattacaggcgtgagccaccgcacccggcccataccagttttttttgacaccgctgatccgaaggcagataccagtatgaatctttttttttttgagatggagttttgctcttgtcgccaagggtggagtgcaatggcgtgacctcggctcaccacaacctccgcctcctgggttcaagcgattgtcctgcctcagcctcctgagtagctgggattacaggcatgtgccaccacgcctggctaattttttgtgtttttagtagagatggggtttttccatgttggtcaggctggtctcaaactcccgacctcaggtgatctgcccgcttcggccacccaaagtgctgggattacatgcgtgagccaccgcgcctggccaccagtatgaatcttgaaaggttctctttctttttcatctgtgataatacttggaaatcttatcacacttttcttagcttgcctagttagattttagacaggggttggcaaactttttctgtaatgggccaacaatattttagggtttgtaggccacatacagtctctacatcatatttgttatcttattttttataaccctttagaaataaaaaaaccactgttagcttgagagctgtacaaaaatatacagggcctgtaagccctgtagtttgcaaatccctgttctagaagaagtaatcacaacaagggagttgaaattttaagaaactgaatgaactaatactttactaggcattattaatactctaggtttttttacatatgattcttgtccacgtctgctttttcattactatttgttttcttttttttttcagacagagtctcactctgttgcccaggctggagtgcagtggcgctatcttggctcactgcaacctccgcctcctgggttcaagcgattctccttcctcagcctcctgagtagctgggattacagacacgcaccactactgcccggctaatttttgtatttttagtagagatggggtttcaccatattggttaggctgatcttgaactcctgacctcataatctgcctgccttggtctcccaaagttttgggattacaagcatgagccaccgcacctggcctgtccatgtccactttttcttaaagacacctgaagaaacttaaccactgctcagaagcatttttctccctctttcaggctgttatcaaagaacagcttcaagagactcagggattgtgtgaatatgctatctatgtccaaggtaagacacatacttcttgtcttcttgctagagaaatacacttttcctaggttcttgaaaaagatcaggcaattgaagaaacaagttcaagtacagtcatgcaccacttaacaatggagatatgttctaagaaatgtgttgttaggcaattttgtcattgtgtgaacattacatggagtgtacttacacaaacatagatggatgatatagtgtactatacacatgatatagtctgttgctcccaggctacaaacctgtatgagcaggtgttataccgaatactgtaggcagttgtaaaacagtggtaagtgtatctaaacatagaaaaggtactgtaaaaatatggtataaaagataaaaaatagtatacctgtatagagtacttaccatggatggactggaagttgctctgggtgagttagtggtgagtgaatgtgaaggtctaggacattattgtatactaatgtagactttatgttgtatactaatgtagactttataaacactgtacacttagcctacactaaatttatttaaaaatattttttctacaatgataaattaactttagcttactataactttttactttataaactttaaaactttttggctcttttggggtaatacttaaaacacacaacaacattgtacatttgtacaaaaatagtttctttaggtccttattctataagcttttttctttttctttcttttttttttttggtagagagacagagtctcactttgttgcccaggctggtcttgaactcctgggctcaagcagttctcctgcctcagcctctcaaagtgctgggattataggcatgagctacgacacctggccctttatgctattcttaaaactttttatttttttacttttaaacttttttgttaaaaactacgatacacacactactacagtggtggtactaacatgtggaatgtgtccttgctgtcttttttggcattcagagctttgtgacccatctaaggtctttgtgacacacacacacacacacacacacacacacacacacgcacacgcacgcacgcactggtctaggcctacactgagtcaagattataaatatcactgtcttccacctccttatggaaggtcttcagtggcaataacatacatggagctgtcatctcctataacaataggaataccttctggaatacctcctgaaggatctgcctgaggcagttattcttttttttagtaagtggaaggagtacactctaaaataaagattaaaatgtatagcgtagtaaatacataaaccagtaatgtagtcatttattatcaagtattaagttctatatatatgtaattgtatatgctgtacttctatgtgactggcagcacagtaggtttgtttataccagcatcactacagataggtaagtaatgcattgcactgttttgattgctatgacgtcactgggcaataggaatttttcctcttcattataatcttaagtgatcatcatcatttatacagctgtcgaccaaaatgtcattacaggtgcatgagtttaaatgttccagaaaggttttattcagtattaatctttttatggaatctgaatataattactgtgttggatttgacttcagaaatgactagtaatgttaaaaaattgctatgattacccattttttagtttctggctagtgttttttggaatggatgcttaggattcctgcctaatgcagtgatttcagggccaaaagatgcttttggaaggattgcttgtaatcaagctaaaagagatgaagaagagcttgaggatttctgtaaggtgaatcaggatgaggggaagaagcctggaaataaacaagataaagcagagcataaattcagctcattagaaaccaaagataaggaccactcacttactttttttttttttttttttttttgagacagagtcttgctctgttgcccaggctggagtgcagtggtgcgatcccagctcactgcaacctctgccttccaggttcaagcgatcctcctgcctcagcccccctattagctgggattacaggcacatgccaccatgtccagctagtttttgtatttttagtagagacaaggttttgccatattggccaggctggtctcgaactcctgacctcaggtgatccacctgccttggcctaccaaagtgctgggattacaggcatgaaccactgcacctggcccactgacttaaattttcctctttagtggcataagtagcattcttagtttttccaggaactttctttttgactcttgggtgtaaataaatggttttgtttaccattcattgcatttgtagtcttcagattaacatataattttctgacataattgttaagatattgacaaatttaggacatcatggcaaaaaatgctcttattcccagtgtcacaagtatcagactttcagtgcctgataaattcttctggaaacataggcctaggaaaaacctctggttctaattggttgttacactgacaactgaagtcttaaatgttactttatcctttgccagaatctccatgttgaatttgaggtattgattccatttgccccatttgggggttcgctctgaaaactatcagttggaagtaaattatgataaatgaagcatctgatggggaagccccaaaatgttgttaatgtgaagagtttgtgtgataatttgcaaaggaactgattatctatgtgatggatcctgggagtagagagagaagtaggtaggtttgagctaccttgctaaaagacagttgagcttgtcagcagttttggttgttgtttcagcctgtccaaagccatatctgattgttttaaggatacagttgtccaaaggatttacttgatgtggtttcccagttttctcttctccaatttttctgaccccaggctccattcttcccagaacatggttttacttttttttgtattttctgtttcttggcagcattgatatttcgcctagaaggaaatatccaagaatccctagaactcttccagacatgtgcagttcttagtcctcagagtgctgataacctcaagcaggtggccagatctttgtgagtattggcaacctggaggccctagggcactcacagagaacagtgtaaaatgcattcctaggtccagcctgctgctggcagctgcatcagcctgatacacaagtgggggaatggtttaataggtacagtgggattcactctgaagagcatggattaagtttgaaatttgagaaaatgagataactagtgttaaggaactaagcattttaaacactgtgcattctagtttgatgggggaccaatattgtttatcatgtaaatagagacaccttgtaccctaagtcttctaaacttattggcaatccttggaatttttctcatctactcttctaacacttagtatttgtcacacagtaagtttttagtaaggacagagagttcctgacttctgatggttcaacttacataatttttcaactttacaatgatgtaaaattgttatgtattcagtagaaactgtacttcaagtatccatacagccattccgtttttcattttcagtatagtattcagtaaattacatgagatattcagcattttattataaagttggcattgtgttagatggttttgcctaactgtcagcaaatgtagttaagaaagtggagataggaactccatggaacagagtaagtgttctgagcatgcttaagataggctaggctatctatgatgtctggtagagtagatgtattacatgcatttttgaattacagtgttttcaatttacaatgggtttactgggatgtaaccccatcataagttgaggagcatctctatttgttgagtgaatgtcctaaagattcctagatggaaagaatctcaagtgtttataaactactaggtactcccttttcagtcctttgttccatggagttcctatctcccctttcttagccacattgccattcatacctgtgttgtttttgcatagagcttggttttccctgtttctctctaaactcaggatccaatatcaaggaaagagacttagtcttggaaggaaaggatgtgtccctaatgggtgatgataaatgatggtagttactgcttaacatggtatatcattaggcttatttcttttttggtctgcatttatagtacattgtagaagaaaaattccacaagactctcactaaaattggtatagaatgagaccaaggccttggaacagctgccagtgcaatccctactaagagagcttctgctgttagtgtatagcagcttcactgaccaaaccagcacaaccacctcatagagaaaaggcttctagaattctctgctggatgaaatatgattaaaatgtgggactagtagggttagtcttctaagaattttgaggtaataattatggaaaatatatcttttacagatttcttttgggaaaacataaagctgccattgaagtatataatgaagcagctaaactcaaccagaaagattgggtaagtagagaactttcagttctttcttattagtaaacttgctaatggttccatttatcatctggctgtcttatttctgaattcttacattccaaaaatgtcttgattttaacctcatacttaattcatgatttgtataagtataggatcaaaaaccatgtttcctcataactttgcaggcattgctgcatgattttctagcagtttgctgacgagcagtctcttaccagtctgattcttgttgatgacccctagaagctttgggtatttttttcgtcattggaattccacagtatcagcaataggcatctagttgtgtttcatgtctttttcccgtccccatctgtgtgacattcaattgactctttcattctgaagacccttgcctttctttgggtcagggcctttgagtagttctttatttttcccctccccttctctttgtgtcaattgaggattgtgtgtaaatgcaacagaaaatttgactaaacattggctttacaaattcgtttttgtttttttttttaattctcatgaaacaagatgtccaggtaagtagttgctggcattgatttggtggtcctaggatgtcaagactgagagtttttcctcatggttacaagaagactgctgcatccagcatcatatctgcattctagggaggcagaaagagaaagcaacaaggagaaaaggacagagcctatactgggaaagcacaactttcccagaagtcccccacagacttccacttatgtcatatcagctccccttctataaggaaggctggttaaatgtcgtttttaatctggtcacactgccactctaaacaaaattagggttcttttagtaaggaaaaagagaagagtaggtagcaggtaggcaagtagataactagcagcatctgccacactgttttccattctctatgagagatgttctctaactattctctacaactcttaacttgcctctcattttctacctctgtgtccttttctttgtgtgtggtgcgggggggtacagaggctcactctgttgcccaggctggagtgcagtggcgtgatctcggctcactgcaacctctttcttccaggttcaagtgattctcctgtctcagcctcctgagtagctgggattacaggcgcctgccaccatgcccggctaatttttgtatttttggtagagacggggtttcaccatgttggctaggctggtctccaactcctgacctcaggtgattcacctgccttgtcctcccaaagtgttgggattataggtgtgagacaccacgcctgaccctccttgtcattttattatatgttcaggacatgtattcagtcttatcttccatatcatcatttttgtttttagctatttgtattctgttatataccctatccatccaatattttttatttcatttccttttattgtatttttaatttccaaaaatcttgtcttttcttcaatgtctctgattcttgaagttcttttctgcttctcagaattatctttttcttcctctctgcattttggttcttctattttatgctgttggtatttttcaagtatttggtgattctcagagagacattcatatctgtgagtgaagaactagatttattagtacagagaattagcatggatttcctttgcagttcttacggggcactattatttttgaagtgtgttcaatttgttagtcgcttttcttctgtacatcggaagattgagttgagtctttatgccatggagtatgttatagctaacagccagagtgaaactacagatgaagaaaaattcatgtacttttcattcagtcggtttttcaaaaaatgagtatgtctgctatatgccaagcactgatctatgccctggagatgcaaagatggactgttggattataagatactcaactagaataggaaatgaaggaagaagagcaaggtttggaagaaggtgatggtaagaaatcagagttaaatcctgtctttcagaggattttggatatgataagttttaggttctgaggggatatctaaattgagatgtgtccagtaggattggatatagaaatctgaaactcaagtgttttggagtagagatgtgaattctggagtcagcaacataaaggtggtaattgaaaccattagattggttgacattaccctgcaatgagctgaggatgggaccctggaaaaaaagagttttttactttttttttgtctgtttgagacggcacaggaaaagttactgctttaatgcagggaggaagccctgcattctctatgggggccaggatcatgggggtggccagtgccacaaatggtcaccatacaggccagggaggagccagggcccaccaataatccctggaacatccctggatgctagcagttttttactttctaaatttttttttttttttttaagagacaaggttgcctaggctggagtatagtggggtgatcatagcttactgtaacctccaactcctgggctcaagtgatcctcctgcctctgcctcctgagtagctggggctacaggtgcaagccaccatgcctggctaaatttattttgtggaaatgaggtctcatgttacccaggctggtctcaagctcctgtcctcaagtgatcctcctgctttagcttcccagagtgctgggattacaggtgtgagccatcaaaaagcaattttgaaggactgagcagaagaagagaacccatagagggagatagggaagaggtaaagcaggagagctcagggtcacagggggaatggaacgtatttcttaatctatccagttggttgaaagagctcatttggtattactgactcacttgggataaccatcccattgttactagtagatgtgatcattcacaaaacagccattctttttttttttttttgttgagacagagtctcattctgtcacctaggctagagtgcagtggctcaatcttggctcactgcaacctctgcctcctgggttcaagcgattctcctcccccagcctcctgagtagctgggatttacaggcacccgccaccatgcccagctaatttttgtatttttagtagagatgaggtttcaccatgttggtcaggctggtctcgagctcctgacgttgtgatccgcccaccttggcctcccaaagtgctgagactacaggtgtgagccaccaccttttttttttttaactttaaaatttttctttaaaattttccccttcatggcatttttattttctttttagaatattttaatgattttgaattttacttttattaatagcccttacctaccctacatatttcataagtacctgtagaaaaccttatagtagctggagcatggtggctcatacctgtaataccagcactttaaaaggatgctgagtggggaggatcacttgagcccaggagtctgagaccagcctgggcaacatagagacccagtttctaggaaaaaaaaataaaaattagtggtcgtgtgcacctgtagtcctagctattctagaggctgaggtaggaggatcacgttagcccaggaggttgaggctgcagtgatgcggtgaactgtgattgtgtcactgcacttcagcatggaaagcagagcaagaccctgtctcaaaaaaaaaaaaaaaaaagaaacaaccttgtagccctactttcttggactcatcagggtattccacagtcttgctgcaacaggggaatagtaattcctcctgccattatcttagttgacttttggaacagttctgttaagtagggagaatttcccccattgacaagtgaggaagctaaggctttggaagatggaagttgctacagtgaggtagttgctgagccagaactggaattcagacctgtgatctaggatgatctaagattcctcgtcttaagactgtgatcttttccactgtaccaactgcctttgcaggatgtctgctgggttcccttacctcctgaaagataggatttgactctgatttgttctgttgccctttccaaatttcttttgcagttagtttgttaaaggtatattgctgccttctcaactatctatgtcaaagattttaaaaggtcagaggttagccttcaggacatctatttacttacctaccttaacaattcctactgtagagcaggacatttaaaggacaagaaaggctttatttctgccttgtctctctccatgcatgcattcttatagcatgacaaagttggcagtatacaagttttggaagcaggcctgagttcaaatcccaatgttctataatatggacatgatttgtgattgaataaaaaaaatttttaaatgtgcggcatttgtgagataattggaaattttaacgtaattgaatatctaatatcaagcagtcactactttttttcgagtgtgacgatgtgggtagtttaagaaaaaggccttatcttttagaaataaatacggaaacatttgtggataaaacgttgggctgttatttgcttacaaaagttgtgggagtagatggggtgtggattggatggttgttgggacaggatgattagtacctaattctgtctgcacttacgtatgattgaaattctccctaggatgtagaactaaaaaagaaaaaaaaaatcccaatactctctgtcttaagttaggtaatctactcaacctctctgagcttcaatttccttatctgtaaaattggaaagattataactatgttgcaggtttgctgaaaattaaagtaacatatatgaaaacatctggcataaagcctgatgttagtaggtgctcaaccaatggttgctgttttgttgtttttactatttttggagacttggaaaacattaaatcagttgttatctctgagcctgggggtccatgtttcctcagacagggacacatctccactactaatagggtagttcttactatgtttcccaagagcattttccttacccttgctttctccttttccaaagctaccttaaataaagggaggtttattataaaggaatttgagagtccataaaacagtatcaagagatgcaggttggtcttttagtgaagcagaactggaacgcttcagcatccaaggtagctactctgccttttctgcttcatcttttctttctgtagatcaaaggttggcaaactttttttgtaaagggccagttaataaatattttaatttgtatagcttcatacagactctgttgcaacgacttaactctgcagttctaatgcaaaagagccatacaaaaacaatagttgtgtctgtgttccaatgaatctgtacttataaaaaagggcagggaatggatttggcccatggaccatagttttcccatgtcagctctagacttctgcagatggctccaattacatgtattccatcacagcagactccaggtggcgctgtcagtcctcaagttcacatcacctagtaaatttagtacttgtaactaactagctctcttccaattccagattcctagggaaaggacttcagttgtgtcaggtgtcactatccaactgtgttgccttaagggcggaaatgtgtggctagcagccctctcagcaggggctgtgggtagtctctcctgagaagaaggagcaaagggtatgggtgatgggcaactcttaaagaaaaaaggtatggggatgggctgggtatgtgccccagggttccccatagatccaggaagatcacctgtttattctgcttttatttcttataatctgtatttttttatgttgaggaacttatttttaacaattaatttgagtatgaactctaataaaaagctgactgtaatgcatagtttaaagtttaaaccttgccgagcaataacaatctctagatgtctgttgtttcactctaatacttactgtggaattacacctgagttgttttccttcttttttatgagcctaggagatcagccataacctaggagtttgctacatatacctgaagcagttcaacaaggtaatttatagaagtggtgatagatttcactgagggtgcacttgttgcagaagttgttacattgctcatttggtattatccctagtgcttgcagaggtttttggaactgaaaattgaaagtacctttatacatttttttctgttttaattctcacttgtcattattcatctgttgttttctgcttgtaataagaacatggaaagttctagaaatatgagggaatggcagtttttctcctttcttctttttctctacctccagttaaatttcccagtttagaaacagatgcttaataaaacatacatatcaaaaagtggacccttaagtcttaaaggtgtgatcatgaccatgtgagctatctccatgccctgacggcaacttagtttttagggtcattgaaaataaattttaaattttaagtggatctgatttctgagttttcagttttaattttatagttattttccatgatgagaaattatatttcactgtgattaagctatagactcctatatcagagaagacaagttgagcttacctcaaatttggtactcaggtaagaaaaagtatatatcataattgaggagtagacaaaattactgagagctctaaaacttagtgatgagagcgttgggtagtttccttcatagagctcacagttagtgattgtgaagttttattctcctttctccgatgccaccaggactgagaatctgaattggttagtacccatttgacaatgtttagtttgtgtcaatttgcagactggtgtaactagtatcccacactggtgtgaaaaaaaatatgcacattagcagttggggtgtaaaagtaacttttctcctgagataacaatatatatacataaaatacatttagtgggccccttaggttttgtagatggatctatagttttatatacttggttaggagatttttctcttcagagacaatttcaaacaggcacatttctattcacaggattattctgagtcaggggaaaagaaggatttgtctttggttggatctgtgctgagaagaaatatatttagattttactgtacagctaacaggctaggcaaatacaatacctggcatttatataaatgcttgttgaatctgtgaatgactaaacaaagcccttttgtttactaggagaaggtaagctcctccagagcaaggagttggttttataaactcaaatatatttagcatctagaacagcaagcagttgggtgaataaatgagaacaatctatttattcatttatcatcacattgatggggaaacctggcccaccatagggaaggttgtgcacttggtcagtgttacagctgggatttagtttagtgtagtactctacactgtactatgatggcccttttgacttatgaagtatgagtcataggtgtgaatatcaggcagaaaacattcagaaagattaatcgtcttgtataaattcttccaagtggctccagaagcagatatcccatgttgccagctgtcttttcaacaaggacagttttggtatgttttggtctttgggtagtgggggctgtttgctgaaatgtgatgttcctatgtcaatacagcagaaagtgtctttacattagccatataaaggtatagttcgttcagtggtagtgatttggttttctttattttgttaaacttgtcaggcacaagaccagttgcacaatgccctgaatcttaataggcacgatctg

SEQ ID NO: 15490 - DNA, 56490 bp, Homo sapiens
agattctaggaagtgtctgtagccgcagctgcgggtccgggattcccagccatggcagattcctccgggcagcagggtgagcggcgcggccgggccaggctgagggcggctgggggcctgactgggcgctgggtgctcggctcgaagggcagcgagtccttatgtctgaggggcccgggtgcatgggttctgaggggcagctgtgtccgtggtctgaggggcggcagtgcccgaggtctgaggggtgtcagtgcgcggggtctgagggacggcacgtccttgggtccgaggggcgggggtgctcggggtctgaggggtgtcagtgcccggggtctgagggacggcgggtcctgaggttcgaggggtggcacgtcctaggatccgaaggacaacgggtgcccggctccgagggacggccactgggacccctgggactcctgcgtgagggtctgccagacccgtggctggagcacagaccccgcggggacccgagcccgagcggggcgctgcccagaccacccagcctcagtttcctcacttggttcctgccgaggtccccttgcatcctcaccccgggaggtggccctacatcaaacagcctttccccagccggtgcctgggcgggccctcgctccctcttgccccagctggcctttaggggggagacaaaggcccaagggttgttttggttttctgcccagacctggcagcttccgggaggtgggcggagggcacctgaggttggtatttagggaaatggggcagaggacgccaggggtacgcgtacacacagtaaaagggcttggggctttacgaaggctttcatctccagttccgcaggcagtccactgcaagctgattgtcagagcattactgccccattttattgccaacccgggaggttccccagggacacagctgtgtcagctcccccagtcactcatgtcaccagcgggtagaccttgagagaccagtgggttcttctctcactgtccctccagcaagattttaggtgctggaaaggcaagagactgaatcagaaagcccagattcctaacagtctggagcagcctttccaaaggaaacattctcagtatctagtttttaattcttttggctggcaaaaattagatgcaagttcttgtaagacacctccagcccccaccctcagtttagatcgtaccaagatttccttagcatctggtggtgccctttgcccctgagggtttattgggttatagataggtagttatgacaacccgagtaatctggcggcatggggacacccagatgacagggctacactcttgtgccaagtggcaggaggtggtcaccttccaggcacgccgcctaccaccctacctgtgtgcctggattccagcaccatctccacccgtcccagagccaagcggccctcagaagtcacccagattcctgtaaaacagcatcatagttaacagccccaactctggaaccaccctggaagggccagggttccaactctgcctcccgccccacagcaaaccatgcgtaatggctcctaccttggagcatggagtgtaaatgaattaatagatgggaaggacgtagaacagtgcctggcactcaattaagtgctgtgtctgtgctgaaagttagggcctgtttgttttcaaactaaaaatgtgtttttgttcatttgtgaacgtaaatgacgtattagtagtgttttgtatcttgtttttaaaaatagctttagaattttaggttttcagagccttgtaagaattgccttctttttggagcttgccatataggttgggattgccctctccgggctgtcagggcagcaggcagattgcccagtcctcagcctgcgcacagcatctccagccagtgttcttctgccccagggcatggcccacctgcctttactatcgcctcctcccatcacacacacactctcaaagatgagaacaggaaataaaatccaatcgtaggccaggcgcagtggctcacacctgtaatcccagcactttgggaggccgaggcaggcagatcacgaggtcaggagatcgagaccatggtgaaaccctgtctctactaaaaataaaaaaaaaattagccgggcgcggtggcgggcgcctgactactcggaggctgaggccggagaatgatgtgaacccaggaggcggagcttgcagtgagtcgagattgcgccactgcactccagcctgggcgacagagcgagactccgtctcaaaaaaaaaaaaatccaatcgtaaatgctttcagtgaccatcttcccagatttttcaaggaggccatcatttttgtaccatcttccctaagttgactcagaaggtctatttctctttcctgatctcactgggtgtacagcttttcctttgcggtcttgaaggtgcataggcttggtgcctgtccaagagcctgattatttcagaaggatgagtttcatttctgaggtttctggggtagatggagcctacctcagggcctttccgcacagacttgggataccacttggtcggctgctcatcaggtcagacttatagtttaatttttatacagtttaattcaagggtcttcataataacacagccagcattttttcagcatgagtctgtgccaggcactgctctaaatgctttgcatctgttatctcctgccacccttgggggaacccctttgaggaagatcctgccggcatcttgtacagatgagaatcctgaggttcagagaagtcaagcaatctgtccaccatcacgactagccagaggcacagccaggctcccaacctgggcagcctgactcaatagggaccttaactgctgtgctgtgctgcctttgatgattctcttcagactcacaatagctcaacccagtgagttaaggcagacgagaataaagctgatgcccttcgatgttttccccagagccacatgaaatgtttgctcctctatgaactcaggtaccatgtttccgggtatttgaagagccttaggcagtacccttggggtggagattaagccatttccagtgtgggtgctctgggtggcaatattgctgtctgatcaccccacaggctcattgtgagggatgttggatgcccctaataatgaataacctccctcccagtaaggaggaagatggagatgctgttcttgggggtgagagaggatgcctgggggccacctttgtgaacgagttgcagctggacctccggggctggtgatcaggacggggagtgggaggggaagccctcacctgtgggaggaggcgctggtctctgggagtgggcagtgttggctcctagttggtgagagcaggggtgcatgcccctctctcctccccacgattcatgtctgggggctttttccggtcccctttctgaacacttcttgggcagggagtggatcactgggaaggacccaagaggagcagctgtagagggtgggaccaggggaacatttgcagaaagggagtaacctgcagggtgagatgttgcctggacacccacaagatgaggaccctggtgggacctttgaagtagcagggtcagagggcaaagggtcagggtgagtgaggggtgcagacccccaccaaaccggggcacttattaggagctcagacctgctgtaaaggggtctgcattttagcaagctttccacccatggggaagctggtttaaacctcacttgctgggcccaccccagagattctgatttggcaggtctctggtgagcccaagaatgtgacttctctggatcccccaggttctgctgctgaaggcacaccagggccatgcctggagtggacctgggagagcctcaagggaacgcaggaagagaaacagggcagccgggagaggtttaaatgcttacaggaggccaggcatggtggctcacgtctgtaatcccagcactttgggaggccgaggtgggtggatcacctgaggtcaggagttctagaccagcctggccaatatgtagaaaccccgtctctactaaaaatacaaaaattagctgggcatggtggcgggcacctgtaatcccagctactcgggaggctgaggcaggagaatcgcttgaacccgggaggcagagtttgcagtgagccgagatcatgccactgcactccagcctgggtgacgagcgagactccgtctcaaaaaataaaataaaataaaataaaataaaaataaataaaaaataaatgctgataggaaagagccagagagagggagaggtcgcactgccacagttgtttgacgtgtcagggttgttgttcatttggtgtggctttgttttggtatctgtgctgagcaattgcttggtacttgcatgtgatttcaataaatgttctgtagagactccacctttgtagccggtgacaaccaccatccacctttgggacattcccatgtccctcaatgtgttgatgaactgaactgcaaggtcatccggtggtggacattccttctcatgggggcagagcaggagtttcggcacggagcgtgcaggctctacgatgagggccagtgtcgaggaacaggtccctgggaggttttcagtctgctcagaagtgttctcatctgatctcagcatcagactgatccacagcctggctcaaacccatgaccacttgaaagctgacctatttttatttgtttcctcgagacacacttaaatgcagctaccacgattacccaaatgactgtctgcgtccatctcatggaagcctgtcattctcctgtgcttccctgggcaccagcacctttctgctctgagaagatccttcccaagcatggtcttggttcccttttgatgagccgtctagcctgctctagacggtacatttaagaattatgtgatccaagatcaaggcagatttggtaataaacttttaaaataataaaattaattaaataaaaatgggtgtgtgagccctaggaaaactccaggaaattctctgtgtgtagcatgcggctattacaataacattaataataccagagcgattatgataataatgatggcaaatggggcccctggctctgtgccaggcagcttttaaacattttacaagtgtcatttgacttaatggcctgcagctttacagggctgatgttatgagcgtgttttaccgtgaggaaatgccgccgtgtgtgtgagtgtaggtactcagccctggagggcgtcggggccgcccctcaggtctccagagagcggatacacagcggcttcagttcccagactgcttcctcagcgctcaaaagccactgcagccgccgttaggacatttgatgtttttctcattttaaaaatagcagatgcttactgcagaaaatgtgagcaatgaagaaaaagagggaattaaaatcacctgtcaccccctctcatcaaccatcgtcactgtcagtgttcgggctgttgctggtggtctctccatcagaatccattctgagtgtgagaggcacgtgactgtcagctcgctgtctcagctggaagccgatgctgtgtcactgtttctcagggtgctgctgttgtctcttcttccctcttgctgtcgtggagtccaacccaggcatgagcagttgcagaagaccaaggctcagggaggggacaggggagaggaatgtggagggtcagcattggggaacagctttcgaactgtggcctgatctgtgaggggacaaggctcaccttccagctctgtccatccctctggcaagttctctaatctttagtgaacttcattttctttatcatgaaatgggacccctgctggcagctgcagagctgttggagggaaatatccagctaaactagaagtctcctggctggaagttgctctgcaaaagagtttgtaggagtctgatatttatttagagttagttttccaggacctcactttggggtgcttggagctgcctctgtgggtctgcctccgcctccgtcctccctgatctcatctccagctgggaggagagcgcatctccatgtaagcagcctccttcttctcagagggaagccccggcagtgtcagtgctgacactgggcctgtaactgtggggatggggcaggtgagaggccctcaagagctcccggcaccccccaggcgccttcagtggggccagagtccacccctgtctttctctttccttggactgttggaagagctgaagtgaaaagtgacttgttcttatgtctctggtatctttgggcagcagggctcctgctaagcaagcccctgggggctcaaagcagcagaggctgtggccggttcccagcactggtccttgtgcaggtgtctttctgagaagggtgcatgaggcccagtgccacaggggaacgccagcccaccactggtggcatgcactctgtggtgccattctgctgtccactcatctgtgccctaggcaactttagctgatatctggaatgtcacacgctcagttgtagatgctgaagatcgagcagtgaataaggtagatggagcggtggggcagatggtgaaggaaagaaatgcgggcacgtgttagacaggggtgctgcggagagaaagagcagccaggctcagggtctagaggcgggcgccatatggacagggagtccttgaagacctggtggggaagccggcacctagcagagctgtgaaggattaaggggcctgctggtatctggggagcatgccccctaaaaaaagagcagcaggtggaggggccatgtgactagggtattgtgagtcaggtgggggcccatggccagcatgaggacaggcttgtgctgctggcgaggtgggtgttgggggcagtaatgtgaacgtgcgcttttcagcagggccgctggaggcctgtggctgtgaggggagagccatgctggctacaggtggcggtgtctggcttgcaggaatccaggtgacaagggctggctctcaagtccaaagcttcttttgagttagaggccccggatcctcccgtgggttggctatgggtgctcctaaggataacttgtaaaggggtgtgattccagttttggctagggagtgtgcccagagctttgcttctgggtgcctgtggctgcttggagtgggtggccatcttattggggtcagatgggacagtggctccgtgcagtgggaaggaagcagggcaagttagagggacgctgcactcgtcatcccaccagcgagagtcatcccaggaagccattttaagccctgcatccatgttgagacttcaggaaggctctcccacagagtgcccacccctttactgcagagaagaggtggcttcaggacatcttctccggcagccacggaggctgggccttggggcatcacgtggctccgtaggctccctggcgggtgaagagctcggcccagtggggcattcttgctgctgcagctgtgcactccattctgactcatctttgctgacaccacagcgttccgggaagtgccagttattggcctgacacgaagggctttccccacactaagcaaagcagagaaaggcattcgtgtgcagttacccccgcaacacactctgctctctgttttcagaagctgtgtgggcttggttggggtgactctggctctgtgccaggagtaaacacggagatgggggacaaaagggaatgggagaaggcagagagggggactgtgatgtgcagggcatccacgccccatggctgtgatgtcgggcagcctgtgcccaggaagggcagctggcacagcaaggggtggccagacatgtgcattcctaccctgagtgaactctggggtgagagggtatctgtctggaaggagcaagcatcggtccttttcccacagtcctctcagcaaacacaatcactggttcaaggtttggatgcacctgtgctcatgggctcagggaccagactccctcctctggccagaagcctggcaccatctgcctggtctgcccccactttagggacgtgggctgtggacacagcacctggtccacaactcccgtgtcagaggtaattgcagggagatattccttagaatggtgagacagattttattccctaattcctgacagtaggggaaggagctgcgttccctgccagttcagcagaggtgacttttggatttaaagggagtatgattagctgggcctggtggcatgtgcctgtagtcccagctactcaggaggcttaggctggagggtcacttgagcccagcattttgaggctgtgatgagccttgattgcaccactgcactccagcctgggcagtagagtcagacgctgtctctaaaaaataaaaataaataaataaataaataaataaaaataaaaaagggagaatggaggaggagaaggagggtgagcaggggctcaaatgaaaaaagccatggagctggtcagcgtgcatgtgtcaaggcggccttgtctacagctggcagtggtgaaagttagggttctgctcctcctcccaatggtgacatgcggaacagtggctcttgggtccttgagtgacacacctgagtggtggaggtgcacgcttactgctttgaaggctctaaggagggaggctggggcctggggccaggggccaggggccaggtgaggctggctggagcagccacattttcctggcagccctgtgctttcttgggctggtcctttgagggggcccagtcctcctgaggctgtggccttgacctgcagaagccatgctagagtccagctgtctcttggtgcaggggtgtaaatggcacacattgtcaatgtggggttctcctacccctcatcccccagcacccagagggagagggtgccgctgcggcaaagaggcttgaagttggtttggtttgggggatttctgttgtgagtttttaaaaattgaggttaaattctcgtaacatacttagctgacaggagggataccatgatcatgtaggtagctttcccaaggcgaggcttatccgttatactccagatgtgctgacccctatgatttccccaaatgtcagaaactgaactgtgtaatttgtgatggtgtggaactgtgttcctgctttccctgatagaaaacataaattaaaaatgtaaaaactaagtaatttatatgacataaagtgaaaagtacacaattctgtggtatttggcgcatgatgttgtcatgcagccttcatttctgtctagttccaaagcattttcatcacccaagagggaacccatccatacctgtcaggcagtcactccctcgcccccagtcgaagcgctgcccctgtgcctttgcctgttctggatgtttggcgtccagggaagggcttgaacacctttttccttggttctgtgccatcccctagtccctgtctttctggcggcctctgggctgcccgcctgcctgcctgacaccatgtgccctctgtctttgcagctcctgactacaggtccattctgagcattagtgacgaggcagccagggcacaagccctgaacgagcacctcagcacgcgtagctatgtccaggggtactcactgtcccaggcagacgtggacgcgttcaggcagctctcggccccgcccgctgacccccagctcttccacgtggctcggtggttcaggcacatagaagcgctcctgggtagcccctgtggcaaaggccagccctgcaggctccaagcaagtgagtaacagagtgggttccctggccattagaacctctctcccaaggtcaagggctttctccatcaccctggtgcttacctggcgtctgcggataccccagagggagcctcgcccaagtgtgtctcgagcaagtggcctggatgggcagatgcagcgcttgctggatggaggttgggataaaatcacgccctatggagttggttattcaggagcagtatgttcacatcactggtgtggcaggattgcctgaggtggtggggtgcagagccgctgcggctctggggttccacgtagcatgcccaggccacgggccctagccttgtgatttttagctaaggctgtgcctggctctggttgactcagttctttctctttatttcttccataagattgtagcgtgtctatcctccagctttagaattgttgaatcctaaagtattaattggcattgaacttttttttttttttttttttgagatggagtctcgctctatcgcccaggctggagtgcagtggtgcgatctccactcactgcaagctccacctcccgggttcatgccattctcctgcctcagcctcccgagtagctgggactgtaggcgcccaccaccatgcctggctaattttttgtatttttagtagagacggggtttcaccgtgttagccaggatggtctcgatctcccgacctcgtgatccacccgcctcggcctcccaaagtgctgggattacaagtgtgaaccaccgcgcccggccggcattgaactttttaaaaatcagaaataagtcattttttctctttgagatgatgtctgtcccgtagctccagcctgttggtgctggttgtgtctgtggaacgtgcctgtggttatttgcgggagatactcctgggatgcctgcatggctttgtcactctgtggcaaatctgagggggctccatgccatcatcactgaagtatgcctttgggtggcccagctcctcctgtggctgtgggcactcctccaccttcatgtgggggcaggtttagtgctgttttctggtggtcctggctgtagctggcagccttctgggggcttctccagactccgttggggcctgggattgggaacatgcccccccgcctctgccgtgggtcaggcctctgctagatcactgttttaaccaggctggaggtggggatgtcacatctcctgtgggtcgtgttttctggataactctgcagcagacactccttccccagcgtagggcagaggccgttgctgtgcaggtcacgtccttccccatgtagccgttcctgcctgagcctccagcgcggtcacccaagtgacacctgtgctgtgaggtgccttctctccaagggctcgggtgtcaggttgttccccctgccatgtgccattccaagacacagccagaggggggcaggattagggagggtgaagcgggcctggtacgtccagctcagcagtggcctgtccaggcttccctcatagggacttgttgaaagagcggcacagacgcaagcctccatccacactgtgagaggaaggaagggttttgctcttgcaaacactttttaacctacagagaggaagcagagccacgttgctgtgtaacagaatggaccatggatagcactaatggagttgctgtgccctccccaggttccaaatcccctcatcacccaggctgcgcaagaggctgccagggtctgcttgtgccaggaatgatgggcattatgtcaggcgaccctcactcaagcttgctgtacactgagcaggggctgaagggggaggtgggagctggagtctgggactgctagagcatccagtgacctcgagtgggtccaaggcgccatggagtccagtgtagtgtcctcgcccatgtccctgggatgacagtagctgtggatctccctccatgtagctgtgacaatcagagctgcttcccccactgagtgggaacgccctctctttccatggctcatactccccaagcatgcaccttccttgctggcacagtgggccatgtgcccctcctcctgctcgcccttccacctctgttggacatcccagcagcatcagatgtgcctgtgtctggccctcagtgtgcccgcctgttaccagctcctcccatgtgccttctgtgtcctgtctccaagatcctctcagacatggaaagactctgcttggcccggcgcggtggctcactcctgtaatcccagcactttgggaggccaaggcgggcggatcacgaggtcaggagattgagaccatgctcgctaagtcggtgacaacctgtctctactaaaaatacaaaaaattagccgggcgtgatggcgggtgcctatagtcccagctactcgggaggctgaggcaggagaatggcctgaacctgggaggcggagcttgcagtgagccgagatcgtgccactgtactccagcctaggtgacagagcgagactccgtctcggggtggggggttggagataatggaaaggctctgcttaacccccaggtccctactcctgtgaagccagaccccttcctggtggatcccttccctggatcaccagcctccagcacggaggtccactggatatcaggacgttgaacttgttgagcacttctcacccgcagtggaggctcagcccttccagcccgccggcctctccctaccccccgggaaggagtgtcagctatacccttcactgaggagggtgtgggtctgtcagacgccgaggccatagtttcaggaacatgaaggtttggtgttgctctcacccctccgatggaggacccttaacttcctgatgaaggatttctctccatgaaccccttgcttgggtcctatctgcatctggtgtgttgtaggcagactgcttgccacttcctggcttccctctccatcattttatcttcagcctcccacatccctgtttcaaagccatgtctctcatgagcggttcatagttggtctgttgttggatcactcaggtcagggtgggactctggaatcaacgaatgtgtgttcattttttccaaagaaacaaaagcacaggccaggcgcggtggctcacacctgtaatcccagcactttaggaggccaaggcaggcagatcacaaggtcaggagtttgagaccagcctggccaatatggtgaaaccccatccctactaaagatacaaaaattggtggggcgtggtggcaggtgcctgtagtcctagctacttgggaggctgaggcaggataatcgcttgaactcaggaggcggaggttgcagtgagttgagattgcgccagtgcacttcagccagattttatctaaaaaaaaaaaaggggggcaagggtccttatgtgatatctctcagttcttcccttttgcaaatctgaatttgtatatctgggcctggtaacccgttttcctggggagcccatcgccagctgtgtggagatagcagccttaggggagcaggaatgctggctgtggccaggcttcttggacaagctttcagtcctgtgaaccctgggccgtttcctcatagcagggtgagtgtgatgatcccgtggcctcatggctgtgtttctgggcagcgtctccagctgtctgagatggcagcagtgtcctattgaaggagctccagggtctttgtgagggaggagagtgatgggatcctagagtggccggttgaatgcctccaggcattgagtgagattctccttcaagggcttgtgaggcatttaaagtacactgaggccgagctgcacttggcctcaataagcacatgatgtttgattaagattggagattgcctacgctttagaatctgaccacctgtgaccactggaactcacctagagtgggggctcctgctgagcactggccctctctccgtctcctgccccatctcccacctgcccacagtacccccactgcccagacacagtgcagccgccctccttcctccccttggcctgttagtcatcagcgtctgccgtcctggctcgtgtggcctgagctagagccgggaggccaagagatggctggtgcccaggaccaacttccccgtgatcagtgtgtggcaatttgctggccatgctgccagaccctctggcacagaaaccagggacaggaggaggcaggatgcgagcaccctggtgagctgccaggcggcctgctggggtgggcacaggtcagtgctaggagtatccatctcgtaggccttcctggtgccactcagcagagacatgtgaagcccttcccagggccaggcaccagctggggtcagaggtgcccagcagagcataacgcagaacctggacctgtgggcgacgactgtggagaaaagtggggatctgctgagggggcagggcaggcaggagccggctgagggcaacgggaaagtcaccaggtaccgtcctccacacctagctttgccagattgacgtttcagagggtgaataatcaccctgtggctgcccctggccccagggacagagctctgccccttcagggatctcagatgcaggttgtgtaaggacagccttgtgccaggttggaagccaggcctggaagcagtgtgctcagagcagcccaggcggcccacaggcgagtggaggggaacaactagggaagtctggccaggaggaggtgactgcactgaggggctggctggcaggggtctctgcctggaggctgagaggagctcaggttatttatgaaggcagtatagacctatgtggagcttgaagcccagtgtctggatcagagtctgctgggctgtgggcccagagctgggagccagccactcctgcagtgtccgaagtgatgaggaggggctgggctggagccagtcttgcctgctggccgtggccacagggggtcctttctgctctgactcctggcttctgctgccagggcttggaggcttggaggtggcctctgtcccaacaagagtcctcaaaatcctcagtttgtccaggtgagggatcctgggtgggggaggttcccagggctgcggcagaacagaccataccttgtcagtgtcaagccctgactgacccaggagtgccaggtggtggtgtgctcactgccagaaaggggccagtatttgaagagcagtggaatgtgctgggcacgctgtgcaggcattcctccgccctcctggggctctaagggtgttattggggtatgctgccatacagaatattagaaagcaaaagaaagacgcggttgtcgggaggcagagcttgcagtgagccgagatcacaccactgcactctggcctgggcgacagagcgagactccgtctaaaaaaaaaaaaagacgcagttgtctttgacctgcgtaatgttgaccgagattcgtgtggtttcacattgtttaaatttcatggaaaactatggtcccgttgtaaaaaccaagtctccaggtgaagaggcgacttgcacttcctggtgctgcccctggaccctgatcctgctctctctgcctcccaggcaaaggccggcgtgtgcagccccagtggtcccctcctgctgggacccagccatgcagactccacctttacaacagcctcaccaggaacaaggtaaggagaacacagatgccgtggcacacgcacacaatggggaggcaggaggcaggacagcccatgtgccttgtcgcacaacagacttctctgttccttgtgttgggatctggagttccataaatccaggtttaagatccttcagtcacttccatgttatagtctctgtggcccagaggcagagctgtcctctgaaacccagacacgtgaagtatcatgcctcatgtggaagcctgcccatgacttctgggcatggatcaccctggcttgtctctcggactctgcccaaccatgagtacttgaggtcatccacagccacgcctttcaggaggacgcgtggttgcagcaggtggcactgtatgagccaagcaggatggacaaaacggcaaactggctggatgttgttgggagcacagcaggttttgagaagaaggcaggattggttcctaacagaatggggtttgcatggtttgcttggctcagggcatggccagtgactccagtgatttcagaccaggctctgggcggggctgcttggatttccatcagggagcatgtttggcagacagagagtcaggtgtgagggagttcatggccttccttgggaaactggttgaggatgatgcccccagagaggtctgagggtgctgggatgttggggagtggtgccagagcagcaccacgattcaggggtcctggcctccaagccgcgctcccccaacagggactgaccctggccaagtgttgtctgcctcagtttcttcatccgtaaaaagaaaatgacataacctacgtcctagagtgtactgcatattgaatatttagctcagggcctggcacatggtaggtactcagtaaatattagctgtgttattgttaaataagcagcatttcaacaatcaataaaatcattgattccctttatcgcctccctccatagatgagtagaaccccagggaggaagaggccccacccacccagggctcagttggtgggaggtgccgtacatctcactgggctcccactgagactgtgacttttcacagtaaaacaaaatggtctctgttgaattgtttacactaaacacaaaccacactgtgatgtttgttgctgtttttggtaatcctgtgcagtgtttcttgcatttcttgtgatcgtcattccttcattcctaacaaaggaagtgttcatacctcaagatgggaaaaaggtgacgtggtattgctgtgggccaaccgtctatgacgcatctcacatggggcacgccaggtaggtccaccgcggggtgtccctgcagcttctgcagttgcacgcagaagtcagagccattgggatccacagcagcgatcttaggtccacaaagatcttagatctgctacagagacctgagatttgaggaatcaagactgaatttcttctcttatttttaagatgaaaattttaatgccataagtaatctatattcactgcagaaagactacagatcaccaaaaagaaaatgtccatagccccactgctaacatgctggactcgacctgggcactttttctcacataccttaaagttttctctcatccctcaagctctcgtggggtccccagatgctgagttcccgtgacactcagacctgacaggcctgacgctgggttggctgtgaccgccccccgaccactggatggtcatggctgtagctcctgacgagtagctggctgttggggtaaatgccacagagtccttttatgtgttcatgttttagttgcagtgccaaggtcatgtatagtcaacccttgaacaacctggagggtagagggtgtgaccctctgcacagttgaaaatccacacataacttttgattccccaaaaacttcaccactaaaatagcctcctgttgaccaatagcatgccagtcaatgaacacatattttgtatatacattacatactgtattcctaatgataaaggaagccagagaaaagaaaatattatgaagaaaatcataagggagaggcaatatatttactattcattaggtggaagtggatcattataaaggtcatcatccttgccatcttcacgttgagtagactgaggaggagaagggggggtcttgctgtttcagggatggcagagaaaatcatatataaatgcactcatgcagttcaaacacgtgttgttggaggttaagctatacatatcgtctggtgtggaaatgtttgttttttcattgctttaggtcctacatctcttttgatatcttgagaagagtgttgaaggattacttcaaatttgatgtcttttattgcatgaacattacggatattgatgacaaggtaaagggaatttgtaagattaaattttaaatgcaattggatggtgtaaaagaagatagaactttcgcataagtaaataatgtaggcttgagctagcttgtgttttcacctgataaacatcattttaatcccctcagtgagttaatattaccacttctgctactgatatgatcatttctatgatgttcagacacggttagaaacctgcatgttgctcaggggtcggtagccctgggtgttttgcagaaggaaggcctcccacagcacgcacttcgacatgtggcttgcaggggaagctggggcccccagggctcatttcattaagcgtcagaaagatcatgttaggccttgggcactacttggcaggtgggagatggagggtggtgtttctatttgatgatggtgtgcacgtccggggcccacagttgtctcccaccaccctcaccctcacttagagttggccaagggagagagtggcctgctgcagagggatgcatgtgggatccaagcatcactccccaatgtctgccttccctccccagatcatcaagagggcccggcagaaccacctgttcgagcagtatcgggagaagaggcctgaagcggcacagctcttggaggatgttcaggccgccctgaaggtgggcctcttgctgtctgctctagaaaccgagccctttgctttctgttctcggtcctttgtaggctactgtccctagggtagtgtcagtctcacaggctttcacaaagtgtatgttactcaagccagttccgtcaggggcgctgaagtctccataggtaaggtcccctggcctgtgacaaagtcaccagcaaagatgtactggagtggagtggagagtaggtgacattcctgccacttacaggaaaacaactgaattcatcacagtgccactaattacacttataaaaatgcttaccaatattgctgtctaattttcaatgccaaggttacaactaaatcagaaacttctgcccaagatacaaaagctatactaagctttttaatttggtaatactgtaaattttcagaatcttttgaagaaattagttctctctagtattttcattctgaataaccatcgttatatacttatttttattacaatagtaagaataggtcattttactctctactaattatccttagtaattacagtaatcattatggatatgcttatggcattttatctctggaattaaaaacaggaataaaattagagctgagcaatcttttaggtcagtgaggcctgagtaccttcctgatggatgtgtctgcagcacacctcagaacacactgggtggcctacttttcctcatccccagaacagccctagaaatactgctctcacacccaatttgcattggagaaactgaggcacagagaggttaggtgccctgtccagggtcacacgtgagagggcagaaccaggagctcctgagccgggagcttcagtctctcttagttccttactgcctggccacttgggttgcacacttctctatctctatggggccatgggaaaaaccgttctgttttctacctggaatcacctttatgaatttaggttttgctgagcagtatctaatagatttgacgtctctttatggttgcagccattttcagtaaaattaaatgagaccacggatcccgataaaaagcagatgctcgaacggattcagcacgcagtgcagcttgccacagagccacttgagaaagctgtgcagtccagactcacgggagaggaagtcaacagctgtgtggaggtgaggcttcacacatctcccagacagcccgttcgggtcaaatgtcgggccgtgcatagactgatctgtgtgcacggattgattccacagattgtcttagtggaagacactctgtgtctccagtagctccactgtggcaggcggccctgttctgcggtggctgagtcagtgcccctcccctcccacacccctttgccccatttcctgggtgcagagcctgtgccactggaaggagactcgggatccacaccctcccaccacttccatcagataggcaggaggtgcacttggaacgtggggaggcagccttctgtcgaagtgttccaagattctccagcggactctccccacaccagctggagaaggaggagcagggattaacattgaattgagcattgaggcctgtgggtacctactgagcttggggccttcacgttgaccagctctcctgcccctgccaatatctccttcagacacagggcagagacctgggtgcagaggggaccctgccctcttcctcaggcctttccctgtggctggcgccctggacacagtcaggaaggccttctcctttgtgccagcgccgcctgctggtcaccctttaagaactcgatggaaaagagaagagacggctgcagctgtgtgtagaaaaagaggccccactgaggccgcagccctgccttccctcaccactgccctggccccacctcagtgatggggcagggagtctgtgtctgcccttcgccagcatgtttctttctagtttggtctcttctgtgtcctgactcagcagatcgcttcgttgcgcctgtttccaaacttcacggaaacacgccacgtgtatgtagtcgtcagtgtgctttcacccaagctgtgcttctgggacgacccacatgtggtcactgtcactgcctcagtgcctgcctgggagccgagctgtttgtctgttctcctgggacgggcagttaggtttccttcttaccaacaatgctgctgtaatttttttcccagttgttccactaatattctttttttttttttaattgtggtaaaacacacatcataagaaatttaccatcttagccatttttaaaaactttttttttgtagagacagggtctttttgtgtctggtttattttgcccagcatagtgtgcccatggttgacccatgctgtagtgcatgtcagactctgcttccttcctatggctgaatgatactctgttgtgtatagatgggccacattttgctcatcctttcacctgcccgtggacacgtgggttgtttccaccttttggagatgcaagtaatgctgctataaacctgggtgtacaaatatctgtttgggttcctgctttcacttcttttggggatatacacggaagtggaattgctgggtcatgtgatgattctatttttgatattctgcgtaaccaccgtattgtttctgcagtggctgcactattacacattcccacccatagtgcatggggttctgttttctccacatccttgccaaagcttgttattcttcatttttttcatcccagtaggtgtgaggtggtatactgtggttttggtttgcatttccttaatggctagtgatgtggagtgtcttttgctgaactgtgagttgttttgtgttgtctctaggtggacatttgcaagtttctttaggccatatacctgcaagtggaatcgctgggttgtgtaggatatatgtgagtgactgtcgggggttcccaacactgcccacacattctggggccctagaaggactcatgagactcggcatcgagttatcatcttgtctaaggtttgtagcagtgacacagcgaggagcagaagctcaggcggagtcttcaatcatccatgggcaggctgctgaagcttcctccctgcctcccatgaggggacacagcacactctcccccaccaggaaaaaaatgcagccacatgtgtgaaatgtccctccctagggaagcccatcacataggcaccctctgcctggcacgtgccgcaattcctgactccccaggaggaaagctggtgttccacctgcataagccacagtgtttgttcaacagcccactgggggctgctgccacagagctgggtttcccggcctcttagcacaggggacatttcagctcctggatgccagctaatggccagctctgtaggcaggcctttctcaggtggcagacacagaccttctaggctcacttttatcttcatagtagccatatcagaaatgtctatatggccaggcacagtggctcacacttgtaatcccagcactttgggaagccagggcaagaggatcacttgagcccaggagctccagaccagcctaggcaaaatagtgagactctatttctacaaaacttttaaaaattagccaagcatggtgatgcaagcctgtggttccagctactggggaggctgaggtgagacaatcacctgagcccaggagtttgaggctgcagtgagccatgaacacaccactgcactccagcctgggcagcagagtgagacccagactcttaaaaaaaaagaaagaaatgtctatgcaaatttcttcttcttctaccacattttgggtgtgctgtgtatttgcacatacacctgcatttgtattgttggattcttccctttcatcagtcaatgaatgtgaagtgctgattgctgtggtttgaatgtccctttttccaacctctcctgagactgagcatcttgtcaagtgcttgcttccagctgtgattctgtgcccccatctctccccctttcccatgaggttattggtccttttcttactgttttgtatcattcttatgtcttctgatactaattactatgatttgaatgtttgtcccctccaaaactcatgctgaaacttaatccctagtgtaacagtattaagaggtaaggccttttagaggtgatcgagtcatgagagctctgccctcatgaatgggttaatggattaatgggttatcacagaagtggggtagttatcatgagagtggggctgttacagaagccagtttggccctcatgagccccctggccatgtgatgctctgcgccaccttgggactctgggaaaagtccccaccagcaagaaggcccagaacagatgtggccccttgaccttgaactttccagcctacagaattgtaagaaataaattttatttaaaaattacccattcccaggcagggcatcgtggctcatgcctgtaatcccagcactttgggaggctgaggtgggcagatcacgaggtcaggagatcgagaccatcctggccaacatggtgaaaccccgtctctactaaaaataaaaaaaaaaaaattagctgggtgttgtggcgtgtgcctgtaatcccagctacttgggaggctgaggtgggagaatcccttgaaccagggagtcagaggttgcagtgagccgagatcgtgctgttgcactgcagcctggcgacgaagcaagactccgtctcaaaaagaaaaaaaattttacccattcccggccaggcgcagtgggtcacgcctgtaatcctagcactttgggaggctgaggcgggcggatcacctgaggtcaggggtttgagaccagcctggccaacatggcaaaaccccgttgctactaaaaatacaaaaattagccaaatgtggtggcgcgcgtctgtaatcccagctactctggaggctgaggcaggagaatagcttgaaaccaggaggcggaggttgcagtgagccgagatcacgccactgcattccagcctgggaaacagagtgagactgtctcaaaaaaacaaaacaaaacaaaacaaaaaacagaaaacaaaaaaaagaacaaacaaacaaaaaaacagaaaacagactaagacacgaattcatctctgttacatgttggcatgtgtttgtgtctcttaattctgttctgttggtcaaattgtccagcccagaccaggtgcagtggctcgttcctgtaatcatagcaccttgggaggccaaggcaagaggatcccttgagcccaggagtttgagatcagccgggacaacatagtgagactctatctctacaaaaagtttaagaatttaaaatttaaaaaatttataaaaattgcccagtcctgcaggagtatcatgctgtctctcacaggtatctgatgggtaagaggccccatcttggttttgtcgttaggtgtgttttgaagcctcagcttgtcaagttccatgtaagacactgttgggattttacatgttgtatctaagaaccatctcagatccagtttggctgtgttgatcctctgtagtctttttgttttatcagtttttgtccattctttattccttcttttcttctttttcctttggatttattctgtttttctttgtctcatttagcagtttagcttattttctgatttaagaatttaaggctatacattttcctctgactgtttttgctgcaaaatttgacatcatttacttgtaaacaatttctaatttccattttggattttttagcccaggaattatctagaagtaattacctaaaagttaattatctagaattacttagaagttttaaatttccaaatttaaattggatggtactttttcatattaacttattgttattcgcttataacttaattacccagtggttggagagtatggtctgtcccaatctggatctgtgaacagagacttgtgttgtggcccctgtgtgtgctggtttctgaatgttctcttgtgcttgagaagattccgtctaatcccctagtgcacagttccacatgccatccacttagctatacctgttggccgtgtggttaatattttgtgtgtctttgctaattcttcctgttggcttagcctattcatacagtttcttaaaaaaacaaaaacaagaaccaaaacaaaactccccctctgatgatgaatttgtctgtttctccttattttttcactttttagaaaaaaaaaaagtttttttttagaggagattctggttcacatcagaattgagaggctatatatatcccctacccacctcaccgtcacctcccccagcatccgcacccaccagggggtacgtttcttacagtcagcgaacctgctctgagcgtcattaccctgagtccgtggtttactttagggttcactctcaggattgttacatcctatgggtttggacaaatactatctcgtatccaccattacggtatcacacagaatagtttcactgccctgaacatcctctgtgctccagctattatcccttcctccccaccccaactcctgacagcagctagtctttctactgtctccgtagttttgcctttcccagaatgtcacatacttggaatcctacagtgttgcagccatttcagatcggaaaaaatttttaaacagaatacttcacctctgatcaccaaaatgcatagggatttcttcctcacccagcccacctctgccccgacaaccagtcagttctctagcaggcatcagctgggagtcctaaaatttaattcatttccaacacagtttgccaggaggaagcgtcagatctgacaggttgaagggctcagtcccataagactgtccccaattcagatgccagttgaaagtagtagtttgttacctatacttctgacctaccagttattggccgggcgcggtggctcacgcctgaactcccagcactttgggaggccgagatgggcagatcatgaggtcaagagattgagaccatcccggccaacatggtgaaaccccgtctctactgacaatgcaaacattagctgggcgtggcgtcacgtgactgtaatcccttctactcgggaggctgaggcaggagaattgcttgaacccgggaggcggaggttgcagtgagctgagattgcactactgcactccagcctggtgacagagctagactccatcaaggaaggaaggaaggaaggaaggaaggaaggagggagggagggagggagggagggagggagggagggagggagggagggagggagggagggagggaaggaaggaaggagaaagaaaagaacagagtgcactggtatattttggaatgcttcctttcccttcttgctattggaaacacaaggggatttttctccaatattcactgtgaggcctggtcaggttcctagaggtaaaactcacaaaagtatggggtcccctatgactgggtccctggggttttcaactgtctgacttgcctacaccaagcctgcagcaatctctgttacagtcctggttttcctcccccaacactggttcccacagaattttcagcttatgagtctctgctctggtaagttgtgattgtctgtcttctcctgttggtctctccagtttagggggcagtggtttgccctatgacctaacttctcttatggatctaagaagagttggtttttcagtttattcagctttttacctgttgttaggtagagtggcaacttccaagctcctgacttatgtgaaactggaaagcagaagtctcttatcattttgtatttatgcattttgattgttgatctgtatgcttgaccagcaacattgagtattccagccctatcatcaggcaagttttagaaacattatcttagaagtattggtgggaagcagcttttgtctatcttgaagtgtgtatatttccctgtttgttcaaggtggttgccgtcttctggcttccattgttggctgttgttgaaaacatcggctgcccttcaaattacttttctttgattggtaaatatgtcttttctatcaggcgcattataaaagtattctctcttttcagttttctgctatttcacaaagacattgtaagagatttgtttttacttatcctattggatattttgtgtgcttcccggggctggattgttgcatgggttttgagaaattctcagatgtgtcttcaagtatcacctttactcgattccctctctcctctcctctgggttgccaattagatgtgagtctcatcatttcatctcatccttctccgtgtctcctaacctgtctttcataaaattttccttcttgtctctgtttcattttggatgacttcttcagttctgtcttcctgttcacaaattctccttcagacaggaagtgaaacagtcactcagtaggatggataagactgtttcgcctgttaatagatttcatctctgcaggttccgtttgcttctattttcagatccagctgggccgctttgctggcctgtccctgcttgctattgcctgtcatctgggagtccgtccttatgtctttaagcctgtaatatttactggattttattatgtatctgataactcctccatctgaagcgtccatctgtttgtcgtttctgctgactcccattcacagttgctcatgttcttgggtgtttggtgacctcgattaggatgtcggttcttgctgggtcgtgaccttggtgatcctgagggccaggatgcgcgtttccctgtacttggggcaggcccagtgtttgcttttcgggcagcagacttggcagcctttgctccccagagcgcacaccctgcttttggtgcttgtctgcccactggatgccctgccgcggtggggagggtgtgctcattcctgcagacgtgccttgccacttgcaggcctgcaatacatttaacacatctgtttgattcaggagctgtaggcagggattgcatcaggaacctggcccacgtgggccctgtgccccttctctgtctgtgttgtggctttgtccaccctgtgtccttgctgtctgccaggccattttcctacactttttctctccagccttggttctttgcctccccttcccatagtaggccacagaccatctgcttggtgtcacgccctgtcctgggtccacgtcagtgcattgagactctaggtccctccaagatggcggagggtagacatttctcttttctgacatgagtgcagttggggcgtgtctcatgcctagagtgtgtgtggtcaggacctggttcacataggtgccatgttttgctgggattggtggtttttactcccattccatggtgtgtcaagtggggatggcatcttcagtcaatggcgtcagggagatggggcttttgagacctctgggaccagtgccctgcctatctctcctaacctctggctgtgtccgtcatgaatcttttcctgaatgcaccaaggggttgtgctgtaggtgacacactgtgtgctcctgcccagcctctgcccataaccctgccctgcacggcccaggtaggctgcacatgctcaccaggcccacctcggccctcccacctctttttgcctctgcacccacagtccccttggctttgctcctctgagttcatgtgagacctgcccatttgtagagtcttgtatttgtccctgccgagccagttgtgtaagcatcacagtctccctaggagacggtggctcttcacaggtcaaggtcagcacctttgaattcagggcactgatgggctcacaccagctgcacgagatgttctcatgtgaagtgtgtggcccgctgctggatttttgtttctttctcttcaggtgttgctggaagaagccaaggatttgctctctgactggctggattctacacttggctgtgatgtcactgacaattccatcttctccaagctgcccaagttctgggagggggacttccacagagacatggaagctctgaatgtaagtgtcacgattgtcttgtgctggctctcttgcgctaagggccctgatttctaaattcctgttttggcaaggccagctcaattaagcggccaagtcaacattgaacttgagttgaggggcataatgggcttttcgttttatgaattgggaacgtttttatggagcgcgtggttttcagaagggaaaatcccaggacattctcatgtcttgcacaggttctccctccagatgtcttaacccgggttagtgagtatgtgccagaaattgtgaactttgtccagaagattgtggacaacggttacgggtaagcacaagggccttccctagggagggaagggctgcagaacatcgcacagggaggagctccccagctctgagcctgagtttgggaagcagaggagcaggtgttctggggctgcgtagctagaagtcccagcagacttcctcctacaactctgggcccacccaggggctgaggagcatgggtctgcactgtcctgggggccatggtgagaacctaacccagaatctgctgggaagctcggcagccaagaccatcagtcatggggccccagagctgcataatggtgagtgcgaatactgctgggccttcacagacatcagtgccattgcgtagacattttgagagtgctagtcctggtgtcatatcccgaaggaggatgcatttcatcagcatctatcgcttggctatgattttagtgactttttgttggcaaatccatcatacacttccctggcccgtattgtctcaatctccaaagtaagcattttcagaaatggccaacaaatggaaatgcagacaggaacccggttatctgtctgtagtgtgtagggaccagccccacagggtcggtgggtttttctccccatgtgtggagatgagagattgtagaaataaagacacaagacaaagagataaaagagaagacagctgggcccgggggaccactaccaccaagacgcggagaccggtagtggccccgaatgccaggctgcactgatatttattggatacaagacaaaggggtaggttaaggagagtgagccatcttcaatgataggtaaggccacgtgggtcacgtgtccactggacagggggcccttccctgcctggcagccaaggcagagagagagaggagacagagagaggcagcttacgccattatttctgcatatcagagacttttagtactttcactaatttgctactgctatctagaaggtagagccaggtgtacaggatggaacatgaaggaggactaggagcgtgaccgctgaagcacagcatcacagggagacggttaggcctccggataactgcgggcgagcctgactcatgtcaggccctccacaagaggtggaggagcagagtcttctccagactcccgcggggcaagggagactccctttcccggtctgctaagtagcgggtgtttttccttgacacttacgctaccgctagaccacagtccgcttggcaacgggcatcctcccagacgctggcgttaccactagaccaaggaacccttctggtggccgtgtccgggcataacaggaggttcacactcttgtcttctggtcactcctcactatgtcccctcagctgctatctctgtatggcctggtttttcctagattatgattatagagcgaggattattataatattggaataaagagtaattgctacaaactaatgattaatgatattcatatataatcatatctaagatctatatctggtataactattcttattttatattttattatactggaacagctcgtgccctcggtctcttgcctcggcacctgggtggcttgccgcccacagtagtgctcagcactgtaccgtgcgcctgctcccagagacccactgtgtccagcctcagattgcttccctcccacaggaaccacacaggctggatgaaagagaaacaagaggttgtgacagtgccaggaacggggcagactcttaagcagtagcgctgcttctctccccacttcacacaaactactgtggggcagcataagagcctgtgccaagccgagaggcatgggcaagccgaagctcagagaggacaggtcattccagactggagtaatctagagtgcttcttggaggccaagagcctcagctaagctaatgggtagagtgtggacattcagggaaaggtgaggccacacaagaatgaggacggcagcagccctgagcaaggcagggtgggagctgcatgggtcacaggacgccaggcagagggacgagctgcccagggcaggcaggctgcctccgcagcgggatgggccctggtgtcccactcagtccaaacagctgatacggttttcagtggccaccacagagagtagataggccacagatttcgcacttttatagccctgctttattttgttactgtcatcctgctgacacactttcgggtctgttagatgcacccacccaattccttttctgttttccagctatgtctccaatgggtctgtctactttgatacagcgaagtttgcttctagcgagaagcactcctatgggaagctggtgcctgaggccgttggagatcagaaagcccttcaagaaggggaaggtgaggagggcatgcctgagagcatgtgggctctccctcctggcccagcctgggttgtgttgactttgcaggccacgggggctgcgctgagcccacccctcagactcttgggaacagtgctttttcacctgaaggaattttaggagttttctgcactcaacattgtgcagctctaagaccatgacatgtgtttttttaatggatatataataattatgcaatttatggggaacatgtgatgtcttaatacatgcacaccgtgtgtgatgatcggggtagttaggatgctcgtcaccttagacgtttaccttttctttgcattgggaatgttccagatcttctggctatgttgaaatatacaacaaatgttttggtaactatagtcaccctactgtgctagtgaccacaagaacctattctttctgtctgtgtgtttgtgcctagaaaccaacctctctccactcactgcccctgacctgactcttctcagcttctggtgaccactgttctatgctgcacctccttgaggtccaccgttttttagctcccacataagagagaggacatgtgatatttgtctttctctgcctggtttatttcacttaacagaatgtcttccagttccatccatgttgctgtaaaagacaagatgtcatttttttatggtgtgttattttttaagaaacaaaagacagtaaacgcagtgctgtcttgagaaacatagtggcccctggggcctggattcacagggctggtgtttgctggctgagcatgtgaggtttagggggattgtggggtgctgggatgtgtgccgagtgatgcatatttgacaacagcctgtgcgcccatctggatccaaatgcttcaaacacagatatcagactttttctagaccaggcagaattatattgggaaccctttcgttggtgttttcttcatgtttatcccttaagtgaatctggggacacatccacaagaggcaaggttggaagcctccctgcagagtggggattcccgcaatgtgccagggcacgttctgcacccccaccccgcctgtcctagtgtttctggaagacaatttggccataaaaatgttcatacttttatctaattttaggctctattctaaagaaatatcagaacctaaaataaaggtgcggtggctcacgcctataatcccagcacttttggaggccgaggtgggtggatcacctgaggttgggagttcgagaccagcctggccaacatggcgaaaccccatctctactaaaaatacacaaattagccaggtgtggtggtgcttgcctgtaatcccagctactcaggaggctgaggcatgagaatcacttgaacccaggaggcagaggttatagtgagccaagattgtgccactgcactccagcctgggtgacagaatgagactctgtctcaaaaaaatatataataaaataaaaccagacaacacagactgaagaaagatagagatagccaggttgacacataaatatcagacccatggcatttcaggctccgggtttgtgggagtagaggggcgggtttgtgatgatgaagcgcctcagctctgagaggatgcagcctgggcctctggaccagaaggcttcactaccctagaaccagagtggacatgcccacgtttcatgcacttcccaggagttgacagatcaagtaggccaagaattaatacggatatgaaaggtttgaaatacagttaacaggcttggtttgagagctgggaactttgcactcaggaattaaagaacatcctttccttccaagaacacagaaacatatgccaggccacagaaagatttccacaaatctcaaagaaccgttttcaaggaaccctcattctgtcaaggagccctcattctgtcaccatggagcgattgtattagataacaacacttggccagacatggcgacccacacctgtaatcccagcactttgggaggccgaggcaggaggatcgcttgagcccaggagttccagaccaacctgggcaacatagggagaccccctttctacaaaaaatttaaaaatgagctgggtgtggtggcacgtgcctatagtcccagctacttaagaggctgatgcaggaggatcacttcagcccaagaagtcaaggctgcagtgagccctgattgtgccattgcactccagcctgggcaacagagcaagactctgtctcaaagacattaaaaaaattttttttttaaaataaaaaagataccaacactgacaggacggacgtctaaaatgtacaaacttgtctggggggttgaaatcatgctcctggataactcctaggaaagaaaaccacagtgggaaatcaggggtgtttaagcagaacagcagcaaaggtgccacacaccaaatctggagaatgcccctaaagcaccaattagaggaaactgatgtttttaaatgtagttattaaaaaacaaagatggaaaataagtgaggtgccgggtgcagtggctcacgcctgtaatcccagcactttgggaggccaaggcaggcggatcacgaggtcaggagttcgagaccagcctggccaatgtggtgaaaccccatctctactaaaaatacaaaaattagccgggtgtggtggcgcatgcctgtagtcccagctactcgggaggctgaggcagaagaatcgcttgaaccctggaggcggaggttgcagtgagctgagagcgtgccactgcactccaacctgggtgacagagcaagagtccatctcaaacaaaaaaaaaggaaataagtgagctaagcagtcagtcaaaaagctgggaaaggaacaagaagaagtagaaagaaataggaggaaataaagtaaaatcagagattaaagaaacagaaacaattgtaaaagccaaaagctgattcttctcaaaaaataatatagaagaacccttagcaagtttgattaataaaagtagaagattgaaaaacatattagggctgaattatagctcatgcctataattcagcactttgggaggccgaggcaggaggatcgcttgaggccaggaattcaagaccatcgtgggcaatgtagtgagaccgcatctctacaaaaattttaaaaattagctgagtgtggtagcatgcacctgtagtcccagttactcagaaggctgaggtaagagggttgcttgagccagggaggtcgaggctgtagtgagctgtgattacaccgttgcactccagcctggctgacagcaagatcctgtgtgtgtgtttgaatgtatgtatgtatgtatgtatgtttgaataacaagacaaaaatggaatgtaactatggatatagtagagcatttcttaaagtccttagaggaagccgtgaacaactcgcactgcatttgacacttagatgccgggagggaactggcagcacatgggaaaggtgggagtggtaagtggagcagtgccctcaggtcacgtggtgaaggaatgttctggaggcagctagagcacactgactcaccactttatgatgaattttgctatctggccccatctagggtctttttcttaaataccatttattcttgggcccattttcttccagaatgacttcagcattggtttaagttccaggaaacaggagtagaatctaacagccaatatgcaggaccaaagagggacatggatttccacccctccacagtcagtgatcagacgtgggcacatgaccacccccgcaacctccccccaccatggggagtcataaggagtgtagccttagctctgtgcagtcatgtgctcctcgccatggggactctaatggtagaggaaaaggggaggggtgatgctggggcccaagtggtcctagatgatgacagctcctcactccgccaagtaagatgacccaccagaggcagatgggccatgcagaccactcgggaaggcacgtggcaggaaggcctagtgcagggaggaagctcccccagtgggagagaacaggaccctgttgtgctggtatgaacatgcttgtagggtcaaagctagaaacactcactctgcctctggggagagagacaggaaatgaaaccaagaaggaaaacttgaaagacattgtgttgtaaccataataggtctgttgcccaatgcacagcgagtcagtataccgggataccaggggttgccgtagaagaagcgtagtaattgtatggtggacaaatggagatgggaggaaacctcagatccgcctccctgagatttggggaggggtttttaattgctctggacaggtgatggggattgccggttgctggggaagtgaggggcgaagtcatgggacagggaggtaaaccacatttctgcgacgagtcagttccttggtgcaggtcttcagaccagttggcaacagctgtcctgctggaattcaggatccaaaaaataccttaagcagttcttggtaaaaaggtccagggttagagattctatcgctaggaacagtggtggagcaggtggtcagcgtgctatgtgactctcagttagagctgcagggaagcggatggacgtgcactgcacctggccagtgaccggcctcatcattctgcctatagcctgccttggaattctcattaaccctatgagggcagttgcagtgtgatgtttgctgaaggatagggtgtttgtggggagggtcctgtgttctctgttatcaattttttcaaagcgtatttttaaaaaatcagatataaactttcatgagtaagttcataataatgaaaagttgaaaacgtgaatgtatattttctatcaaagagcatctaaaagcgaatgtcatgggccatatcacattgtgcttttgcggaattgtcagtggcagaacagtgcggaggtagaaggaagccaggacagcggccttccgtgttggtggatagatctggattttgcttgcagaggttttttgtgtttttgtgtgtttgttttttaatctgggaatcagtataccaaaatggtaacagtagtaattcctaggttaaaagataatggcaatttttttcctagttttctttttttatctttcaaatattctacatttagtacatattttataatcatgaacttggtgtttagaaaaatatatttagcggtgcttttcctctggactctgtttctcagggcagcttaggtctgttgcctgattaggctcctgaaaagtggatttgtcacctggaaagatctcactgcagcttcttcagggtcacctgagttagaaccctagatggagtctgttcttcctccacaagggggtgacagcacctaaggcagcccttagaccagggaccaggaaaggctgcagcagccgggcaagacctggcgtgggtcctggtaaccttatgcctagagtgaagacctctgctctgcccattcatcgaacaaagggtgattctctgcgtgacctttggactggctcacaggtttctttattcacagcagctaatcttttccattggtcctgcatgtattgttgagagaaatctgcagtgatggtgcattccttttctggggactcagaccgccttgtaccctgagtgtcaggtggctgagtgtcaccgagtcaatgcatggaattcaccaaggggttatttctcatccctctggcaaggcatagacagtcttgtttttgttggccaggtgatcattggctttgtccaggaaatagaacttgtgccaagagcagtactccccttttcttatggccttcctggactattctttagtttccttcacctattttccccttataaatacacaggaacagcaaatgtccccttcaccactgcactgccaccaggttccctgcagtagtacacagcagcttagctgcatccttgtatcccccgggacccataagcagatagttgtgcgggcccttgacatattgaccccacccgcatgaaccaggcaggatccctgagccatgccccagtggctgcaccactatgtcacctcctagctttagcccagggttcttatcacttgtcctagacactggtgggctaatgctgtgagaaggcagcaggaaggtgaatgtcttacggagaccccagatgtggcctcaagtcagccaggtatataagctggtgactttggggattatgtaccgttttgtaaatctagacactgggtcaacaccagaatctggtaatacatagttaacttgaagaaatgcttgagccaagttaataaacagaagttagtcagaaggactgcccattaggcaccgtggatggccttgaagtgagacatgtgggtctgtgggtgctgctgagtgaccttgcctggcgtccctcgtgtttgcaggtgacctgagcatctctgcagaccgcctgagtgagaagcgctctcccaacgactttgccttatggaaggcctctaagcccggagaaccgtcctggccgtgcccttggggaaaggtgagcgagtggcctagaaggtgtggggcttggacaggggcactggcgccagccacactctcaggcccccagcagagggccgctctgtgtgtgaaggatgttgtcactgggccagagcctggtgctggtgcagcacaggctgcctggccccggggacctggacatcatggagactccctgagtctctggacaaatcacttccctcctgggatttctgttttctggtctgtaagtggagatgtgatcagagtagacgtccatggaggcttcttggttcttgtgttctgtgactctgagtattccaggccccagggtgtaggatgcgttctgatcttcccggtgacaggagttgttgactgcagggtaccctaggaaggggcgtgaccatctgcagctgtcaagggctcagaggtctggatgtaattcagtaacttcacctaaacctcggcccacataggaccggtttatgaacttcaccaaagaaggctatccttagtcttttttttttttttgagacagagtgtcactctgtcaccaggctggagtgcagtggcgcgatctcagctcactgcaacctctgcctcctagtcccggttcaagcaattctcctgcctcagcctcctgagtagctgggattacaggcatacgtcaccatgctcagctaatttttgtatttttttgtatttttagtagagacggggtttcaccatgttggccaggctggtcttgaactcctgacctggtgatccgtctgcctcggcatcgcaaagtgctgggattacaggtgtgagccatctcgcccagccttcccttagtcttttcatgtgcgggatttaacgcttgttccaataaagttcagaggatgtaagggccatcaacttggagtgataagtgataaaggcctggacaagcgggtaggctggtcagtcactgtgtgttcggctttctccagggtcgtccgggctggcatatcgagtgctcggccatggcaggcaccctcctaggggcttcgatggacattcacggaggtgggttcgacctccggttcccccaccatgacaatgagctggcacagtcggaggtaggtgaaaacagagtccccttgtcaggtgcaagagcacagtgttcatactgcagtggaggaaaagtcagcccaggcctcagaagggcctctctcactagaacttgacaccttcatcggggcttgtgggtggaatctgaaccctgatcatttagtgtggtttccgcattgacagcctggcctttggcaacagactagcctggatttgaaccagttgtgttacctgctggcttattaacctgggctgtccttccaagccctgcctgcaccacctggaaaacgcagctcctgcctgtggacagcaccaacaaggcagcagacagtgcaggtggcaggaggcggccccagtaacacatgactgttgacatcctttgtctctttccacgcaggcctactttgaaaacgactgctgggtcaggtacttcctgcacacaggccacctgaccattgcaggctgcaaaatgtcaaagtcactaaaaaacttcatcaccattaaagatgccttgaaaaagcactcaggtatacactggcttctcccacagaccccccaaccaccttctcatacatgtgtaatggctgtagcactcgggagaataagggcgttggctgtcttgtgtccccccacagcacggcagttgcggctggccttcctcatgcactcgtggaaggacaccctggactactccagcaacaccatggagtcagcgcttcaatatgagaagttcttgaatgtgagtccccagccccttcctggaggttggtggagcagcctcccctgcacagtgggcaccttgtgcagtggtgataggtgcaccagcctcccgatgtctctaatggagaccagcacatgggtggaagcacctccatgctagtgggtataacaggctcggggccactcctgaaatggctgacggctcagcagagtggacagaggcctcgtcctcctagtcactgcagtgcacgtccttctgacttgtactttccaccaaatgagcatctgtaaacctaaagcaagagcatgtttctgtcaaagaaatatcttttcctttctttctgaccacttgtgtaattctggtctttcagatttttaccaaaaataaaatcacagcagtagaaagttgtaacagatatttcaggatggaaaagttgcctaaatgctgttaaactgatttttctaacttcaggagtttttcttaaatgtgaaagatatccttcgcgctcctgttgacatcactggtcagtttgagaagtggggagaagaagaagcagaactgaataagaagtaaggtggtgccatttctttggggtttttgagcatgcccatgttctatgcctagcctcgcatcttggccaccatgtgtcctggactgtcgaggaagggctggggacactgtcgtacgttgtgcagaattaattcaggataggcggctctgctaatgggagctgctctgggtgttgaagtgcatggagaatttcttttttgttttttctttttgagacggagtttcgcccttgttgcccaggctggagtgcagtggcgtgatctcggctcaccacaacctccacctcccgggttcgagcgattctcctgcctcagcctcccgagtagctggggttacaggcatgcgccaccatacctggctaatttcagatttttagtagaggtgggggtctctccatgtttgtcaggctggtctcgaactcccgacctcaggtgatccgcccacctcagcctcccaaagtgctgggattataggcgtgagccactgcgcctggccacatggggaatttctatggtgtgttttcaggtctgacttcacattccttcctctttgttgctcagcttttatgacaagaagacagcaattcacaaagccctctgtgacaatgttgacacccgcaccgtcatggaagagatgcgggccttggtcagtcagtgcaacctctatatggcagcccggaaagccgtgaggaagaggcccaaccaggctctgctggagaacatcgccctgtacctcacccatatgctgaaggtaagccaggccccaggcaggcgtatccctcagcctgtgtggacacaggagccaggccccaggactgggagaacagaggcctctggtgccccccagtgctgtgcctggtgcccagcacctctgagacgtggagatatgcttctgtcctctttggttcctggtgtgcttttcacgcgttagaaataacacccataagcggagcacagtggctcacatctataatccaacactgtgggaggccaggtgagtgtatcacctgagcccaggagttcaaaaccagcctggacaacatagtgagatcccgggtctataaaatatattaaaaattagccaggtgtggtggcacacacctgttttccagctgcttgggaggctgaggtgaggggctcgcttgagcccaggaggttgaatagtgaggtgtgattgcactactgcactccactctgggcaatagaggggagaccctgtctcaaaaccagacaaaaataagtaacatccatatagttgtccttactcagagctatttctttcctttgactccgtttccctctactcccatcttggagtttgaaaagcaaaaccacgccaggcgctgtggctcacgcctgtaatcccagcactttgggaggccaaggcgggcggatcacaaggtcaggagatggagaccatcctgactaacacggtgaaaccccgtctctactaaaaaaaatacaaaaaactagccaggcatggtggcgggttcctgtagttccagctactcgggaggctgaggcaggagaatggcatgaacccaggaggcagagcttgcagtgagccaagattgcgccattgcactccagcctgggcgacagagtgagattccatctcaaaaaaaaaaaaaaaagagaagcaaaaccagggacaaggcctcctctctgaacacatcctgtgcagagcccttccccgcagtgcaccttgaaaggccagcagggcctggactcaactcccctcccctctcctcctctttccttgttgttgggctccagtggcttctggctgaaacagagctggagagggtagctgtgagtcagggccatcctggagcaatgagggcaccctcaggctcgggtttctggggctcctggagctgctgcttccatctctttcctggtcttggggcaccccctcccgtgaacgaggaacacagctcacagctgctcgccacatgccgccttcatcttgccgcagcttcaggtcccatctgtttcttttcctagatctttggggccgtagaagaggacagctccctgggattcccggtcggagggcctggaaccagcctcagtgtgagtagcatgcagggtcctgccttctgcacctgctccctccccactccctacccctctgtgtccctctgaactgcccctcctctgtctgcccacccacaccagacccttccggacagcgcctcgagctaaatggcaattctggctctgagagtgctaagtgtggtcagctgccctgccggtgtggagggtctgctttggttgtgactgttggtttggggcactttgccattgtgctgtcccatgagcttggtcttggaccccaactacataggccgctgcttatttgcattttgctgcggccacttggcatcatgaacacacatgacttcgtcacatatactgacctgtattcagtaaatgcttcatcgaaaggctgcagagctcacaaacagcacagaatttacactgatggggagatacgccactgtctgcctcggtccccatggggctgggcagatgccctaacaggcccagtcctgaccctgagcccaggtcggtccacatggcctgagccaggaccccctgccccagagctgtggcccacaggtcagggggaggtcatcctgtagagccccctgtctagtgggtctgtgcggtgagaaaatccatccagaacaccctggcagtctgttgctggcttctgtttgcagttggcatgtgagcagacacacactgtcagtcctgtccttctgctgtagaacccctgtcccgtctgacacacccacagtcaggcttcttaaagatggacttccacctgctcccaggtcaagaatgctctttgactattcgattagaatgcagatctaaatatttaaatagaacaactgtaattttaattaaaacaggagcttaatacaaagtcaaaatgcaaaacctttttaaaatcctgtttcctaatgacaagtggtgtgaagagcccccatgcggatggagcttacagatgctcccccaggaaccaacttgcaaagagaaaacagtccgtgttgtaagaagtcctgccagagcacctagcccatgtgcctggtgccttttgccagccttagcgctagctagcttggttgtggtagttggtgtggtatttttgagacttcctgatatgaaccttctttggtgcttttaagaaaacccacatagcttctttgttctcttgcgcaaatgatactaagatatttattttctttaaaaacaaaaaaccaaaacacacctcctgggttaaagtcagcctgcctttgaactgcagtgtttttcatcttaacggctgctgtggttgtgggggtgccttcagcgtgctgtggacacgcatccgcatcccccaggcagcctcatttggcctttgcagtcagctgattgcgaagaagcagctgcggcgaatggtgagcctgctgacaaaacgtcctgtgcccacacatcatggccatttgacgttcatggattaacttccaaatccaaatggttttaggagcaagggaggcagttcctccatcttgtaccacctcagtgtcgccacacagccacctgctagcatgctcaggtgggggttgcagccccaggcgttcttgagacacacccctgcagccattctgagagttcccctccagtgcccctagggctggaactgagcctagcagtggggtgaatgcctccctttctgtccttccccaaggcttgtctgggctggctgtgtggtgggtggagatacagatcgaaaacccccaagaagtccaaagttcagatgcagaattgggtctcagggagcttggcttagacttaagggcttgctagcctgcctgacttttgcacttgctaaatttgtgtgtttctgtttttgagacagagtctcactctgtcgcccatgccagtccctgccctgtgtcgtggccgctgagctattattcagttatggatataggagtgtgagcagctctcagcgaacaaaaactcttctttccacagctggagtgcagtagcgcaatctccggtcactgcaccctctgcctcccgagttcaagtgattctcctgcctcagcctcctgagtagctgggactacaggcatgcaccaccatgcccggctaatttttttttgtattttagtagagacgggggtttcactatgttggccaggctagtcttgaactcctgacctcatgatccacccacttcgccctcccaaagtgctgggattacagttgtgagtcaccgcgcccagccagcacttgctaatgtttttattttggttactgagctgctgaatcagctaaggggcagggagcaaccttgctcaaaagcctaaaaccttttctgtcctattagaaaaagagaaatgctagcacagcatggtggctcacgcctgtaatcccagcactttgggaggctgaggtgggtgaatcacctgaggtcgggagttcgagaccagcctgaccaacatggagaaaccctgtctctactaaaaatacaaaattagctgggcgtagtggcgcatgcctgtaatcccagctacgcgggaggctgaggcaggagaatcgcttgaacctggaaggtggaggttgcggtgagccgagatcgccattgcatgccagtctgggcaatgagagcaaaactccatctcaaaaaaaaaaaggggaaatgctttgggaggccaaggcgggcagatcacaaggttaggagattgagaccatcctggccaacaaggtgaaacctcatctctactgaaaatacaaaaattagccaggcgtggtggcgcttgcctgtaatcccagctactcgggaggctgaggcaggtgaatcgcttgaacctgggaggctgaggttgcagtgagccgagatcacaccattgcactccagcctggcaacagagcaagattccgtcttaaaaaaaaaaaaaaaaaaaaaaaagggaaatatagtagaaaggtttttctatcctgtggccacctccccagtgttactgtgggtggtgaatctacgtgtagctgctaatgtgcatgtagatagtaggtgcttaatggagatcattcatcttaaacaagtgtatgtgtgaccacagatcagacgaaagcacggcccgggagccgccagcctcagcataggtaaggccccagcctggggagtgatgtccttgggctccttaggaaatagtccctcccagagctggcccctctgaaaccataaagacaagctgtttcacagcagcgtgtctgacctgaggaaagcagggcctgtcagcagctgggcagagcggcggcagacccacctgctgcagtagaaaggaagctcacttcatgctctctggcctgagagtctgtgtgactcgcacacctagcagggactgtgtgtcagggacgagagcgtccaggctctgggatgccggtcacagctgtagtgtgcacagcagcactgcccatgccagtccctgccctgtgtcgcggccactgagctattattctgttatgaatatgggagtgtgagcagctctcagtgaaccaaaactgttctttccgcagctcgaggccacagtcatgccctaccttcaggtgttatcagaattccgagaaggagtgcggaagattgcccgagagcaaaaaggtgaggaccagttgctggaaagagtgtgggagccactcccctcactgggctccccggaccgggcgtctcccccgaggcactatggcgttcaggccggatcatcctctgggaaggctgccccgtgcaccacagggtgttgaacggcatcccgggcctggacccaccaggtgcattagtaccacacgctccagtcaccacagccccacatgtccctgcagggcagaatcctcgagtgagtgcagctgagtgggcagtggggaccgaggatgtgatatgatgggccagggttgatttgcctctccttctctgagccgaggcagaatggtgggtcctctgaccagcccagtcaccacctgccatttggctcacactggggcttatttttgttcctggtgacctggtaggctgggtgcgctgaggtgtggctcgttcctgctgccgagtggagccgagctgcagcttccagggttcccttttctgctcaggcatgccagatgaatgcttgaacttggggttcacacagtggcccctcactgtccataagcagccattccttcatctttttgtttgtttgtttgtttgagatggagtctcactctgtctcccaggctggagtgcagtggcgcgatctcggctcactgcaagctccgcctcccgggttcacgccattcttctgcctcagcctcctgagtagctgggactacaggcgcctgccaccgcgcccggctaattttttgtattttttttttttttagcagagatggggtttcaccgtgttggccaggatggtctcgatctcctgacctcgtgatccacccgcctcggcctcccaaagtgctgggagtacaggcgtgagccaccgcgcctggccattccttcatcttttgaaatttctgagatgtgtgtggtttaagacttagaaagtgctgaatctgagcattcgttttgactgccagttttaagaaagtgttaaacacagcaaaaagcagcatcaggcaggcctttgcttcttcctgtgagtggttctgaattggtgagtaacagcacagctgggaacacacactgaggacttaggatgtgctgggccctgcccactgctttctgcacattgcctcatttaccaccatgatcctccaaaagaggaaaggagagccctggccgggtcacactgacctcgagtgctactccatcacctgctgtgctaattctccctccccagggggcctctgtgtggtgggaagtctgacctaggatccacctggtccccatctgtgcagagcccattatggagggtcacagtggggcagcatccaggcagggcatgctgaagacagagcagacagagacccagcaagcctctaggagaagctgcaccttgaggaaggatcaggaagcctgggtgggtggaggggccgagaggcggaggagccgaatctgggcctgtttcgggcaggggacagtggagcaggaggcaggagggcaggaaagagtttcgggagctcggggctccacaggctgcaggagagtgcaggacactgggtgagaggagaggctggccgggctgctgggctgctgggctgccacaagtgctctggagaggggcctgggcctgactgagcccctaacaggcagcggtgggcgcacttgccctgaccacataagcaccatcgcccctttccaacacctgatgccctcagcatttcaaagcactggaatcaaactgaaccaagcctggaccagcctattcaggaccagcgcagggctctccagcaatcttggcagcactaacttagcggcatcgctggggtcgtgggcttgggaagaccattcctggaggtcgcctgggcatttccacctgccttctgggggacatcgaaggccgagcccgggccccagctccctggggtcatacaagactgtgcacgtggccttggcttccctggcatgccacagccccgggagggcgctaaagggggactggccaggcacaagctcccgctcggtggcactgaccaggacaggacttgctcaggcctggagagtggcaccagccagccagcattggaagtagttcggttttgctttctgtttgcttttcacttttgttttgtggcttggagcaggtagatgggtgatgtggccccaggttaagatggtggtgatccctaccctgtacatcatcccatatgtgccttgtgagccagagaccctggggatccaggggcctcagaccttccgacggggcagcgtgttagaggtggctctggtgcaatcaccctgtctccccagcagcagcaaatagtgactgttttgttattcactgttaacatctcatggctggccaaagagaaagtgagtgtataacaagctcaggggtggccctcagatcagctgggatctgcttggcccaggccagatgctccacagacagacgaaaaagaaactgtttcccctggaaatacccccatggtccagtcagctagagagcacaggcctggcaaggagggcaatgggttcagggtttgaccaggagagaggcactgaagtgagaaagccaggggctgggccagggccctctgcactggggagatgatgccatttccccatcgccacggttttgttttcattatgttaaaatacacagctcagtgccattagggacatttacagtgttgtgcagccgccaccgtccatctccagaactcttcccttttcccaaactggaactctgtccccatggaacagcaactccacatcccctccctcagcccctggtgctcaccctctacttctgtctctttggattttactactccagggaccctacatgagtggagtcacacagtgtttgtcctgtgtctggcttatttcgctgatcacggtgtcctcaggtctatccatgttgcagcctgtgtcaggacctcctgcctttttaatggccaaatcatattccatggatggatgggccctgatctgtctattcttccatggaagaattctcatcacctttgcgttatctttgtagcccacatttctcttcagtaaatccctgatgatgatgtcattgtctgctcctctgccccagctctgctaacagaagccacagaggcttcttcctcagctcctcagaatccagacccagaggtcggtgtgggcctgaggggtacggcgtgtgtccctttcccccagggagtgtggcccgggaggctttcttggtgcctgctctgatgatcacccatggcgggtgggctggggtgctggccttgtggcctcccatgacacccgtgacagtgaccacaggtgctggcttgccttccttctaatgagggtgctatccaggggtggctttcaaagagtgaagggcaggcacctacctcagctcatgccccagtcagctgctcctcaggtggctgaggagggcctgttcccaggaatgatactgcagacaaatataaaggccattgttcccctaggtctctgcctggggaggttgaaactccggaagctgcccaaagtggctgtgcttatgagcgcggccttgaagcccaaggatatgcaattttttttttttttttttgagatggagtcttgccctgtcgctaggctggagtgcagtggtgtcatcttggcccactgcaacctccgactccctggttcaagcgattcttctgcctcagcgtcccaagtagctgggattacaggcacatgccaccacacccagatagtttttgtatttttagtagagatggggtttcaccatgttggccaggatggtctcgatctcctgaccttgtgatccacccgcctcagcctccaaaagtgctgggattacagtcatgagccaccgtgcctgcccggatatgtgaatattttatctagcagtgaatgaaggtgtggggtgcccagcaaggagctctaggggtctcagttatgaggacacagcaggaaaaggacagacgagaatggcagcatgtgcatggtcagtgctgcccaaaggcagggcaggcaggaggatggggtgggatggtgggggtcccagcaggctggggggcagggcacctgcccgcctagcacagttgggcgcagcaagctgaggggccagaagaaaactaaagggtgtggtgattccagcaaacccaaggtcagatttcagagcagaaagttgtcacttggagagcagcaagcatctgtcctgttgatgtagtctaggagatgctgtcacatcacctgatactctggagtctttctgagataggttggcatcccatttaccctgtaacacccaaaacttcttatgtcctgttctctacctgggcgttgtgcgtgggctgggaacgggaaaactcgggcagagcagagacacagagggggcgcctgctagagactgcgtgaggagcccactaggagaaccgtgggatgccgggcaagtctgcactgctgcgctctgaagtcagccacagacacatgggtttccaagcgaagctccctccccatgtgatggaggtcacagtcgccctccctgtcatgcctcctttcaccctcccagctgggtcaggtccccagtcagaggcagaggtgagcacagtcttgggaagcaacctgcggtccacccccaccgctcagccccgcctttacagctgcgtgcgcttcagccctgggagggctgattctcacagagctcgagctccttggtggtcctgggactcagctctcctgggtgccggtcaggacccccatcgcagtcccgtgtgcatttgggaaccaagtccttggggcttgagtgtaaatggtccttctgtaagaaagctgattctggcaccaacagagaggctgcctcagatgaagagtgttagcacccgaagggacccccaggcctgtcctgaccctcccacccctgctgtcggcccaacttgtgtccctttcctggaagaactgcttccggcggccagtgtgctatgcttcctcctggctctgccctgcacccccagaacagcccctgggcttacgggagacactagtctctgggcttctgcagccaatcaagctgctgggccctccctcccaagcactggaggaggtactcgttctgtgggccggggcccctccctcctgagcactggaggaggcacttgttctgtgggccacggcccctccttccccagcactggaggaggcactggttgtgtgggccctggctcctccatgtctgagggaactgctctgcttctcctacagtccctgagattctgcagctcagcgatgccctgcgggacaacatcctgcccgagcttggggtgcggtttgaagaccacgaaggtgggtgagcccttgctgtttgctacaaagttaccaggagcttggagaggtgtcacaaggagagctcccggggctgggctgaggctcatgcttcatgattgctgatgcagaatcccaaagtggcagccccatgggtcccccggcgccattcccacgctggccagcctggcaggggcaggggagcaccccgtagctccttcccactgctgcgtgtggtggtgtcacctcccctgcgcatcatctcccctaggggcctggctgcccgctgcccctgttgctaccgcctttgaagctctcagctgaggaaccagcctgtatcctgtacactgtcaacagattgcatgcttgttctcccacttcgtggaggtctttttgttccacagaaagttaatttttttgttttttattttcaatttttatttatttgtttattgagacagagtttcgctctgtcgcccaggccggagtacagtggcgcgatctcggctcattgcaacctctgcctcccgggttcaagcgattctcctgcctcagcctcccgagtagctgggattacagacgcccatcaccacgctcggctaatttttgtatctttagtagagacggggtttcactgtgttgaccaggctagtgtcgaactcctgacctcaagtaatctgcccacctcggcctcctaaagtggcatgagccacatgcccagccttagtttcagtttttatggatacataatagttgtacatatttatgggctatgtgtgatatttggatacatgcgtatgaggtactatgatcaaatctaggtaactgagatgtccatcacctcaagcatttatcatttctttgtgttacgaaccctccaattccactcttccactctgcccctggtaattttaaatctcagatgtcatgtcctattttcctactcctggctggcaagaccttcctaccttctcgttacaaaatgttctcgccaggtgtggtggctcatacctgtatcctagcactttgggaggctgaggtgggtggattacctgagctcaggagttcgagaccagcctaggcaacatggtgaaaccccgtctccactaaaatacaaaacattagctgggtgtgggctccttgggcagctgagacacgagaattgcttgaacccgataggcaaaggttgcagtgaactgagatcgtgccactgcactccagcctggatgacagagcaagactctgtctcaaaaaaaaaaaaaaaaaaatcacacacacacaaaccaaaatgttctcctgtgcttcactgctgctatggaggtttttgtttgtttttctcctgtgggccctcgctctgactgggcagcaccgcatggtctgggcagggcagggcagggcagggctggccccgcagtggggacggcccacagagcccagactcttctcacacgcagtttattttgcaggactgcccacagtggtgaaactggtagacagaaacaccttattaaaagagagagaagaaaagagacgggtgagtaaagtgaaaatgacttaagcgtgatatttgttgaaaatgtaaaaaccattgcgattattacatagtttactttttaagcattgatgtttacacttttattaaaatcccagtatttataaatgtcagaaagaaaaattaactagtatcttctaatgaaggacctcttttaaaaagattattccctcagtttaagtgaaaaccagtcacttttggcaaactgtgaagctgacttttttttttttttttttttttgagacggagtctcactctgttgctcagactggagtgcagtggcacgatcttggctcactgcaacctccacttccctggttcaagggattctcctgcctcagcctcccaagtagctgggactacaggcacgcaccactgtgcccagctaatttttgtatttttttagtagagatggggtttcaccatgttggtcaggctggtctcaatctcctgacctcgtgatccacccaccttggcctcccaaagtgctgggattacaggcttgagccaccacgcctggcccgaagctgacatgttaagatcccagtcccaccgtgccctcacctgagtggcgcgtgtcactgatgcatctccacctcctattcccagcatactccccacctgcaccccacaacgcccccaggatcagggatggcccaagttcctcggtgcccaataggacagaagaacaggaacaaaaacgcaatgtcagaatctctgggcacagcgcatggggtaccctgggatgcaggcagcaggatgagaggcacctgggcccccagtgcacaccatgggaggtgggccatgggggctgttgccaccagcaggtgggtccccaagaggcttaaagcaggagaccaccgtggagggcgagtttggatgccacagctctcaggaaggaggctctgggaggaactgaggaaggagaatcgacagggtggttgattgatagatgggatgtacaaggtcagggaaggcatctatgcctagccctgcactggcccaaggcacgaggggagagctcatgccagatccaagtgtgggtggctggagtttgcagtgctttggaggaataacgaactggaactctggggaaagctctagacagtggtgagtggtctgcaggtccatcctggttggcaggttgggaagagctgggcttgccctgtgaggttggctggtgtgactgcctcatcagggcccctccccattccatcacagtcactcacctagccttgggtctcgcctgccgtgctgtgctgtgaggtggcctggtgctggctgtgcagacgccctggcttgctgcactccctggcagagtgctcagaagcaggaaacagacaagaggagcgccagggtggcccggccagagcctcacaggccttgcactctttgtgctggcctttccactggccaccttggctgtggcctgtgacttctagtagctcctgtttcccaaccaagggactcttacctcaccaagctgctgcaagaaggcatccccaggcccgaggcaccatgggggaggggtcctgcctctccctgtaccattcccaccagcacataaacacatactaacttttaaagggaaaaagcagaaatcctgagcactgtgtctctggttcctccaagctcagtgcccagctcctcccccacctcagcccctttccctcggccagccctgctctccctccatctatctcgaaagagctcgatcctgttggccccagccccatcctgagtctctgagacctttgtgccttcctggtttcttttccctagctctgtgtgtggcgcctccccaggagaccttatctggtcctgcggcttctccaccatctatcttgtagccggtggcccaaaaacagtttgcccagctgcctacctgatagctccactgggccaggaagcctctgatatctaggctgtccaaagtaaatgtgattttcaactccccaaacttgttcctccttcctgccatggagggcgtgcctacctgatagctccactgggctgggaagcatctgaaacctaggctgtccaaaggaaaggtgaaaatgtgattttcaactccccaaacttgctccttttccgtcagtggagggcatgtctgttcgtgcaatggctcaggccagaacctcccaaagcaaccgagggcttccctcaccggcacccagcctgctggctccactaataagctctccctgcagcatcagactgtcctcgcccctgcccgggtgctgcctgctggttggagtgggctctggtctcctcacctagcccccaaggctgccctccgcccaccatccccatcctgccctggcgctcttgctccttcccaggtaccccaagacccactcaggataaccctcacagtgctgtcctggtcattgccttacagatcctctctccttgggccaggctcaccatgctggtccatttcttcatgttagtggtgcctggatcttttagcattggttctgtttgtctgcctgctgcatacctttgcatctagggcagggccaggcacccaggggtgccgctgaggatccccaaagggaatggaagagggtcggtgtgctgcccggcacatgggcttgtctccccacagtggggagggcctggtcagagttcagccctccatgccaggccctaggagaggggcttgtttggctagacctctcactccgagagacccagcagcctgaggcagccctgtctcatctggctctgtattgaccctccaggttgaagaggagaagaggaagaagaaagaggaggcggcccggaggaaacaggaacaagaagtaatgcattttgtttgggggtgagggctctactgggcaggagtgcaccctgaccccatgccctgtggctctctgtgcctccgtggaccttagccaggcccctgcagaccctcacagaaggagctccgctttctgcctccaccacccaaggcctgccaggcccttctcacatggggtgcagggaaggcctggccaaggggaaggctgtgccatgtggtcacaagctccaagacagcgtttatagacttactactattaggttttctagtaagctttccactattcctgtagaaataacatctggtttaattttaaattccttgtatgttccctccaccttggctttccccttcccatctttcatagcactctgaatctgagggcttggaagcaagttgagggctggaggtatgagcagatgtcgttcacagtgcggagccccaggtgctgctcgggggcagtgactgtgccgtgttgcgtgttctaggcagcaaagctggccaagatgaagattccccccagtgagatgttcttgtcagaaaccgacaaatactccaagtttgatgaaaatgtaagcatgtaagcatccttctcttctattcagaacttgatcagaccacattaaagtgggaggacaggaattttcaaccttggacaagcagattttctgtctgtagaaaatttggaatcaaatctgacacccgctttaggtccagggcctcctggcccaactactgagctccttccacagcccaggcagctaggcaagcccgtgccagggccccctccactggtgtggtgagctctggtccctagccctgggagttgtggccccgggccaagatccacccaggccctcacaagctggctgaagtgccgtggcgcagataggcctcctacccccagtttcttcctttgtcatagcgattcacagccactgcctccaaacctctaggcccctccctgctggcatttggatgtgtttgctatgtacctttgggccagctgtgtcagaactcagccatgggtaggctctgaggggcacagtgcccctcaccttaggcaggaagcacccccagactctggtcgcccctctcccattcttagctgctggagccagcactgccagatgagtgtgctggctccagagcagtgtggtgactgaatgtccaagcaagaggacatggctgcatcagggagatagacactttgagacgggagggcaaagaaaggggagttggggttacccaggtgcagaggagaccaatagccgctgtgctctgggttttcagggtctgcccacacatgacatggagggcaaagagctcagcaaagggcaagccaagaagctgaagaagctcttcgaggctcaggagaagctctacaaggaatatctgcagatggcccagaatggaagcttccagtgagggggcacaggactgactttttaaaccattgtggactagtggctgctgtctgcctcagtgacaatgtcccagcgctcctatcatgtttacagtcacccttgggtcctaaattaagagttgtgttcatgtaggttcgtgtcgtcgttggctctgagacattgataataaatttttctcaacagtga

SEQ ID NO: 15491 - DNA, 56516 bp, Homo sapiens
ccggggcggcggttgcatcagattctaggaagtgtctgtagccgcagctgcgggtccgggattcccagccatggcagattcctccgggcagcagggtgagcggcgcggccgggccaggctgagggcggctgggggcctgactgggcgctgggtgctcggctcgaagggcagcgagtccttatgtctgaggggcccgggtgcatgggttctgaggggcagctgtgtccgtggtctgaggggcggcagtgcccgaggtctgaggggtgtcagtgcgcggggtctgagggacggcacgtccttgggtccgaggggcgggggtgctcggggtctgaggggtgtcagtgcccggggtctgagggacggcgggtcctgaggttcgaggggtggcacgtcctaggatccgaaggacaacgggtgcccggctccgagggacggccactgggacccctgggactcctgcgtgagggtctgccagacccgtggctggagcacagaccccgcggggacccgagcccgagcggggcgctgcccagaccacccagcctcagtttcctcacttggttcctgccgaggtccccttgcatcctcaccccgggaggtggccctacatcaaacagcctttccccagccggtgcctgggcgggccctcgctccctcttgccccagctggcctttaggggggagacaaaggcccaagggttgttttggttttctgcccagacctggcagcttccgggaggtgggcggagggcacctgaggttggtatttagggaaatggggcagaggacgccaggggtacgcgtacacacagtaaaagggcttggggctttacgaaggctttcatctccagttccgcaggcagtccactgcaagctgattgtcagagcattactgccccattttattgccaacccgggaggttccccagggacacagctgtgtcagctcccccagtcactcatgtcaccagcgggtagaccttgagagaccagtgggttcttctctcactgtccctccagcaagattttaggtgctggaaaggcaagagactgaatcagaaagcccagattcctaacagtctggagcagcctttccaaaggaaacattctcagtatctagtttttaattcttttggctggcaaaaattagatgcaagttcttgtaagacacctccagcccccaccctcagtttagatcgtaccaagatttccttagcatctggtggtgccctttgcccctgagggtttattgggttatagataggtagttatgacaacccgagtaatctggcggcatggggacacccagatgacagggctacactcttgtgccaagtggcaggaggtggtcaccttccaggcacgccgcctaccaccctacctgtgtgcctggattccagcaccatctccacccgtcccagagccaagcggccctcagaagtcacccagattcctgtaaaacagcatcatagttaacagccccaactctggaaccaccctggaagggccagggttccaactctgcctcccgccccacagcaaaccatgcgtaatggctcctaccttggagcatggagtgtaaatgaattaatagatgggaaggacgtagaacagtgcctggcactcaattaagtgctgtgtctgtgctgaaagttagggcctgtttgttttcaaactaaaaatgtgtttttgttcatttgtgaacgtaaatgacgtattagtagtgttttgtatcttgtttttaaaaatagctttagaattttaggttttcagagccttgtaagaattgccttctttttggagcttgccatataggttgggattgccctctccgggctgtcagggcagcaggcagattgcccagtcctcagcctgcgcacagcatctccagccagtgttcttctgccccagggcatggcccacctgcctttactatcgcctcctcccatcacacacacactctcaaagatgagaacaggaaataaaatccaatcgtaggccaggcgcagtggctcacacctgtaatcccagcactttgggaggccgaggcaggcagatcacgaggtcaggagatcgagaccatggtgaaaccctgtctctactaaaaataaaaaaaaaattagccgggcgcggtggcgggcgcctgactactcggaggctgaggccggagaatgatgtgaacccaggaggcggagcttgcagtgagtcgagattgcgccactgcactccagcctgggcgacagagcgagactccgtctcaaaaaaaaaaaaatccaatcgtaaatgctttcagtgaccatcttcccagatttttcaaggaggccatcatttttgtaccatcttccctaagttgactcagaaggtctatttctctttcctgatctcactgggtgtacagcttttcctttgcggtcttgaaggtgcataggcttggtgcctgtccaagagcctgattatttcagaaggatgagtttcatttctgaggtttctggggtagatggagcctacctcagggcctttccgcacagacttgggataccacttggtcggctgctcatcaggtcagacttatagtttaatttttatacagtttaattcaagggtcttcataataacacagccagcattttttcagcatgagtctgtgccaggcactgctctaaatgctttgcatctgttatctcctgccacccttgggggaacccctttgaggaagatcctgccggcatcttgtacagatgagaatcctgaggttcagagaagtcaagcaatctgtccaccatcacgactagccagaggcacagccaggctcccaacctgggcagcctgactcaatagggaccttaactgctgtgctgtgctgcctttgatgattctcttcagactcacaatagctcaacccagtgagttaaggcagacgagaataaagctgatgcccttcgatgttttccccagagccacatgaaatgtttgctcctctatgaactcaggtaccatgtttccgggtatttgaagagccttaggcagtacccttggggtggagattaagccatttccagtgtgggtgctctgggtggcaatattgctgtctgatcaccccacaggctcattgtgagggatgttggatgcccctaataatgaataacctccctcccagtaaggaggaagatggagatgctgttcttgggggtgagagaggatgcctgggggccacctttgtgaacgagttgcagctggacctccggggctggtgatcaggacggggagtgggaggggaagccctcacctgtgggaggaggcgctggtctctgggagtgggcagtgttggctcctagttggtgagagcaggggtgcatgcccctctctcctccccacgattcatgtctgggggctttttccggtcccctttctgaacacttcttgggcagggagtggatcactgggaaggacccaagaggagcagctgtagagggtgggaccaggggaacatttgcagaaagggagtaacctgcagggtgagatgttgcctggacacccacaagatgaggaccctggtgggacctttgaagtagcagggtcagagggcaaagggtcagggtgagtgaggggtgcagacccccaccaaaccggggcacttattaggagctcagacctgctgtaaaggggtctgcattttagcaagctttccacccatggggaagctggtttaaacctcacttgctgggcccaccccagagattctgatttggcaggtctctggtgagcccaagaatgtgacttctctggatcccccaggttctgctgctgaaggcacaccagggccatgcctggagtggacctgggagagcctcaagggaacgcaggaagagaaacagggcagccgggagaggtttaaatgcttacaggaggccaggcatggtggctcacgtctgtaatcccagcactttgggaggccgaggtgggtggatcacctgaggtcaggagttctagaccagcctggccaatatgtagaaaccccgtctctactaaaaatacaaaaattagctgggcatggtggcgggcacctgtaatcccagctactcgggaggctgaggcaggagaatcgcttgaacccgggaggcagagtttgcagtgagccgagatcatgccactgcactccagcctgggtgacgagcgagactccgtctcaaaaaataaaataaaataaaataaaataaaaataaataaaaaataaatgctgataggaaagagccagagagagggagaggtcgcactgccacagttgtttgacgtgtcagggttgttgttcatttggtgtggctttgttttggtatctgtgctgagcaattgcttggtacttgcatgtgatttcaataaatgttctgtagagactccacctttgtagccggtgacaaccaccatccacctttgggacattcccatgtccctcaatgtgttgatgaactgaactgcaaggtcatccggtggtggacattccttctcatgggggcagagcaggagtttcggcacggagcgtgcaggctctacgatgagggccagtgtcgaggaacaggtccctgggaggttttcagtctgctcagaagtgttctcatctgatctcagcatcagactgatccacagcctggctcaaacccatgaccacttgaaagctgacctatttttatttgtttcctcgagacacacttaaatgcagctaccacgattacccaaatgactgtctgcgtccatctcatggaagcctgtcattctcctgtgcttccctgggcaccagcacctttctgctctgagaagatccttcccaagcatggtcttggttcccttttgatgagccgtctagcctgctctagacggtacatttaagaattatgtgatccaagatcaaggcagatttggtaataaacttttaaaataataaaattaattaaataaaaatgggtgtgtgagccctaggaaaactccaggaaattctctgtgtgtagcatgcggctattacaataacattaataataccagagcgattatgataataatgatggcaaatggggcccctggctctgtgccaggcagcttttaaacattttacaagtgtcatttgacttaatggcctgcagctttacagggctgatgttatgagcgtgttttaccgtgaggaaatgccgccgtgtgtgtgagtgtaggtactcagccctggagggcgtcggggccgcccctcaggtctccagagagcggatacacagcggcttcagttcccagactgcttcctcagcgctcaaaagccactgcagccgccgttaggacatttgatgtttttctcattttaaaaatagcagatgcttactgcagaaaatgtgagcaatgaagaaaaagagggaattaaaatcacctgtcaccccctctcatcaaccatcgtcactgtcagtgttcgggctgttgctggtggtctctccatcagaatccattctgagtgtgagaggcacgtgactgtcagctcgctgtctcagctggaagccgatgctgtgtcactgtttctcagggtgctgctgttgtctcttcttccctcttgctgtcgtggagtccaacccaggcatgagcagttgcagaagaccaaggctcagggaggggacaggggagaggaatgtggagggtcagcattggggaacagctttcgaactgtggcctgatctgtgaggggacaaggctcaccttccagctctgtccatccctctggcaagttctctaatctttagtgaacttcattttctttatcatgaaatgggacccctgctggcagctgcagagctgttggagggaaatatccagctaaactagaagtctcctggctggaagttgctctgcaaaagagtttgtaggagtctgatatttatttagagttagttttccaggacctcactttggggtgcttggagctgcctctgtgggtctgcctccgcctccgtcctccctgatctcatctccagctgggaggagagcgcatctccatgtaagcagcctccttcttctcagagggaagccccggcagtgtcagtgctgacactgggcctgtaactgtggggatggggcaggtgagaggccctcaagagctcccggcaccccccaggcgccttcagtggggccagagtccacccctgtctttctctttccttggactgttggaagagctgaagtgaaaagtgacttgttcttatgtctctggtatctttgggcagcagggctcctgctaagcaagcccctgggggctcaaagcagcagaggctgtggccggttcccagcactggtccttgtgcaggtgtctttctgagaagggtgcatgaggcccagtgccacaggggaacgccagcccaccactggtggcatgcactctgtggtgccattctgctgtccactcatctgtgccctaggcaactttagctgatatctggaatgtcacacgctcagttgtagatgctgaagatcgagcagtgaataaggtagatggagcggtggggcagatggtgaaggaaagaaatgcgggcacgtgttagacaggggtgctgcggagagaaagagcagccaggctcagggtctagaggcgggcgccatatggacagggagtccttgaagacctggtggggaagccggcacctagcagagctgtgaaggattaaggggcctgctggtatctggggagcatgccccctaaaaaaagagcagcaggtggaggggccatgtgactagggtattgtgagtcaggtgggggcccatggccagcatgaggacaggcttgtgctgctggcgaggtgggtgttgggggcagtaatgtgaacgtgcgcttttcagcagggccgctggaggcctgtggctgtgaggggagagccatgctggctacaggtggcggtgtctggcttgcaggaatccaggtgacaagggctggctctcaagtccaaagcttcttttgagttagaggccccggatcctcccgtgggttggctatgggtgctcctaaggataacttgtaaaggggtgtgattccagttttggctagggagtgtgcccagagctttgcttctgggtgcctgtggctgcttggagtgggtggccatcttattggggtcagatgggacagtggctccgtgcagtgggaaggaagcagggcaagttagagggacgctgcactcgtcatcccaccagcgagagtcatcccaggaagccattttaagccctgcatccatgttgagacttcaggaaggctctcccacagagtgcccacccctttactgcagagaagaggtggcttcaggacatcttctccggcagccacggaggctgggccttggggcatcacgtggctccgtaggctccctggcgggtgaagagctcggcccagtggggcattcttgctgctgcagctgtgcactccattctgactcatctttgctgacaccacagcgttccgggaagtgccagttattggcctgacacgaagggctttccccacactaagcaaagcagagaaaggcattcgtgtgcagttacccccgcaacacactctgctctctgttttcagaagctgtgtgggcttggttggggtgactctggctctgtgccaggagtaaacacggagatgggggacaaaagggaatgggagaaggcagagagggggactgtgatgtgcagggcatccacgccccatggctgtgatgtcgggcagcctgtgcccaggaagggcagctggcacagcaaggggtggccagacatgtgcattcctaccctgagtgaactctggggtgagagggtatctgtctggaaggagcaagcatcggtccttttcccacagtcctctcagcaaacacaatcactggttcaaggtttggatgcacctgtgctcatgggctcagggaccagactccctcctctggccagaagcctggcaccatctgcctggtctgcccccactttagggacgtgggctgtggacacagcacctggtccacaactcccgtgtcagaggtaattgcagggagatattccttagaatggtgagacagattttattccctaattcctgacagtaggggaaggagctgcgttccctgccagttcagcagaggtgacttttggatttaaagggagtatgattagctgggcctggtggcatgtgcctgtagtcccagctactcaggaggcttaggctggagggtcacttgagcccagcattttgaggctgtgatgagccttgattgcaccactgcactccagcctgggcagtagagtcagacgctgtctctaaaaaataaaaataaataaataaataaataaataaaaataaaaaagggagaatggaggaggagaaggagggtgagcaggggctcaaatgaaaaaagccatggagctggtcagcgtgcatgtgtcaaggcggccttgtctacagctggcagtggtgaaagttagggttctgctcctcctcccaatggtgacatgcggaacagtggctcttgggtccttgagtgacacacctgagtggtggaggtgcacgcttactgctttgaaggctctaaggagggaggctggggcctggggccaggggccaggggccaggtgaggctggctggagcagccacattttcctggcagccctgtgctttcttgggctggtcctttgagggggcccagtcctcctgaggctgtggccttgacctgcagaagccatgctagagtccagctgtctcttggtgcaggggtgtaaatggcacacattgtcaatgtggggttctcctacccctcatcccccagcacccagagggagagggtgccgctgcggcaaagaggcttgaagttggtttggtttgggggatttctgttgtgagtttttaaaaattgaggttaaattctcgtaacatacttagctgacaggagggataccatgatcatgtaggtagctttcccaaggcgaggcttatccgttatactccagatgtgctgacccctatgatttccccaaatgtcagaaactgaactgtgtaatttgtgatggtgtggaactgtgttcctgctttccctgatagaaaacataaattaaaaatgtaaaaactaagtaatttatatgacataaagtgaaaagtacacaattctgtggtatttggcgcatgatgttgtcatgcagccttcatttctgtctagttccaaagcattttcatcacccaagagggaacccatccatacctgtcaggcagtcactccctcgcccccagtcgaagcgctgcccctgtgcctttgcctgttctggatgtttggcgtccagggaagggcttgaacacctttttccttggttctgtgccatcccctagtccctgtctttctggcggcctctgggctgcccgcctgcctgcctgacaccatgtgccctctgtctttgcagctcctgactacaggtccattctgagcattagtgacgaggcagccagggcacaagccctgaacgagcacctcagcacgcgtagctatgtccaggggtactcactgtcccaggcagacgtggacgcgttcaggcagctctcggccccgcccgctgacccccagctcttccacgtggctcggtggttcaggcacatagaagcgctcctgggtagcccctgtggcaaaggccagccctgcaggctccaagcaagtgagtaacagagtgggttccctggccattagaacctctctcccaaggtcaagggctttctccatcaccctggtgcttacctggcgtctgcggataccccagagggagcctcgcccaagtgtgtctcgagcaagtggcctggatgggcagatgcagcgcttgctggatggaggttgggataaaatcacgccctatggagttggttattcaggagcagtatgttcacatcactggtgtggcaggattgcctgaggtggtggggtgcagagccgctgcggctctggggttccacgtagcatgcccaggccacgggccctagccttgtgatttttagctaaggctgtgcctggctctggttgactcagttctttctctttatttcttccataagattgtagcgtgtctatcctccagctttagaattgttgaatcctaaagtattaattggcattgaacttttttttttttttttttttgagatggagtctcgctctatcgcccaggctggagtgcagtggtgcgatctccactcactgcaagctccacctcccgggttcatgccattctcctgcctcagcctcccgagtagctgggactgtaggcgcccaccaccatgcctggctaattttttgtatttttagtagagacggggtttcaccgtgttagccaggatggtctcgatctcccgacctcgtgatccacccgcctcggcctcccaaagtgctgggattacaagtgtgaaccaccgcgcccggccggcattgaactttttaaaaatcagaaataagtcattttttctctttgagatgatgtctgtcccgtagctccagcctgttggtgctggttgtgtctgtggaacgtgcctgtggttatttgcgggagatactcctgggatgcctgcatggctttgtcactctgtggcaaatctgagggggctccatgccatcatcactgaagtatgcctttgggtggcccagctcctcctgtggctgtgggcactcctccaccttcatgtgggggcaggtttagtgctgttttctggtggtcctggctgtagctggcagccttctgggggcttctccagactccgttggggcctgggattgggaacatgcccccccgcctctgccgtgggtcaggcctctgctagatcactgttttaaccaggctggaggtggggatgtcacatctcctgtgggtcgtgttttctggataactctgcagcagacactccttccccagcgtagggcagaggccgttgctgtgcaggtcacgtccttccccatgtagccgttcctgcctgagcctccagcgcggtcacccaagtgacacctgtgctgtgaggtgccttctctccaagggctcgggtgtcaggttgttccccctgccatgtgccattccaagacacagccagaggggggcaggattagggagggtgaagcgggcctggtacgtccagctcagcagtggcctgtccaggcttccctcatagggacttgttgaaagagcggcacagacgcaagcctccatccacactgtgagaggaaggaagggttttgctcttgcaaacactttttaacctacagagaggaagcagagccacgttgctgtgtaacagaatggaccatggatagcactaatggagttgctgtgccctccccaggttccaaatcccctcatcacccaggctgcgcaagaggctgccagggtctgcttgtgccaggaatgatgggcattatgtcaggcgaccctcactcaagcttgctgtacactgagcaggggctgaagggggaggtgggagctggagtctgggactgctagagcatccagtgacctcgagtgggtccaaggcgccatggagtccagtgtagtgtcctcgcccatgtccctgggatgacagtagctgtggatctccctccatgtagctgtgacaatcagagctgcttcccccactgagtgggaacgccctctctttccatggctcatactccccaagcatgcaccttccttgctggcacagtgggccatgtgcccctcctcctgctcgcccttccacctctgttggacatcccagcagcatcagatgtgcctgtgtctggccctcagtgtgcccgcctgttaccagctcctcccatgtgccttctgtgtcctgtctccaagatcctctcagacatggaaagactctgcttggcccggcgcggtggctcactcctgtaatcccagcactttgggaggccaaggcgggcggatcacgaggtcaggagattgagaccatgctcgctaagtcggtgacaacctgtctctactaaaaatacaaaaaattagccgggcgtgatggcgggtgcctatagtcccagctactcgggaggctgaggcaggagaatggcctgaacctgggaggcggagcttgcagtgagccgagatcgtgccactgtactccagcctaggtgacagagcgagactccgtctcggggtggggggttggagataatggaaaggctctgcttaacccccaggtccctactcctgtgaagccagaccccttcctggtggatcccttccctggatcaccagcctccagcacggaggtccactggatatcaggacgttgaacttgttgagcacttctcacccgcagtggaggctcagcccttccagcccgccggcctctccctaccccccgggaaggagtgtcagctatacccttcactgaggagggtgtgggtctgtcagacgccgaggccatagtttcaggaacatgaaggtttggtgttgctctcacccctccgatggaggacccttaacttcctgatgaaggatttctctccatgaaccccttgcttgggtcctatctgcatctggtgtgttgtaggcagactgcttgccacttcctggcttccctctccatcattttatcttcagcctcccacatccctgtttcaaagccatgtctctcatgagcggttcatagttggtctgttgttggatcactcaggtcagggtgggactctggaatcaacgaatgtgtgttcattttttccaaagaaacaaaagcacaggccaggcgcggtggctcacacctgtaatcccagcactttaggaggccaaggcaggcagatcacaaggtcaggagtttgagaccagcctggccaatatggtgaaaccccatccctactaaagatacaaaaattggtggggcgtggtggcaggtgcctgtagtcctagctacttgggaggctgaggcaggataatcgcttgaactcaggaggcggaggttgcagtgagttgagattgcgccagtgcacttcagccagattttatctaaaaaaaaaaaaggggggcaagggtccttatgtgatatctctcagttcttcccttttgcaaatctgaatttgtatatctgggcctggtaacccgttttcctggggagcccatcgccagctgtgtggagatagcagccttaggggagcaggaatgctggctgtggccaggcttcttggacaagctttcagtcctgtgaaccctgggccgtttcctcatagcagggtgagtgtgatgatcccgtggcctcatggctgtgtttctgggcagcgtctccagctgtctgagatggcagcagtgtcctattgaaggagctccagggtctttgtgagggaggagagtgatgggatcctagagtggccggttgaatgcctccaggcattgagtgagattctccttcaagggcttgtgaggcatttaaagtacactgaggccgagctgcacttggcctcaataagcacatgatgtttgattaagattggagattgcctacgctttagaatctgaccacctgtgaccactggaactcacctagagtgggggctcctgctgagcactggccctctctccgtctcctgccccatctcccacctgcccacagtacccccactgcccagacacagtgcagccgccctccttcctccccttggcctgttagtcatcagcgtctgccgtcctggctcgtgtggcctgagctagagccgggaggccaagagatggctggtgcccaggaccaacttccccgtgatcagtgtgtggcaatttgctggccatgctgccagaccctctggcacagaaaccagggacaggaggaggcaggatgcgagcaccctggtgagctgccaggcggcctgctggggtgggcacaggtcagtgctaggagtatccatctcgtaggccttcctggtgccactcagcagagacatgtgaagcccttcccagggccaggcaccagctggggtcagaggtgcccagcagagcataacgcagaacctggacctgtgggcgacgactgtggagaaaagtggggatctgctgagggggcagggcaggcaggagccggctgagggcaacgggaaagtcaccaggtaccgtcctccacacctagctttgccagattgacgtttcagagggtgaataatcaccctgtggctgcccctggccccagggacagagctctgccccttcagggatctcagatgcaggttgtgtaaggacagccttgtgccaggttggaagccaggcctggaagcagtgtgctcagagcagcccaggcggcccacaggcgagtggaggggaacaactagggaagtctggccaggaggaggtgactgcactgaggggctggctggcaggggtctctgcctggaggctgagaggagctcaggttatttatgaaggcagtatagacctatgtggagcttgaagcccagtgtctggatcagagtctgctgggctgtgggcccagagctgggagccagccactcctgcagtgtccgaagtgatgaggaggggctgggctggagccagtcttgcctgctggccgtggccacagggggtcctttctgctctgactcctggcttctgctgccagggcttggaggcttggaggtggcctctgtcccaacaagagtcctcaaaatcctcagtttgtccaggtgagggatcctgggtgggggaggttcccagggctgcggcagaacagaccataccttgtcagtgtcaagccctgactgacccaggagtgccaggtggtggtgtgctcactgccagaaaggggccagtatttgaagagcagtggaatgtgctgggcacgctgtgcaggcattcctccgccctcctggggctctaagggtgttattggggtatgctgccatacagaatattagaaagcaaaagaaagacgcggttgtcgggaggcagagcttgcagtgagccgagatcacaccactgcactctggcctgggcgacagagcgagactccgtctaaaaaaaaaaaaagacgcagttgtctttgacctgcgtaatgttgaccgagattcgtgtggtttcacattgtttaaatttcatggaaaactatggtcccgttgtaaaaaccaagtctccaggtgaagaggcgacttgcacttcctggtgctgcccctggaccctgatcctgctctctctgcctcccaggcaaaggccggcgtgtgcagccccagtggtcccctcctgctgggacccagccatgcagactccacctttacaacagcctcaccaggaacaaggtaaggagaacacagatgccgtggcacacgcacacaatggggaggcaggaggcaggacagcccatgtgccttgtcgcacaacagacttctctgttccttgtgttgggatctggagttccataaatccaggtttaagatccttcagtcacttccatgttatagtctctgtggcccagaggcagagctgtcctctgaaacccagacacgtgaagtatcatgcctcatgtggaagcctgcccatgacttctgggcatggatcaccctggcttgtctctcggactctgcccaaccatgagtacttgaggtcatccacagccacgcctttcaggaggacgcgtggttgcagcaggtggcactgtatgagccaagcaggatggacaaaacggcaaactggctggatgttgttgggagcacagcaggttttgagaagaaggcaggattggttcctaacagaatggggtttgcatggtttgcttggctcagggcatggccagtgactccagtgatttcagaccaggctctgggcggggctgcttggatttccatcagggagcatgtttggcagacagagagtcaggtgtgagggagttcatggccttccttgggaaactggttgaggatgatgcccccagagaggtctgagggtgctgggatgttggggagtggtgccagagcagcaccacgattcaggggtcctggcctccaagccgcgctcccccaacagggactgaccctggccaagtgttgtctgcctcagtttcttcatccgtaaaaagaaaatgacataacctacgtcctagagtgtactgcatattgaatatttagctcagggcctggcacatggtaggtactcagtaaatattagctgtgttattgttaaataagcagcatttcaacaatcaataaaatcattgattccctttatcgcctccctccatagatgagtagaaccccagggaggaagaggccccacccacccagggctcagttggtgggaggtgccgtacatctcactgggctcccactgagactgtgacttttcacagtaaaacaaaatggtctctgttgaattgtttacactaaacacaaaccacactgtgatgtttgttgctgtttttggtaatcctgtgcagtgtttcttgcatttcttgtgatcgtcattccttcattcctaacaaaggaagtgttcatacctcaagatgggaaaaaggtgacgtggtattgctgtgggccaaccgtctatgacgcatctcacatggggcacgccaggtaggtccaccgcggggtgtccctgcagcttctgcagttgcacgcagaagtcagagccattgggatccacagcagcgatcttaggtccacaaagatcttagatctgctacagagacctgagatttgaggaatcaagactgaatttcttctcttatttttaagatgaaaattttaatgccataagtaatctatattcactgcagaaagactacagatcaccaaaaagaaaatgtccatagccccactgctaacatgctggactcgacctgggcactttttctcacataccttaaagttttctctcatccctcaagctctcgtggggtccccagatgctgagttcccgtgacactcagacctgacaggcctgacgctgggttggctgtgaccgccccccgaccactggatggtcatggctgtagctcctgacgagtagctggctgttggggtaaatgccacagagtccttttatgtgttcatgttttagttgcagtgccaaggtcatgtatagtcaacccttgaacaacctggagggtagagggtgtgaccctctgcacagttgaaaatccacacataacttttgattccccaaaaacttcaccactaaaatagcctcctgttgaccaatagcatgccagtcaatgaacacatattttgtatatacattacatactgtattcctaatgataaaggaagccagagaaaagaaaatattatgaagaaaatcataagggagaggcaatatatttactattcattaggtggaagtggatcattataaaggtcatcatccttgccatcttcacgttgagtagactgaggaggagaagggggggtcttgctgtttcagggatggcagagaaaatcatatataaatgcactcatgcagttcaaacacgtgttgttggaggttaagctatacatatcgtctggtgtggaaatgtttgttttttcattgctttaggtcctacatctcttttgatatcttgagaagagtgttgaaggattacttcaaatttgatgtcttttattgcatgaacattacggatattgatgacaaggtaaagggaatttgtaagattaaattttaaatgcaattggatggtgtaaaagaagatagaactttcgcataagtaaataatgtaggcttgagctagcttgtgttttcacctgataaacatcattttaatcccctcagtgagttaatattaccacttctgctactgatatgatcatttctatgatgttcagacacggttagaaacctgcatgttgctcaggggtcggtagccctgggtgttttgcagaaggaaggcctcccacagcacgcacttcgacatgtggcttgcaggggaagctggggcccccagggctcatttcattaagcgtcagaaagatcatgttaggccttgggcactacttggcaggtgggagatggagggtggtgtttctatttgatgatggtgtgcacgtccggggcccacagttgtctcccaccaccctcaccctcacttagagttggccaagggagagagtggcctgctgcagagggatgcatgtgggatccaagcatcactccccaatgtctgccttccctccccagatcatcaagagggcccggcagaaccacctgttcgagcagtatcgggagaagaggcctgaagcggcacagctcttggaggatgttcaggccgccctgaaggtgggcctcttgctgtctgctctagaaaccgagccctttgctttctgttctcggtcctttgtaggctactgtccctagggtagtgtcagtctcacaggctttcacaaagtgtatgttactcaagccagttccgtcaggggcgctgaagtctccataggtaaggtcccctggcctgtgacaaagtcaccagcaaagatgtactggagtggagtggagagtaggtgacattcctgccacttacaggaaaacaactgaattcatcacagtgccactaattacacttataaaaatgcttaccaatattgctgtctaattttcaatgccaaggttacaactaaatcagaaacttctgcccaagatacaaaagctatactaagctttttaatttggtaatactgtaaattttcagaatcttttgaagaaattagttctctctagtattttcattctgaataaccatcgttatatacttatttttattacaatagtaagaataggtcattttactctctactaattatccttagtaattacagtaatcattatggatatgcttatggcattttatctctggaattaaaaacaggaataaaattagagctgagcaatcttttaggtcagtgaggcctgagtaccttcctgatggatgtgtctgcagcacacctcagaacacactgggtggcctacttttcctcatccccagaacagccctagaaatactgctctcacacccaatttgcattggagaaactgaggcacagagaggttaggtgccctgtccagggtcacacgtgagagggcagaaccaggagctcctgagccgggagcttcagtctctcttagttccttactgcctggccacttgggttgcacacttctctatctctatggggccatgggaaaaaccgttctgttttctacctggaatcacctttatgaatttaggttttgctgagcagtatctaatagatttgacgtctctttatggttgcagccattttcagtaaaattaaatgagaccacggatcccgataaaaagcagatgctcgaacggattcagcacgcagtgcagcttgccacagagccacttgagaaagctgtgcagtccagactcacgggagaggaagtcaacagctgtgtggaggtgaggcttcacacatctcccagacagcccgttcgggtcaaatgtcgggccgtgcatagactgatctgtgtgcacggattgattccacagattgtcttagtggaagacactctgtgtctccagtagctccactgtggcaggcggccctgttctgcggtggctgagtcagtgcccctcccctcccacacccctttgccccatttcctgggtgcagagcctgtgccactggaaggagactcgggatccacaccctcccaccacttccatcagataggcaggaggtgcacttggaacgtggggaggcagccttctgtcgaagtgttccaagattctccagcggactctccccacaccagctggagaaggaggagcagggattaacattgaattgagcattgaggcctgtgggtacctactgagcttggggccttcacgttgaccagctctcctgcccctgccaatatctccttcagacacagggcagagacctgggtgcagaggggaccctgccctcttcctcaggcctttccctgtggctggcgccctggacacagtcaggaaggccttctcctttgtgccagcgccgcctgctggtcaccctttaagaactcgatggaaaagagaagagacggctgcagctgtgtgtagaaaaagaggccccactgaggccgcagccctgccttccctcaccactgccctggccccacctcagtgatggggcagggagtctgtgtctgcccttcgccagcatgtttctttctagtttggtctcttctgtgtcctgactcagcagatcgcttcgttgcgcctgtttccaaacttcacggaaacacgccacgtgtatgtagtcgtcagtgtgctttcacccaagctgtgcttctgggacgacccacatgtggtcactgtcactgcctcagtgcctgcctgggagccgagctgtttgtctgttctcctgggacgggcagttaggtttccttcttaccaacaatgctgctgtaatttttttcccagttgttccactaatattctttttttttttttaattgtggtaaaacacacatcataagaaatttaccatcttagccatttttaaaaactttttttttgtagagacagggtctttttgtgtctggtttattttgcccagcatagtgtgcccatggttgacccatgctgtagtgcatgtcagactctgcttccttcctatggctgaatgatactctgttgtgtatagatgggccacattttgctcatcctttcacctgcccgtggacacgtgggttgtttccaccttttggagatgcaagtaatgctgctataaacctgggtgtacaaatatctgtttgggttcctgctttcacttcttttggggatatacacggaagtggaattgctgggtcatgtgatgattctatttttgatattctgcgtaaccaccgtattgtttctgcagtggctgcactattacacattcccacccatagtgcatggggttctgttttctccacatccttgccaaagcttgttattcttcatttttttcatcccagtaggtgtgaggtggtatactgtggttttggtttgcatttccttaatggctagtgatgtggagtgtcttttgctgaactgtgagttgttttgtgttgtctctaggtggacatttgcaagtttctttaggccatatacctgcaagtggaatcgctgggttgtgtaggatatatgtgagtgactgtcgggggttcccaacactgcccacacattctggggccctagaaggactcatgagactcggcatcgagttatcatcttgtctaaggtttgtagcagtgacacagcgaggagcagaagctcaggcggagtcttcaatcatccatgggcaggctgctgaagcttcctccctgcctcccatgaggggacacagcacactctcccccaccaggaaaaaaatgcagccacatgtgtgaaatgtccctccctagggaagcccatcacataggcaccctctgcctggcacgtgccgcaattcctgactccccaggaggaaagctggtgttccacctgcataagccacagtgtttgttcaacagcccactgggggctgctgccacagagctgggtttcccggcctcttagcacaggggacatttcagctcctggatgccagctaatggccagctctgtaggcaggcctttctcaggtggcagacacagaccttctaggctcacttttatcttcatagtagccatatcagaaatgtctatatggccaggcacagtggctcacacttgtaatcccagcactttgggaagccagggcaagaggatcacttgagcccaggagctccagaccagcctaggcaaaatagtgagactctatttctacaaaacttttaaaaattagccaagcatggtgatgcaagcctgtggttccagctactggggaggctgaggtgagacaatcacctgagcccaggagtttgaggctgcagtgagccatgaacacaccactgcactccagcctgggcagcagagtgagacccagactcttaaaaaaaaagaaagaaatgtctatgcaaatttcttcttcttctaccacattttgggtgtgctgtgtatttgcacatacacctgcatttgtattgttggattcttccctttcatcagtcaatgaatgtgaagtgctgattgctgtggtttgaatgtccctttttccaacctctcctgagactgagcatcttgtcaagtgcttgcttccagctgtgattctgtgcccccatctctccccctttcccatgaggttattggtccttttcttactgttttgtatcattcttatgtcttctgatactaattactatgatttgaatgtttgtcccctccaaaactcatgctgaaacttaatccctagtgtaacagtattaagaggtaaggccttttagaggtgatcgagtcatgagagctctgccctcatgaatgggttaatggattaatgggttatcacagaagtggggtagttatcatgagagtggggctgttacagaagccagtttggccctcatgagccccctggccatgtgatgctctgcgccaccttgggactctgggaaaagtccccaccagcaagaaggcccagaacagatgtggccccttgaccttgaactttccagcctacagaattgtaagaaataaattttatttaaaaattacccattcccaggcagggcatcgtggctcatgcctgtaatcccagcactttgggaggctgaggtgggcagatcacgaggtcaggagatcgagaccatcctggccaacatggtgaaaccccgtctctactaaaaataaaaaaaaaaaaattagctgggtgttgtggcgtgtgcctgtaatcccagctacttgggaggctgaggtgggagaatcccttgaaccagggagtcagaggttgcagtgagccgagatcgtgctgttgcactgcagcctggcgacgaagcaagactccgtctcaaaaagaaaaaaaattttacccattcccggccaggcgcagtgggtcacgcctgtaatcctagcactttgggaggctgaggcgggcggatcacctgaggtcaggggtttgagaccagcctggccaacatggcaaaaccccgttgctactaaaaatacaaaaattagccaaatgtggtggcgcgcgtctgtaatcccagctactctggaggctgaggcaggagaatagcttgaaaccaggaggcggaggttgcagtgagccgagatcacgccactgcattccagcctgggaaacagagtgagactgtctcaaaaaaacaaaacaaaacaaaacaaaaaacagaaaacaaaaaaaagaacaaacaaacaaaaaaacagaaaacagactaagacacgaattcatctctgttacatgttggcatgtgtttgtgtctcttaattctgttctgttggtcaaattgtccagcccagaccaggtgcagtggctcgttcctgtaatcatagcaccttgggaggccaaggcaagaggatcccttgagcccaggagtttgagatcagccgggacaacatagtgagactctatctctacaaaaagtttaagaatttaaaatttaaaaaatttataaaaattgcccagtcctgcaggagtatcatgctgtctctcacaggtatctgatgggtaagaggccccatcttggttttgtcgttaggtgtgttttgaagcctcagcttgtcaagttccatgtaagacactgttgggattttacatgttgtatctaagaaccatctcagatccagtttggctgtgttgatcctctgtagtctttttgttttatcagtttttgtccattctttattccttcttttcttctttttcctttggatttattctgtttttctttgtctcatttagcagtttagcttattttctgatttaagaatttaaggctatacattttcctctgactgtttttgctgcaaaatttgacatcatttacttgtaaacaatttctaatttccattttggattttttagcccaggaattatctagaagtaattacctaaaagttaattatctagaattacttagaagttttaaatttccaaatttaaattggatggtactttttcatattaacttattgttattcgcttataacttaattacccagtggttggagagtatggtctgtcccaatctggatctgtgaacagagacttgtgttgtggcccctgtgtgtgctggtttctgaatgttctcttgtgcttgagaagattccgtctaatcccctagtgcacagttccacatgccatccacttagctatacctgttggccgtgtggttaatattttgtgtgtctttgctaattcttcctgttggcttagcctattcatacagtttcttaaaaaaacaaaaacaagaaccaaaacaaaactccccctctgatgatgaatttgtctgtttctccttattttttcactttttagaaaaaaaaaaagtttttttttagaggagattctggttcacatcagaattgagaggctatatatatcccctacccacctcaccgtcacctcccccagcatccgcacccaccagggggtacgtttcttacagtcagcgaacctgctctgagcgtcattaccctgagtccgtggtttactttagggttcactctcaggattgttacatcctatgggtttggacaaatactatctcgtatccaccattacggtatcacacagaatagtttcactgccctgaacatcctctgtgctccagctattatcccttcctccccaccccaactcctgacagcagctagtctttctactgtctccgtagttttgcctttcccagaatgtcacatacttggaatcctacagtgttgcagccatttcagatcggaaaaaatttttaaacagaatacttcacctctgatcaccaaaatgcatagggatttcttcctcacccagcccacctctgccccgacaaccagtcagttctctagcaggcatcagctgggagtcctaaaatttaattcatttccaacacagtttgccaggaggaagcgtcagatctgacaggttgaagggctcagtcccataagactgtccccaattcagatgccagttgaaagtagtagtttgttacctatacttctgacctaccagttattggccgggcgcggtggctcacgcctgaactcccagcactttgggaggccgagatgggcagatcatgaggtcaagagattgagaccatcccggccaacatggtgaaaccccgtctctactgacaatgcaaacattagctgggcgtggcgtcacgtgactgtaatcccttctactcgggaggctgaggcaggagaattgcttgaacccgggaggcggaggttgcagtgagctgagattgcactactgcactccagcctggtgacagagctagactccatcaaggaaggaaggaaggaaggaaggaaggaaggagggagggagggagggagggagggagggagggagggagggagggagggagggagggagggagggaaggaaggaaggagaaagaaaagaacagagtgcactggtatattttggaatgcttcctttcccttcttgctattggaaacacaaggggatttttctccaatattcactgtgaggcctggtcaggttcctagaggtaaaactcacaaaagtatggggtcccctatgactgggtccctggggttttcaactgtctgacttgcctacaccaagcctgcagcaatctctgttacagtcctggttttcctcccccaacactggttcccacagaattttcagcttatgagtctctgctctggtaagttgtgattgtctgtcttctcctgttggtctctccagtttagggggcagtggtttgccctatgacctaacttctcttatggatctaagaagagttggtttttcagtttattcagctttttacctgttgttaggtagagtggcaacttccaagctcctgacttatgtgaaactggaaagcagaagtctcttatcattttgtatttatgcattttgattgttgatctgtatgcttgaccagcaacattgagtattccagccctatcatcaggcaagttttagaaacattatcttagaagtattggtgggaagcagcttttgtctatcttgaagtgtgtatatttccctgtttgttcaaggtggttgccgtcttctggcttccattgttggctgttgttgaaaacatcggctgcccttcaaattacttttctttgattggtaaatatgtcttttctatcaggcgcattataaaagtattctctcttttcagttttctgctatttcacaaagacattgtaagagatttgtttttacttatcctattggatattttgtgtgcttcccggggctggattgttgcatgggttttgagaaattctcagatgtgtcttcaagtatcacctttactcgattccctctctcctctcctctgggttgccaattagatgtgagtctcatcatttcatctcatccttctccgtgtctcctaacctgtctttcataaaattttccttcttgtctctgtttcattttggatgacttcttcagttctgtcttcctgttcacaaattctccttcagacaggaagtgaaacagtcactcagtaggatggataagactgtttcgcctgttaatagatttcatctctgcaggttccgtttgcttctattttcagatccagctgggccgctttgctggcctgtccctgcttgctattgcctgtcatctgggagtccgtccttatgtctttaagcctgtaatatttactggattttattatgtatctgataactcctccatctgaagcgtccatctgtttgtcgtttctgctgactcccattcacagttgctcatgttcttgggtgtttggtgacctcgattaggatgtcggttcttgctgggtcgtgaccttggtgatcctgagggccaggatgcgcgtttccctgtacttggggcaggcccagtgtttgcttttcgggcagcagacttggcagcctttgctccccagagcgcacaccctgcttttggtgcttgtctgcccactggatgccctgccgcggtggggagggtgtgctcattcctgcagacgtgccttgccacttgcaggcctgcaatacatttaacacatctgtttgattcaggagctgtaggcagggattgcatcaggaacctggcccacgtgggccctgtgccccttctctgtctgtgttgtggctttgtccaccctgtgtccttgctgtctgccaggccattttcctacactttttctctccagccttggttctttgcctccccttcccatagtaggccacagaccatctgcttggtgtcacgccctgtcctgggtccacgtcagtgcattgagactctaggtccctccaagatggcggagggtagacatttctcttttctgacatgagtgcagttggggcgtgtctcatgcctagagtgtgtgtggtcaggacctggttcacataggtgccatgttttgctgggattggtggtttttactcccattccatggtgtgtcaagtggggatggcatcttcagtcaatggcgtcagggagatggggcttttgagacctctgggaccagtgccctgcctatctctcctaacctctggctgtgtccgtcatgaatcttttcctgaatgcaccaaggggttgtgctgtaggtgacacactgtgtgctcctgcccagcctctgcccataaccctgccctgcacggcccaggtaggctgcacatgctcaccaggcccacctcggccctcccacctctttttgcctctgcacccacagtccccttggctttgctcctctgagttcatgtgagacctgcccatttgtagagtcttgtatttgtccctgccgagccagttgtgtaagcatcacagtctccctaggagacggtggctcttcacaggtcaaggtcagcacctttgaattcagggcactgatgggctcacaccagctgcacgagatgttctcatgtgaagtgtgtggcccgctgctggatttttgtttctttctcttcaggtgttgctggaagaagccaaggatttgctctctgactggctggattctacacttggctgtgatgtcactgacaattccatcttctccaagctgcccaagttctgggagggggacttccacagagacatggaagctctgaatgtaagtgtcacgattgtcttgtgctggctctcttgcgctaagggccctgatttctaaattcctgttttggcaaggccagctcaattaagcggccaagtcaacattgaacttgagttgaggggcataatgggcttttcgttttatgaattgggaacgtttttatggagcgcgtggttttcagaagggaaaatcccaggacattctcatgtcttgcacaggttctccctccagatgtcttaacccgggttagtgagtatgtgccagaaattgtgaactttgtccagaagattgtggacaacggttacgggtaagcacaagggccttccctagggagggaagggctgcagaacatcgcacagggaggagctccccagctctgagcctgagtttgggaagcagaggagcaggtgttctggggctgcgtagctagaagtcccagcagacttcctcctacaactctgggcccacccaggggctgaggagcatgggtctgcactgtcctgggggccatggtgagaacctaacccagaatctgctgggaagctcggcagccaagaccatcagtcatggggccccagagctgcataatggtgagtgcgaatactgctgggccttcacagacatcagtgccattgcgtagacattttgagagtgctagtcctggtgtcatatcccgaaggaggatgcatttcatcagcatctatcgcttggctatgattttagtgactttttgttggcaaatccatcatacacttccctggcccgtattgtctcaatctccaaagtaagcattttcagaaatggccaacaaatggaaatgcagacaggaacccggttatctgtctgtagtgtgtagggaccagccccacagggtcggtgggtttttctccccatgtgtggagatgagagattgtagaaataaagacacaagacaaagagataaaagagaagacagctgggcccgggggaccactaccaccaagacgcggagaccggtagtggccccgaatgccaggctgcactgatatttattggatacaagacaaaggggtaggttaaggagagtgagccatcttcaatgataggtaaggccacgtgggtcacgtgtccactggacagggggcccttccctgcctggcagccaaggcagagagagagaggagacagagagaggcagcttacgccattatttctgcatatcagagacttttagtactttcactaatttgctactgctatctagaaggtagagccaggtgtacaggatggaacatgaaggaggactaggagcgtgaccgctgaagcacagcatcacagggagacggttaggcctccggataactgcgggcgagcctgactcatgtcaggccctccacaagaggtggaggagcagagtcttctccagactcccgcggggcaagggagactccctttcccggtctgctaagtagcgggtgtttttccttgacacttacgctaccgctagaccacagtccgcttggcaacgggcatcctcccagacgctggcgttaccactagaccaaggaacccttctggtggccgtgtccgggcataacaggaggttcacactcttgtcttctggtcactcctcactatgtcccctcagctgctatctctgtatggcctggtttttcctagattatgattatagagcgaggattattataatattggaataaagagtaattgctacaaactaatgattaatgatattcatatataatcatatctaagatctatatctggtataactattcttattttatattttattatactggaacagctcgtgccctcggtctcttgcctcggcacctgggtggcttgccgcccacagtagtgctcagcactgtaccgtgcgcctgctcccagagacccactgtgtccagcctcagattgcttccctcccacaggaaccacacaggctggatgaaagagaaacaagaggttgtgacagtgccaggaacggggcagactcttaagcagtagcgctgcttctctccccacttcacacaaactactgtggggcagcataagagcctgtgccaagccgagaggcatgggcaagccgaagctcagagaggacaggtcattccagactggagtaatctagagtgcttcttggaggccaagagcctcagctaagctaatgggtagagtgtggacattcagggaaaggtgaggccacacaagaatgaggacggcagcagccctgagcaaggcagggtgggagctgcatgggtcacaggacgccaggcagagggacgagctgcccagggcaggcaggctgcctccgcagcgggatgggccctggtgtcccactcagtccaaacagctgatacggttttcagtggccaccacagagagtagataggccacagatttcgcacttttatagccctgctttattttgttactgtcatcctgctgacacactttcgggtctgttagatgcacccacccaattccttttctgttttccagctatgtctccaatgggtctgtctactttgatacagcgaagtttgcttctagcgagaagcactcctatgggaagctggtgcctgaggccgttggagatcagaaagcccttcaagaaggggaaggtgaggagggcatgcctgagagcatgtgggctctccctcctggcccagcctgggttgtgttgactttgcaggccacgggggctgcgctgagcccacccctcagactcttgggaacagtgctttttcacctgaaggaattttaggagttttctgcactcaacattgtgcagctctaagaccatgacatgtgtttttttaatggatatataataattatgcaatttatggggaacatgtgatgtcttaatacatgcacaccgtgtgtgatgatcggggtagttaggatgctcgtcaccttagacgtttaccttttctttgcattgggaatgttccagatcttctggctatgttgaaatatacaacaaatgttttggtaactatagtcaccctactgtgctagtgaccacaagaacctattctttctgtctgtgtgtttgtgcctagaaaccaacctctctccactcactgcccctgacctgactcttctcagcttctggtgaccactgttctatgctgcacctccttgaggtccaccgttttttagctcccacataagagagaggacatgtgatatttgtctttctctgcctggtttatttcacttaacagaatgtcttccagttccatccatgttgctgtaaaagacaagatgtcatttttttatggtgtgttattttttaagaaacaaaagacagtaaacgcagtgctgtcttgagaaacatagtggcccctggggcctggattcacagggctggtgtttgctggctgagcatgtgaggtttagggggattgtggggtgctgggatgtgtgccgagtgatgcatatttgacaacagcctgtgcgcccatctggatccaaatgcttcaaacacagatatcagactttttctagaccaggcagaattatattgggaaccctttcgttggtgttttcttcatgtttatcccttaagtgaatctggggacacatccacaagaggcaaggttggaagcctccctgcagagtggggattcccgcaatgtgccagggcacgttctgcacccccaccccgcctgtcctagtgtttctggaagacaatttggccataaaaatgttcatacttttatctaattttaggctctattctaaagaaatatcagaacctaaaataaaggtgcggtggctcacgcctataatcccagcacttttggaggccgaggtgggtggatcacctgaggttgggagttcgagaccagcctggccaacatggcgaaaccccatctctactaaaaatacacaaattagccaggtgtggtggtgcttgcctgtaatcccagctactcaggaggctgaggcatgagaatcacttgaacccaggaggcagaggttatagtgagccaagattgtgccactgcactccagcctgggtgacagaatgagactctgtctcaaaaaaatatataataaaataaaaccagacaacacagactgaagaaagatagagatagccaggttgacacataaatatcagacccatggcatttcaggctccgggtttgtgggagtagaggggcgggtttgtgatgatgaagcgcctcagctctgagaggatgcagcctgggcctctggaccagaaggcttcactaccctagaaccagagtggacatgcccacgtttcatgcacttcccaggagttgacagatcaagtaggccaagaattaatacggatatgaaaggtttgaaatacagttaacaggcttggtttgagagctgggaactttgcactcaggaattaaagaacatcctttccttccaagaacacagaaacatatgccaggccacagaaagatttccacaaatctcaaagaaccgttttcaaggaaccctcattctgtcaaggagccctcattctgtcaccatggagcgattgtattagataacaacacttggccagacatggcgacccacacctgtaatcccagcactttgggaggccgaggcaggaggatcgcttgagcccaggagttccagaccaacctgggcaacatagggagaccccctttctacaaaaaatttaaaaatgagctgggtgtggtggcacgtgcctatagtcccagctacttaagaggctgatgcaggaggatcacttcagcccaagaagtcaaggctgcagtgagccctgattgtgccattgcactccagcctgggcaacagagcaagactctgtctcaaagacattaaaaaaattttttttttaaaataaaaaagataccaacactgacaggacggacgtctaaaatgtacaaacttgtctggggggttgaaatcatgctcctggataactcctaggaaagaaaaccacagtgggaaatcaggggtgtttaagcagaacagcagcaaaggtgccacacaccaaatctggagaatgcccctaaagcaccaattagaggaaactgatgtttttaaatgtagttattaaaaaacaaagatggaaaataagtgaggtgccgggtgcagtggctcacgcctgtaatcccagcactttgggaggccaaggcaggcggatcacgaggtcaggagttcgagaccagcctggccaatgtggtgaaaccccatctctactaaaaatacaaaaattagccgggtgtggtggcgcatgcctgtagtcccagctactcgggaggctgaggcagaagaatcgcttgaaccctggaggcggaggttgcagtgagctgagagcgtgccactgcactccaacctgggtgacagagcaagagtccatctcaaacaaaaaaaaaggaaataagtgagctaagcagtcagtcaaaaagctgggaaaggaacaagaagaagtagaaagaaataggaggaaataaagtaaaatcagagattaaagaaacagaaacaattgtaaaagccaaaagctgattcttctcaaaaaataatatagaagaacccttagcaagtttgattaataaaagtagaagattgaaaaacatattagggctgaattatagctcatgcctataattcagcactttgggaggccgaggcaggaggatcgcttgaggccaggaattcaagaccatcgtgggcaatgtagtgagaccgcatctctacaaaaattttaaaaattagctgagtgtggtagcatgcacctgtagtcccagttactcagaaggctgaggtaagagggttgcttgagccagggaggtcgaggctgtagtgagctgtgattacaccgttgcactccagcctggctgacagcaagatcctgtgtgtgtgtttgaatgtatgtatgtatgtatgtatgtttgaataacaagacaaaaatggaatgtaactatggatatagtagagcatttcttaaagtccttagaggaagccgtgaacaactcgcactgcatttgacacttagatgccgggagggaactggcagcacatgggaaaggtgggagtggtaagtggagcagtgccctcaggtcacgtggtgaaggaatgttctggaggcagctagagcacactgactcaccactttatgatgaattttgctatctggccccatctagggtctttttcttaaataccatttattcttgggcccattttcttccagaatgacttcagcattggtttaagttccaggaaacaggagtagaatctaacagccaatatgcaggaccaaagagggacatggatttccacccctccacagtcagtgatcagacgtgggcacatgaccacccccgcaacctccccccaccatggggagtcataaggagtgtagccttagctctgtgcagtcatgtgctcctcgccatggggactctaatggtagaggaaaaggggaggggtgatgctggggcccaagtggtcctagatgatgacagctcctcactccgccaagtaagatgacccaccagaggcagatgggccatgcagaccactcgggaaggcacgtggcaggaaggcctagtgcagggaggaagctcccccagtgggagagaacaggaccctgttgtgctggtatgaacatgcttgtagggtcaaagctagaaacactcactctgcctctggggagagagacaggaaatgaaaccaagaaggaaaacttgaaagacattgtgttgtaaccataataggtctgttgcccaatgcacagcgagtcagtataccgggataccaggggttgccgtagaagaagcgtagtaattgtatggtggacaaatggagatgggaggaaacctcagatccgcctccctgagatttggggaggggtttttaattgctctggacaggtgatggggattgccggttgctggggaagtgaggggcgaagtcatgggacagggaggtaaaccacatttctgcgacgagtcagttccttggtgcaggtcttcagaccagttggcaacagctgtcctgctggaattcaggatccaaaaaataccttaagcagttcttggtaaaaaggtccagggttagagattctatcgctaggaacagtggtggagcaggtggtcagcgtgctatgtgactctcagttagagctgcagggaagcggatggacgtgcactgcacctggccagtgaccggcctcatcattctgcctatagcctgccttggaattctcattaaccctatgagggcagttgcagtgtgatgtttgctgaaggatagggtgtttgtggggagggtcctgtgttctctgttatcaattttttcaaagcgtatttttaaaaaatcagatataaactttcatgagtaagttcataataatgaaaagttgaaaacgtgaatgtatattttctatcaaagagcatctaaaagcgaatgtcatgggccatatcacattgtgcttttgcggaattgtcagtggcagaacagtgcggaggtagaaggaagccaggacagcggccttccgtgttggtggatagatctggattttgcttgcagaggttttttgtgtttttgtgtgtttgttttttaatctgggaatcagtataccaaaatggtaacagtagtaattcctaggttaaaagataatggcaatttttttcctagttttctttttttatctttcaaatattctacatttagtacatattttataatcatgaacttggtgtttagaaaaatatatttagcggtgcttttcctctggactctgtttctcagggcagcttaggtctgttgcctgattaggctcctgaaaagtggatttgtcacctggaaagatctcactgcagcttcttcagggtcacctgagttagaaccctagatggagtctgttcttcctccacaagggggtgacagcacctaaggcagcccttagaccagggaccaggaaaggctgcagcagccgggcaagacctggcgtgggtcctggtaaccttatgcctagagtgaagacctctgctctgcccattcatcgaacaaagggtgattctctgcgtgacctttggactggctcacaggtttctttattcacagcagctaatcttttccattggtcctgcatgtattgttgagagaaatctgcagtgatggtgcattccttttctggggactcagaccgccttgtaccctgagtgtcaggtggctgagtgtcaccgagtcaatgcatggaattcaccaaggggttatttctcatccctctggcaaggcatagacagtcttgtttttgttggccaggtgatcattggctttgtccaggaaatagaacttgtgccaagagcagtactccccttttcttatggccttcctggactattctttagtttccttcacctattttccccttataaatacacaggaacagcaaatgtccccttcaccactgcactgccaccaggttccctgcagtagtacacagcagcttagctgcatccttgtatcccccgggacccataagcagatagttgtgcgggcccttgacatattgaccccacccgcatgaaccaggcaggatccctgagccatgccccagtggctgcaccactatgtcacctcctagctttagcccagggttcttatcacttgtcctagacactggtgggctaatgctgtgagaaggcagcaggaaggtgaatgtcttacggagaccccagatgtggcctcaagtcagccaggtatataagctggtgactttggggattatgtaccgttttgtaaatctagacactgggtcaacaccagaatctggtaatacatagttaacttgaagaaatgcttgagccaagttaataaacagaagttagtcagaaggactgcccattaggcaccgtggatggccttgaagtgagacatgtgggtctgtgggtgctgctgagtgaccttgcctggcgtccctcgtgtttgcaggtgacctgagcatctctgcagaccgcctgagtgagaagcgctctcccaacgactttgccttatggaaggcctctaagcccggagaaccgtcctggccgtgcccttggggaaaggtgagcgagtggcctagaaggtgtggggcttggacaggggcactggcgccagccacactctcaggcccccagcagagggccgctctgtgtgtgaaggatgttgtcactgggccagagcctggtgctggtgcagcacaggctgcctggccccggggacctggacatcatggagactccctgagtctctggacaaatcacttccctcctgggatttctgttttctggtctgtaagtggagatgtgatcagagtagacgtccatggaggcttcttggttcttgtgttctgtgactctgagtattccaggccccagggtgtaggatgcgttctgatcttcccggtgacaggagttgttgactgcagggtaccctaggaaggggcgtgaccatctgcagctgtcaagggctcagaggtctggatgtaattcagtaacttcacctaaacctcggcccacataggaccggtttatgaacttcaccaaagaaggctatccttagtcttttttttttttttgagacagagtgtcactctgtcaccaggctggagtgcagtggcgcgatctcagctcactgcaacctctgcctcctagtcccggttcaagcaattctcctgcctcagcctcctgagtagctgggattacaggcatacgtcaccatgctcagctaatttttgtatttttttgtatttttagtagagacggggtttcaccatgttggccaggctggtcttgaactcctgacctggtgatccgtctgcctcggcatcgcaaagtgctgggattacaggtgtgagccatctcgcccagccttcccttagtcttttcatgtgcgggatttaacgcttgttccaataaagttcagaggatgtaagggccatcaacttggagtgataagtgataaaggcctggacaagcgggtaggctggtcagtcactgtgtgttcggctttctccagggtcgtccgggctggcatatcgagtgctcggccatggcaggcaccctcctaggggcttcgatggacattcacggaggtgggttcgacctccggttcccccaccatgacaatgagctggcacagtcggaggtaggtgaaaacagagtccccttgtcaggtgcaagagcacagtgttcatactgcagtggaggaaaagtcagcccaggcctcagaagggcctctctcactagaacttgacaccttcatcggggcttgtgggtggaatctgaaccctgatcatttagtgtggtttccgcattgacagcctggcctttggcaacagactagcctggatttgaaccagttgtgttacctgctggcttattaacctgggctgtccttccaagccctgcctgcaccacctggaaaacgcagctcctgcctgtggacagcaccaacaaggcagcagacagtgcaggtggcaggaggcggccccagtaacacatgactgttgacatcctttgtctctttccacgcaggcctactttgaaaacgactgctgggtcaggtacttcctgcacacaggccacctgaccattgcaggctgcaaaatgtcaaagtcactaaaaaacttcatcaccattaaagatgccttgaaaaagcactcaggtatacactggcttctcccacagaccccccaaccaccttctcatacatgtgtaatggctgtagcactcgggagaataagggcgttggctgtcttgtgtccccccacagcacggcagttgcggctggccttcctcatgcactcgtggaaggacaccctggactactccagcaacaccatggagtcagcgcttcaatatgagaagttcttgaatgtgagtccccagccccttcctggaggttggtggagcagcctcccctgcacagtgggcaccttgtgcagtggtgataggtgcaccagcctcccgatgtctctaatggagaccagcacatgggtggaagcacctccatgctagtgggtataacaggctcggggccactcctgaaatggctgacggctcagcagagtggacagaggcctcgtcctcctagtcactgcagtgcacgtccttctgacttgtactttccaccaaatgagcatctgtaaacctaaagcaagagcatgtttctgtcaaagaaatatcttttcctttctttctgaccacttgtgtaattctggtctttcagatttttaccaaaaataaaatcacagcagtagaaagttgtaacagatatttcaggatggaaaagttgcctaaatgctgttaaactgatttttctaacttcaggagtttttcttaaatgtgaaagatatccttcgcgctcctgttgacatcactggtcagtttgagaagtggggagaagaagaagcagaactgaataagaagtaaggtggtgccatttctttggggtttttgagcatgcccatgttctatgcctagcctcgcatcttggccaccatgtgtcctggactgtcgaggaagggctggggacactgtcgtacgttgtgcagaattaattcaggataggcggctctgctaatgggagctgctctgggtgttgaagtgcatggagaatttcttttttgttttttctttttgagacggagtttcgcccttgttgcccaggctggagtgcagtggcgtgatctcggctcaccacaacctccacctcccgggttcgagcgattctcctgcctcagcctcccgagtagctggggttacaggcatgcgccaccatacctggctaatttcagatttttagtagaggtgggggtctctccatgtttgtcaggctggtctcgaactcccgacctcaggtgatccgcccacctcagcctcccaaagtgctgggattataggcgtgagccactgcgcctggccacatggggaatttctatggtgtgttttcaggtctgacttcacattccttcctctttgttgctcagcttttatgacaagaagacagcaattcacaaagccctctgtgacaatgttgacacccgcaccgtcatggaagagatgcgggccttggtcagtcagtgcaacctctatatggcagcccggaaagccgtgaggaagaggcccaaccaggctctgctggagaacatcgccctgtacctcacccatatgctgaaggtaagccaggccccaggcaggcgtatccctcagcctgtgtggacacaggagccaggccccaggactgggagaacagaggcctctggtgccccccagtgctgtgcctggtgcccagcacctctgagacgtggagatatgcttctgtcctctttggttcctggtgtgcttttcacgcgttagaaataacacccataagcggagcacagtggctcacatctataatccaacactgtgggaggccaggtgagtgtatcacctgagcccaggagttcaaaaccagcctggacaacatagtgagatcccgggtctataaaatatattaaaaattagccaggtgtggtggcacacacctgttttccagctgcttgggaggctgaggtgaggggctcgcttgagcccaggaggttgaatagtgaggtgtgattgcactactgcactccactctgggcaatagaggggagaccctgtctcaaaaccagacaaaaataagtaacatccatatagttgtccttactcagagctatttctttcctttgactccgtttccctctactcccatcttggagtttgaaaagcaaaaccacgccaggcgctgtggctcacgcctgtaatcccagcactttgggaggccaaggcgggcggatcacaaggtcaggagatggagaccatcctgactaacacggtgaaaccccgtctctactaaaaaaaatacaaaaaactagccaggcatggtggcgggttcctgtagttccagctactcgggaggctgaggcaggagaatggcatgaacccaggaggcagagcttgcagtgagccaagattgcgccattgcactccagcctgggcgacagagtgagattccatctcaaaaaaaaaaaaaaaagagaagcaaaaccagggacaaggcctcctctctgaacacatcctgtgcagagcccttccccgcagtgcaccttgaaaggccagcagggcctggactcaactcccctcccctctcctcctctttccttgttgttgggctccagtggcttctggctgaaacagagctggagagggtagctgtgagtcagggccatcctggagcaatgagggcaccctcaggctcgggtttctggggctcctggagctgctgcttccatctctttcctggtcttggggcaccccctcccgtgaacgaggaacacagctcacagctgctcgccacatgccgccttcatcttgccgcagcttcaggtcccatctgtttcttttcctagatctttggggccgtagaagaggacagctccctgggattcccggtcggagggcctggaaccagcctcagtgtgagtagcatgcagggtcctgccttctgcacctgctccctccccactccctacccctctgtgtccctctgaactgcccctcctctgtctgcccacccacaccagacccttccggacagcgcctcgagctaaatggcaattctggctctgagagtgctaagtgtggtcagctgccctgccggtgtggagggtctgctttggttgtgactgttggtttggggcactttgccattgtgctgtcccatgagcttggtcttggaccccaactacataggccgctgcttatttgcattttgctgcggccacttggcatcatgaacacacatgacttcgtcacatatactgacctgtattcagtaaatgcttcatcgaaaggctgcagagctcacaaacagcacagaatttacactgatggggagatacgccactgtctgcctcggtccccatggggctgggcagatgccctaacaggcccagtcctgaccctgagcccaggtcggtccacatggcctgagccaggaccccctgccccagagctgtggcccacaggtcagggggaggtcatcctgtagagccccctgtctagtgggtctgtgcggtgagaaaatccatccagaacaccctggcagtctgttgctggcttctgtttgcagttggcatgtgagcagacacacactgtcagtcctgtccttctgctgtagaacccctgtcccgtctgacacacccacagtcaggcttcttaaagatggacttccacctgctcccaggtcaagaatgctctttgactattcgattagaatgcagatctaaatatttaaatagaacaactgtaattttaattaaaacaggagcttaatacaaagtcaaaatgcaaaacctttttaaaatcctgtttcctaatgacaagtggtgtgaagagcccccatgcggatggagcttacagatgctcccccaggaaccaacttgcaaagagaaaacagtccgtgttgtaagaagtcctgccagagcacctagcccatgtgcctggtgccttttgccagccttagcgctagctagcttggttgtggtagttggtgtggtatttttgagacttcctgatatgaaccttctttggtgcttttaagaaaacccacatagcttctttgttctcttgcgcaaatgatactaagatatttattttctttaaaaacaaaaaaccaaaacacacctcctgggttaaagtcagcctgcctttgaactgcagtgtttttcatcttaacggctgctgtggttgtgggggtgccttcagcgtgctgtggacacgcatccgcatcccccaggcagcctcatttggcctttgcagtcagctgattgcgaagaagcagctgcggcgaatggtgagcctgctgacaaaacgtcctgtgcccacacatcatggccatttgacgttcatggattaacttccaaatccaaatggttttaggagcaagggaggcagttcctccatcttgtaccacctcagtgtcgccacacagccacctgctagcatgctcaggtgggggttgcagccccaggcgttcttgagacacacccctgcagccattctgagagttcccctccagtgcccctagggctggaactgagcctagcagtggggtgaatgcctccctttctgtccttccccaaggcttgtctgggctggctgtgtggtgggtggagatacagatcgaaaacccccaagaagtccaaagttcagatgcagaattgggtctcagggagcttggcttagacttaagggcttgctagcctgcctgacttttgcacttgctaaatttgtgtgtttctgtttttgagacagagtctcactctgtcgcccatgccagtccctgccctgtgtcgtggccgctgagctattattcagttatggatataggagtgtgagcagctctcagcgaacaaaaactcttctttccacagctggagtgcagtagcgcaatctccggtcactgcaccctctgcctcccgagttcaagtgattctcctgcctcagcctcctgagtagctgggactacaggcatgcaccaccatgcccggctaatttttttttgtattttagtagagacgggggtttcactatgttggccaggctagtcttgaactcctgacctcatgatccacccacttcgccctcccaaagtgctgggattacagttgtgagtcaccgcgcccagccagcacttgctaatgtttttattttggttactgagctgctgaatcagctaaggggcagggagcaaccttgctcaaaagcctaaaaccttttctgtcctattagaaaaagagaaatgctagcacagcatggtggctcacgcctgtaatcccagcactttgggaggctgaggtgggtgaatcacctgaggtcgggagttcgagaccagcctgaccaacatggagaaaccctgtctctactaaaaatacaaaattagctgggcgtagtggcgcatgcctgtaatcccagctacgcgggaggctgaggcaggagaatcgcttgaacctggaaggtggaggttgcggtgagccgagatcgccattgcatgccagtctgggcaatgagagcaaaactccatctcaaaaaaaaaaaggggaaatgctttgggaggccaaggcgggcagatcacaaggttaggagattgagaccatcctggccaacaaggtgaaacctcatctctactgaaaatacaaaaattagccaggcgtggtggcgcttgcctgtaatcccagctactcgggaggctgaggcaggtgaatcgcttgaacctgggaggctgaggttgcagtgagccgagatcacaccattgcactccagcctggcaacagagcaagattccgtcttaaaaaaaaaaaaaaaaaaaaaaaagggaaatatagtagaaaggtttttctatcctgtggccacctccccagtgttactgtgggtggtgaatctacgtgtagctgctaatgtgcatgtagatagtaggtgcttaatggagatcattcatcttaaacaagtgtatgtgtgaccacagatcagacgaaagcacggcccgggagccgccagcctcagcataggtaaggccccagcctggggagtgatgtccttgggctccttaggaaatagtccctcccagagctggcccctctgaaaccataaagacaagctgtttcacagcagcgtgtctgacctgaggaaagcagggcctgtcagcagctgggcagagcggcggcagacccacctgctgcagtagaaaggaagctcacttcatgctctctggcctgagagtctgtgtgactcgcacacctagcagggactgtgtgtcagggacgagagcgtccaggctctgggatgccggtcacagctgtagtgtgcacagcagcactgcccatgccagtccctgccctgtgtcgcggccactgagctattattctgttatgaatatgggagtgtgagcagctctcagtgaaccaaaactgttctttccgcagctcgaggccacagtcatgccctaccttcaggtgttatcagaattccgagaaggagtgcggaagattgcccgagagcaaaaaggtgaggaccagttgctggaaagagtgtgggagccactcccctcactgggctccccggaccgggcgtctcccccgaggcactatggcgttcaggccggatcatcctctgggaaggctgccccgtgcaccacagggtgttgaacggcatcccgggcctggacccaccaggtgcattagtaccacacgctccagtcaccacagccccacatgtccctgcagggcagaatcctcgagtgagtgcagctgagtgggcagtggggaccgaggatgtgatatgatgggccagggttgatttgcctctccttctctgagccgaggcagaatggtgggtcctctgaccagcccagtcaccacctgccatttggctcacactggggcttatttttgttcctggtgacctggtaggctgggtgcgctgaggtgtggctcgttcctgctgccgagtggagccgagctgcagcttccagggttcccttttctgctcaggcatgccagatgaatgcttgaacttggggttcacacagtggcccctcactgtccataagcagccattccttcatctttttgtttgtttgtttgtttgagatggagtctcactctgtctcccaggctggagtgcagtggcgcgatctcggctcactgcaagctccgcctcccgggttcacgccattcttctgcctcagcctcctgagtagctgggactacaggcgcctgccaccgcgcccggctaattttttgtattttttttttttttagcagagatggggtttcaccgtgttggccaggatggtctcgatctcctgacctcgtgatccacccgcctcggcctcccaaagtgctgggagtacaggcgtgagccaccgcgcctggccattccttcatcttttgaaatttctgagatgtgtgtggtttaagacttagaaagtgctgaatctgagcattcgttttgactgccagttttaagaaagtgttaaacacagcaaaaagcagcatcaggcaggcctttgcttcttcctgtgagtggttctgaattggtgagtaacagcacagctgggaacacacactgaggacttaggatgtgctgggccctgcccactgctttctgcacattgcctcatttaccaccatgatcctccaaaagaggaaaggagagccctggccgggtcacactgacctcgagtgctactccatcacctgctgtgctaattctccctccccagggggcctctgtgtggtgggaagtctgacctaggatccacctggtccccatctgtgcagagcccattatggagggtcacagtggggcagcatccaggcagggcatgctgaagacagagcagacagagacccagcaagcctctaggagaagctgcaccttgaggaaggatcaggaagcctgggtgggtggaggggccgagaggcggaggagccgaatctgggcctgtttcgggcaggggacagtggagcaggaggcaggagggcaggaaagagtttcgggagctcggggctccacaggctgcaggagagtgcaggacactgggtgagaggagaggctggccgggctgctgggctgctgggctgccacaagtgctctggagaggggcctgggcctgactgagcccctaacaggcagcggtgggcgcacttgccctgaccacataagcaccatcgcccctttccaacacctgatgccctcagcatttcaaagcactggaatcaaactgaaccaagcctggaccagcctattcaggaccagcgcagggctctccagcaatcttggcagcactaacttagcggcatcgctggggtcgtgggcttgggaagaccattcctggaggtcgcctgggcatttccacctgccttctgggggacatcgaaggccgagcccgggccccagctccctggggtcatacaagactgtgcacgtggccttggcttccctggcatgccacagccccgggagggcgctaaagggggactggccaggcacaagctcccgctcggtggcactgaccaggacaggacttgctcaggcctggagagtggcaccagccagccagcattggaagtagttcggttttgctttctgtttgcttttcacttttgttttgtggcttggagcaggtagatgggtgatgtggccccaggttaagatggtggtgatccctaccctgtacatcatcccatatgtgccttgtgagccagagaccctggggatccaggggcctcagaccttccgacggggcagcgtgttagaggtggctctggtgcaatcaccctgtctccccagcagcagcaaatagtgactgttttgttattcactgttaacatctcatggctggccaaagagaaagtgagtgtataacaagctcaggggtggccctcagatcagctgggatctgcttggcccaggccagatgctccacagacagacgaaaaagaaactgtttcccctggaaatacccccatggtccagtcagctagagagcacaggcctggcaaggagggcaatgggttcagggtttgaccaggagagaggcactgaagtgagaaagccaggggctgggccagggccctctgcactggggagatgatgccatttccccatcgccacggttttgttttcattatgttaaaatacacagctcagtgccattagggacatttacagtgttgtgcagccgccaccgtccatctccagaactcttcccttttcccaaactggaactctgtccccatggaacagcaactccacatcccctccctcagcccctggtgctcaccctctacttctgtctctttggattttactactccagggaccctacatgagtggagtcacacagtgtttgtcctgtgtctggcttatttcgctgatcacggtgtcctcaggtctatccatgttgcagcctgtgtcaggacctcctgcctttttaatggccaaatcatattccatggatggatgggccctgatctgtctattcttccatggaagaattctcatcacctttgcgttatctttgtagcccacatttctcttcagtaaatccctgatgatgatgtcattgtctgctcctctgccccagctctgctaacagaagccacagaggcttcttcctcagctcctcagaatccagacccagaggtcggtgtgggcctgaggggtacggcgtgtgtccctttcccccagggagtgtggcccgggaggctttcttggtgcctgctctgatgatcacccatggcgggtgggctggggtgctggccttgtggcctcccatgacacccgtgacagtgaccacaggtgctggcttgccttccttctaatgagggtgctatccaggggtggctttcaaagagtgaagggcaggcacctacctcagctcatgccccagtcagctgctcctcaggtggctgaggagggcctgttcccaggaatgatactgcagacaaatataaaggccattgttcccctaggtctctgcctggggaggttgaaactccggaagctgcccaaagtggctgtgcttatgagcgcggccttgaagcccaaggatatgcaattttttttttttttttttgagatggagtcttgccctgtcgctaggctggagtgcagtggtgtcatcttggcccactgcaacctccgactccctggttcaagcgattcttctgcctcagcgtcccaagtagctgggattacaggcacatgccaccacacccagatagtttttgtatttttagtagagatggggtttcaccatgttggccaggatggtctcgatctcctgaccttgtgatccacccgcctcagcctccaaaagtgctgggattacagtcatgagccaccgtgcctgcccggatatgtgaatattttatctagcagtgaatgaaggtgtggggtgcccagcaaggagctctaggggtctcagttatgaggacacagcaggaaaaggacagacgagaatggcagcatgtgcatggtcagtgctgcccaaaggcagggcaggcaggaggatggggtgggatggtgggggtcccagcaggctggggggcagggcacctgcccgcctagcacagttgggcgcagcaagctgaggggccagaagaaaactaaagggtgtggtgattccagcaaacccaaggtcagatttcagagcagaaagttgtcacttggagagcagcaagcatctgtcctgttgatgtagtctaggagatgctgtcacatcacctgatactctggagtctttctgagataggttggcatcccatttaccctgtaacacccaaaacttcttatgtcctgttctctacctgggcgttgtgcgtgggctgggaacgggaaaactcgggcagagcagagacacagagggggcgcctgctagagactgcgtgaggagcccactaggagaaccgtgggatgccgggcaagtctgcactgctgcgctctgaagtcagccacagacacatgggtttccaagcgaagctccctccccatgtgatggaggtcacagtcgccctccctgtcatgcctcctttcaccctcccagctgggtcaggtccccagtcagaggcagaggtgagcacagtcttgggaagcaacctgcggtccacccccaccgctcagccccgcctttacagctgcgtgcgcttcagccctgggagggctgattctcacagagctcgagctccttggtggtcctgggactcagctctcctgggtgccggtcaggacccccatcgcagtcccgtgtgcatttgggaaccaagtccttggggcttgagtgtaaatggtccttctgtaagaaagctgattctggcaccaacagagaggctgcctcagatgaagagtgttagcacccgaagggacccccaggcctgtcctgaccctcccacccctgctgtcggcccaacttgtgtccctttcctggaagaactgcttccggcggccagtgtgctatgcttcctcctggctctgccctgcacccccagaacagcccctgggcttacgggagacactagtctctgggcttctgcagccaatcaagctgctgggccctccctcccaagcactggaggaggtactcgttctgtgggccggggcccctccctcctgagcactggaggaggcacttgttctgtgggccacggcccctccttccccagcactggaggaggcactggttgtgtgggccctggctcctccatgtctgagggaactgctctgcttctcctacagtccctgagattctgcagctcagcgatgccctgcgggacaacatcctgcccgagcttggggtgcggtttgaagaccacgaaggtgggtgagcccttgctgtttgctacaaagttaccaggagcttggagaggtgtcacaaggagagctcccggggctgggctgaggctcatgcttcatgattgctgatgcagaatcccaaagtggcagccccatgggtcccccggcgccattcccacgctggccagcctggcaggggcaggggagcaccccgtagctccttcccactgctgcgtgtggtggtgtcacctcccctgcgcatcatctcccctaggggcctggctgcccgctgcccctgttgctaccgcctttgaagctctcagctgaggaaccagcctgtatcctgtacactgtcaacagattgcatgcttgttctcccacttcgtggaggtctttttgttccacagaaagttaatttttttgttttttattttcaatttttatttatttgtttattgagacagagtttcgctctgtcgcccaggccggagtacagtggcgcgatctcggctcattgcaacctctgcctcccgggttcaagcgattctcctgcctcagcctcccgagtagctgggattacagacgcccatcaccacgctcggctaatttttgtatctttagtagagacggggtttcactgtgttgaccaggctagtgtcgaactcctgacctcaagtaatctgcccacctcggcctcctaaagtggcatgagccacatgcccagccttagtttcagtttttatggatacataatagttgtacatatttatgggctatgtgtgatatttggatacatgcgtatgaggtactatgatcaaatctaggtaactgagatgtccatcacctcaagcatttatcatttctttgtgttacgaaccctccaattccactcttccactctgcccctggtaattttaaatctcagatgtcatgtcctattttcctactcctggctggcaagaccttcctaccttctcgttacaaaatgttctcgccaggtgtggtggctcatacctgtatcctagcactttgggaggctgaggtgggtggattacctgagctcaggagttcgagaccagcctaggcaacatggtgaaaccccgtctccactaaaatacaaaacattagctgggtgtgggctccttgggcagctgagacacgagaattgcttgaacccgataggcaaaggttgcagtgaactgagatcgtgccactgcactccagcctggatgacagagcaagactctgtctcaaaaaaaaaaaaaaaaaaatcacacacacacaaaccaaaatgttctcctgtgcttcactgctgctatggaggtttttgtttgtttttctcctgtgggccctcgctctgactgggcagcaccgcatggtctgggcagggcagggcagggcagggctggccccgcagtggggacggcccacagagcccagactcttctcacacgcagtttattttgcaggactgcccacagtggtgaaactggtagacagaaacaccttattaaaagagagagaagaaaagagacgggtgagtaaagtgaaaatgacttaagcgtgatatttgttgaaaatgtaaaaaccattgcgattattacatagtttactttttaagcattgatgtttacacttttattaaaatcccagtatttataaatgtcagaaagaaaaattaactagtatcttctaatgaaggacctcttttaaaaagattattccctcagtttaagtgaaaaccagtcacttttggcaaactgtgaagctgacttttttttttttttttttttttgagacggagtctcactctgttgctcagactggagtgcagtggcacgatcttggctcactgcaacctccacttccctggttcaagggattctcctgcctcagcctcccaagtagctgggactacaggcacgcaccactgtgcccagctaatttttgtatttttttagtagagatggggtttcaccatgttggtcaggctggtctcaatctcctgacctcgtgatccacccaccttggcctcccaaagtgctgggattacaggcttgagccaccacgcctggcccgaagctgacatgttaagatcccagtcccaccgtgccctcacctgagtggcgcgtgtcactgatgcatctccacctcctattcccagcatactccccacctgcaccccacaacgcccccaggatcagggatggcccaagttcctcggtgcccaataggacagaagaacaggaacaaaaacgcaatgtcagaatctctgggcacagcgcatggggtaccctgggatgcaggcagcaggatgagaggcacctgggcccccagtgcacaccatgggaggtgggccatgggggctgttgccaccagcaggtgggtccccaagaggcttaaagcaggagaccaccgtggagggcgagtttggatgccacagctctcaggaaggaggctctgggaggaactgaggaaggagaatcgacagggtggttgattgatagatgggatgtacaaggtcagggaaggcatctatgcctagccctgcactggcccaaggcacgaggggagagctcatgccagatccaagtgtgggtggctggagtttgcagtgctttggaggaataacgaactggaactctggggaaagctctagacagtggtgagtggtctgcaggtccatcctggttggcaggttgggaagagctgggcttgccctgtgaggttggctggtgtgactgcctcatcagggcccctccccattccatcacagtcactcacctagccttgggtctcgcctgccgtgctgtgctgtgaggtggcctggtgctggctgtgcagacgccctggcttgctgcactccctggcagagtgctcagaagcaggaaacagacaagaggagcgccagggtggcccggccagagcctcacaggccttgcactctttgtgctggcctttccactggccaccttggctgtggcctgtgacttctagtagctcctgtttcccaaccaagggactcttacctcaccaagctgctgcaagaaggcatccccaggcccgaggcaccatgggggaggggtcctgcctctccctgtaccattcccaccagcacataaacacatactaacttttaaagggaaaaagcagaaatcctgagcactgtgtctctggttcctccaagctcagtgcccagctcctcccccacctcagcccctttccctcggccagccctgctctccctccatctatctcgaaagagctcgatcctgttggccccagccccatcctgagtctctgagacctttgtgccttcctggtttcttttccctagctctgtgtgtggcgcctccccaggagaccttatctggtcctgcggcttctccaccatctatcttgtagccggtggcccaaaaacagtttgcccagctgcctacctgatagctccactgggccaggaagcctctgatatctaggctgtccaaagtaaatgtgattttcaactccccaaacttgttcctccttcctgccatggagggcgtgcctacctgatagctccactgggctgggaagcatctgaaacctaggctgtccaaaggaaaggtgaaaatgtgattttcaactccccaaacttgctccttttccgtcagtggagggcatgtctgttcgtgcaatggctcaggccagaacctcccaaagcaaccgagggcttccctcaccggcacccagcctgctggctccactaataagctctccctgcagcatcagactgtcctcgcccctgcccgggtgctgcctgctggttggagtgggctctggtctcctcacctagcccccaaggctgccctccgcccaccatccccatcctgccctggcgctcttgctccttcccaggtaccccaagacccactcaggataaccctcacagtgctgtcctggtcattgccttacagatcctctctccttgggccaggctcaccatgctggtccatttcttcatgttagtggtgcctggatcttttagcattggttctgtttgtctgcctgctgcatacctttgcatctagggcagggccaggcacccaggggtgccgctgaggatccccaaagggaatggaagagggtcggtgtgctgcccggcacatgggcttgtctccccacagtggggagggcctggtcagagttcagccctccatgccaggccctaggagaggggcttgtttggctagacctctcactccgagagacccagcagcctgaggcagccctgtctcatctggctctgtattgaccctccaggttgaagaggagaagaggaagaagaaagaggaggcggcccggaggaaacaggaacaagaagtaatgcattttgtttgggggtgagggctctactgggcaggagtgcaccctgaccccatgccctgtggctctctgtgcctccgtggaccttagccaggcccctgcagaccctcacagaaggagctccgctttctgcctccaccacccaaggcctgccaggcccttctcacatggggtgcagggaaggcctggccaaggggaaggctgtgccatgtggtcacaagctccaagacagcgtttatagacttactactattaggttttctagtaagctttccactattcctgtagaaataacatctggtttaattttaaattccttgtatgttccctccaccttggctttccccttcccatctttcatagcactctgaatctgagggcttggaagcaagttgagggctggaggtatgagcagatgtcgttcacagtgcggagccccaggtgctgctcgggggcagtgactgtgccgtgttgcgtgttctaggcagcaaagctggccaagatgaagattccccccagtgagatgttcttgtcagaaaccgacaaatactccaagtttgatgaaaatgtaagcatgtaagcatccttctcttctattcagaacttgatcagaccacattaaagtgggaggacaggaattttcaaccttggacaagcagattttctgtctgtagaaaatttggaatcaaatctgacacccgctttaggtccagggcctcctggcccaactactgagctccttccacagcccaggcagctaggcaagcccgtgccagggccccctccactggtgtggtgagctctggtccctagccctgggagttgtggccccgggccaagatccacccaggccctcacaagctggctgaagtgccgtggcgcagataggcctcctacccccagtttcttcctttgtcatagcgattcacagccactgcctccaaacctctaggcccctccctgctggcatttggatgtgtttgctatgtacctttgggccagctgtgtcagaactcagccatgggtaggctctgaggggcacagtgcccctcaccttaggcaggaagcacccccagactctggtcgcccctctcccattcttagctgctggagccagcactgccagatgagtgtgctggctccagagcagtgtggtgactgaatgtccaagcaagaggacatggctgcatcagggagatagacactttgagacgggagggcaaagaaaggggagttggggttacccaggtgcagaggagaccaatagccgctgtgctctgggttttcagggtctgcccacacatgacatggagggcaaagagctcagcaaagggcaagccaagaagctgaagaagctcttcgaggctcaggagaagctctacaaggaatatctgcagatggcccagaatggaagcttccagtgagggggcacaggactgactttttaaaccattgtggactagtggctgctgtctgcctcagtgacaatgtcccagcgctcctatcatgtttacagtcacccttgggtcctaaattaagagttgtgttcatgtaggttcgtgtcgtcgttggctctgagacattgataataaatttttctcaacagtgagaccctc

SEQ ID NO: 15492 - DNA, 56692 bp, Homo sapiens; identical to SEQ ID NO: 1146

SEQ ID NO: 15493 - DNA, 56451 bp, Homo sapiens
gggattcccagccatggcagattcctccgggcagcagggtgagcggcgcggccgggccaggctgagggcggctgggggcctgactgggcgctgggtgctcggctcgaagggcagcgagtccttatgtctgaggggcccgggtgcatgggttctgaggggcagctgtgtccgtggtctgaggggcggcagtgcccgaggtctgaggggtgtcagtgcgcggggtctgagggacggcacgtccttgggtccgaggggcgggggtgctcggggtctgaggggtgtcagtgcccggggtctgagggacggcgggtcctgaggttcgaggggtggcacgtcctaggatccgaaggacaacgggtgcccggctccgagggacggccactgggacccctgggactcctgcgtgagggtctgccagacccgtggctggagcacagaccccgcggggacccgagcccgagcggggcgctgcccagaccacccagcctcagtttcctcacttggttcctgccgaggtccccttgcatcctcaccccgggaggtggccctacatcaaacagcctttccccagccggtgcctgggcgggccctcgctccctcttgccccagctggcctttaggggggagacaaaggcccaagggttgttttggttttctgcccagacctggcagcttccgggaggtgggcggagggcacctgaggttggtatttagggaaatggggcagaggacgccaggggtacgcgtacacacagtaaaagggcttggggctttacgaaggctttcatctccagttccgcaggcagtccactgcaagctgattgtcagagcattactgccccattttattgccaacccgggaggttccccagggacacagctgtgtcagctcccccagtcactcatgtcaccagcgggtagaccttgagagaccagtgggttcttctctcactgtccctccagcaagattttaggtgctggaaaggcaagagactgaatcagaaagcccagattcctaacagtctggagcagcctttccaaaggaaacattctcagtatctagtttttaattcttttggctggcaaaaattagatgcaagttcttgtaagacacctccagcccccaccctcagtttagatcgtaccaagatttccttagcatctggtggtgccctttgcccctgagggtttattgggttatagataggtagttatgacaacccgagtaatctggcggcatggggacacccagatgacagggctacactcttgtgccaagtggcaggaggtggtcaccttccaggcacgccgcctaccaccctacctgtgtgcctggattccagcaccatctccacccgtcccagagccaagcggccctcagaagtcacccagattcctgtaaaacagcatcatagttaacagccccaactctggaaccaccctggaagggccagggttccaactctgcctcccgccccacagcaaaccatgcgtaatggctcctaccttggagcatggagtgtaaatgaattaatagatgggaaggacgtagaacagtgcctggcactcaattaagtgctgtgtctgtgctgaaagttagggcctgtttgttttcaaactaaaaatgtgtttttgttcatttgtgaacgtaaatgacgtattagtagtgttttgtatcttgtttttaaaaatagctttagaattttaggttttcagagccttgtaagaattgccttctttttggagcttgccatataggttgggattgccctctccgggctgtcagggcagcaggcagattgcccagtcctcagcctgcgcacagcatctccagccagtgttcttctgccccagggcatggcccacctgcctttactatcgcctcctcccatcacacacacactctcaaagatgagaacaggaaataaaatccaatcgtaggccaggcgcagtggctcacacctgtaatcccagcactttgggaggccgaggcaggcagatcacgaggtcaggagatcgagaccatggtgaaaccctgtctctactaaaaataaaaaaaaaattagccgggcgcggtggcgggcgcctgactactcggaggctgaggccggagaatgatgtgaacccaggaggcggagcttgcagtgagtcgagattgcgccactgcactccagcctgggcgacagagcgagactccgtctcaaaaaaaaaaaaatccaatcgtaaatgctttcagtgaccatcttcccagatttttcaaggaggccatcatttttgtaccatcttccctaagttgactcagaaggtctatttctctttcctgatctcactgggtgtacagcttttcctttgcggtcttgaaggtgcataggcttggtgcctgtccaagagcctgattatttcagaaggatgagtttcatttctgaggtttctggggtagatggagcctacctcagggcctttccgcacagacttgggataccacttggtcggctgctcatcaggtcagacttatagtttaatttttatacagtttaattcaagggtcttcataataacacagccagcattttttcagcatgagtctgtgccaggcactgctctaaatgctttgcatctgttatctcctgccacccttgggggaacccctttgaggaagatcctgccggcatcttgtacagatgagaatcctgaggttcagagaagtcaagcaatctgtccaccatcacgactagccagaggcacagccaggctcccaacctgggcagcctgactcaatagggaccttaactgctgtgctgtgctgcctttgatgattctcttcagactcacaatagctcaacccagtgagttaaggcagacgagaataaagctgatgcccttcgatgttttccccagagccacatgaaatgtttgctcctctatgaactcaggtaccatgtttccgggtatttgaagagccttaggcagtacccttggggtggagattaagccatttccagtgtgggtgctctgggtggcaatattgctgtctgatcaccccacaggctcattgtgagggatgttggatgcccctaataatgaataacctccctcccagtaaggaggaagatggagatgctgttcttgggggtgagagaggatgcctgggggccacctttgtgaacgagttgcagctggacctccggggctggtgatcaggacggggagtgggaggggaagccctcacctgtgggaggaggcgctggtctctgggagtgggcagtgttggctcctagttggtgagagcaggggtgcatgcccctctctcctccccacgattcatgtctgggggctttttccggtcccctttctgaacacttcttgggcagggagtggatcactgggaaggacccaagaggagcagctgtagagggtgggaccaggggaacatttgcagaaagggagtaacctgcagggtgagatgttgcctggacacccacaagatgaggaccctggtgggacctttgaagtagcagggtcagagggcaaagggtcagggtgagtgaggggtgcagacccccaccaaaccggggcacttattaggagctcagacctgctgtaaaggggtctgcattttagcaagctttccacccatggggaagctggtttaaacctcacttgctgggcccaccccagagattctgatttggcaggtctctggtgagcccaagaatgtgacttctctggatcccccaggttctgctgctgaaggcacaccagggccatgcctggagtggacctgggagagcctcaagggaacgcaggaagagaaacagggcagccgggagaggtttaaatgcttacaggaggccaggcatggtggctcacgtctgtaatcccagcactttgggaggccgaggtgggtggatcacctgaggtcaggagttctagaccagcctggccaatatgtagaaaccccgtctctactaaaaatacaaaaattagctgggcatggtggcgggcacctgtaatcccagctactcgggaggctgaggcaggagaatcgcttgaacccgggaggcagagtttgcagtgagccgagatcatgccactgcactccagcctgggtgacgagcgagactccgtctcaaaaaataaaataaaataaaataaaataaaaataaataaaaaataaatgctgataggaaagagccagagagagggagaggtcgcactgccacagttgtttgacgtgtcagggttgttgttcatttggtgtggctttgttttggtatctgtgctgagcaattgcttggtacttgcatgtgatttcaataaatgttctgtagagactccacctttgtagccggtgacaaccaccatccacctttgggacattcccatgtccctcaatgtgttgatgaactgaactgcaaggtcatccggtggtggacattccttctcatgggggcagagcaggagtttcggcacggagcgtgcaggctctacgatgagggccagtgtcgaggaacaggtccctgggaggttttcagtctgctcagaagtgttctcatctgatctcagcatcagactgatccacagcctggctcaaacccatgaccacttgaaagctgacctatttttatttgtttcctcgagacacacttaaatgcagctaccacgattacccaaatgactgtctgcgtccatctcatggaagcctgtcattctcctgtgcttccctgggcaccagcacctttctgctctgagaagatccttcccaagcatggtcttggttcccttttgatgagccgtctagcctgctctagacggtacatttaagaattatgtgatccaagatcaaggcagatttggtaataaacttttaaaataataaaattaattaaataaaaatgggtgtgtgagccctaggaaaactccaggaaattctctgtgtgtagcatgcggctattacaataacattaataataccagagcgattatgataataatgatggcaaatggggcccctggctctgtgccaggcagcttttaaacattttacaagtgtcatttgacttaatggcctgcagctttacagggctgatgttatgagcgtgttttaccgtgaggaaatgccgccgtgtgtgtgagtgtaggtactcagccctggagggcgtcggggccgcccctcaggtctccagagagcggatacacagcggcttcagttcccagactgcttcctcagcgctcaaaagccactgcagccgccgttaggacatttgatgtttttctcattttaaaaatagcagatgcttactgcagaaaatgtgagcaatgaagaaaaagagggaattaaaatcacctgtcaccccctctcatcaaccatcgtcactgtcagtgttcgggctgttgctggtggtctctccatcagaatccattctgagtgtgagaggcacgtgactgtcagctcgctgtctcagctggaagccgatgctgtgtcactgtttctcagggtgctgctgttgtctcttcttccctcttgctgtcgtggagtccaacccaggcatgagcagttgcagaagaccaaggctcagggaggggacaggggagaggaatgtggagggtcagcattggggaacagctttcgaactgtggcctgatctgtgaggggacaaggctcaccttccagctctgtccatccctctggcaagttctctaatctttagtgaacttcattttctttatcatgaaatgggacccctgctggcagctgcagagctgttggagggaaatatccagctaaactagaagtctcctggctggaagttgctctgcaaaagagtttgtaggagtctgatatttatttagagttagttttccaggacctcactttggggtgcttggagctgcctctgtgggtctgcctccgcctccgtcctccctgatctcatctccagctgggaggagagcgcatctccatgtaagcagcctccttcttctcagagggaagccccggcagtgtcagtgctgacactgggcctgtaactgtggggatggggcaggtgagaggccctcaagagctcccggcaccccccaggcgccttcagtggggccagagtccacccctgtctttctctttccttggactgttggaagagctgaagtgaaaagtgacttgttcttatgtctctggtatctttgggcagcagggctcctgctaagcaagcccctgggggctcaaagcagcagaggctgtggccggttcccagcactggtccttgtgcaggtgtctttctgagaagggtgcatgaggcccagtgccacaggggaacgccagcccaccactggtggcatgcactctgtggtgccattctgctgtccactcatctgtgccctaggcaactttagctgatatctggaatgtcacacgctcagttgtagatgctgaagatcgagcagtgaataaggtagatggagcggtggggcagatggtgaaggaaagaaatgcgggcacgtgttagacaggggtgctgcggagagaaagagcagccaggctcagggtctagaggcgggcgccatatggacagggagtccttgaagacctggtggggaagccggcacctagcagagctgtgaaggattaaggggcctgctggtatctggggagcatgccccctaaaaaaagagcagcaggtggaggggccatgtgactagggtattgtgagtcaggtgggggcccatggccagcatgaggacaggcttgtgctgctggcgaggtgggtgttgggggcagtaatgtgaacgtgcgcttttcagcagggccgctggaggcctgtggctgtgaggggagagccatgctggctacaggtggcggtgtctggcttgcaggaatccaggtgacaagggctggctctcaagtccaaagcttcttttgagttagaggccccggatcctcccgtgggttggctatgggtgctcctaaggataacttgtaaaggggtgtgattccagttttggctagggagtgtgcccagagctttgcttctgggtgcctgtggctgcttggagtgggtggccatcttattggggtcagatgggacagtggctccgtgcagtgggaaggaagcagggcaagttagagggacgctgcactcgtcatcccaccagcgagagtcatcccaggaagccattttaagccctgcatccatgttgagacttcaggaaggctctcccacagagtgcccacccctttactgcagagaagaggtggcttcaggacatcttctccggcagccacggaggctgggccttggggcatcacgtggctccgtaggctccctggcgggtgaagagctcggcccagtggggcattcttgctgctgcagctgtgcactccattctgactcatctttgctgacaccacagcgttccgggaagtgccagttattggcctgacacgaagggctttccccacactaagcaaagcagagaaaggcattcgtgtgcagttacccccgcaacacactctgctctctgttttcagaagctgtgtgggcttggttggggtgactctggctctgtgccaggagtaaacacggagatgggggacaaaagggaatgggagaaggcagagagggggactgtgatgtgcagggcatccacgccccatggctgtgatgtcgggcagcctgtgcccaggaagggcagctggcacagcaaggggtggccagacatgtgcattcctaccctgagtgaactctggggtgagagggtatctgtctggaaggagcaagcatcggtccttttcccacagtcctctcagcaaacacaatcactggttcaaggtttggatgcacctgtgctcatgggctcagggaccagactccctcctctggccagaagcctggcaccatctgcctggtctgcccccactttagggacgtgggctgtggacacagcacctggtccacaactcccgtgtcagaggtaattgcagggagatattccttagaatggtgagacagattttattccctaattcctgacagtaggggaaggagctgcgttccctgccagttcagcagaggtgacttttggatttaaagggagtatgattagctgggcctggtggcatgtgcctgtagtcccagctactcaggaggcttaggctggagggtcacttgagcccagcattttgaggctgtgatgagccttgattgcaccactgcactccagcctgggcagtagagtcagacgctgtctctaaaaaataaaaataaataaataaataaataaataaaaataaaaaagggagaatggaggaggagaaggagggtgagcaggggctcaaatgaaaaaagccatggagctggtcagcgtgcatgtgtcaaggcggccttgtctacagctggcagtggtgaaagttagggttctgctcctcctcccaatggtgacatgcggaacagtggctcttgggtccttgagtgacacacctgagtggtggaggtgcacgcttactgctttgaaggctctaaggagggaggctggggcctggggccaggggccaggggccaggtgaggctggctggagcagccacattttcctggcagccctgtgctttcttgggctggtcctttgagggggcccagtcctcctgaggctgtggccttgacctgcagaagccatgctagagtccagctgtctcttggtgcaggggtgtaaatggcacacattgtcaatgtggggttctcctacccctcatcccccagcacccagagggagagggtgccgctgcggcaaagaggcttgaagttggtttggtttgggggatttctgttgtgagtttttaaaaattgaggttaaattctcgtaacatacttagctgacaggagggataccatgatcatgtaggtagctttcccaaggcgaggcttatccgttatactccagatgtgctgacccctatgatttccccaaatgtcagaaactgaactgtgtaatttgtgatggtgtggaactgtgttcctgctttccctgatagaaaacataaattaaaaatgtaaaaactaagtaatttatatgacataaagtgaaaagtacacaattctgtggtatttggcgcatgatgttgtcatgcagccttcatttctgtctagttccaaagcattttcatcacccaagagggaacccatccatacctgtcaggcagtcactccctcgcccccagtcgaagcgctgcccctgtgcctttgcctgttctggatgtttggcgtccagggaagggcttgaacacctttttccttggttctgtgccatcccctagtccctgtctttctggcggcctctgggctgcccgcctgcctgcctgacaccatgtgccctctgtctttgcagctcctgactacaggtccattctgagcattagtgacgaggcagccagggcacaagccctgaacgagcacctcagcacgcgtagctatgtccaggggtactcactgtcccaggcagacgtggacgcgttcaggcagctctcggccccgcccgctgacccccagctcttccacgtggctcggtggttcaggcacatagaagcgctcctgggtagcccctgtggcaaaggccagccctgcaggctccaagcaagtgagtaacagagtgggttccctggccattagaacctctctcccaaggtcaagggctttctccatcaccctggtgcttacctggcgtctgcggataccccagagggagcctcgcccaagtgtgtctcgagcaagtggcctggatgggcagatgcagcgcttgctggatggaggttgggataaaatcacgccctatggagttggttattcaggagcagtatgttcacatcactggtgtggcaggattgcctgaggtggtggggtgcagagccgctgcggctctggggttccacgtagcatgcccaggccacgggccctagccttgtgatttttagctaaggctgtgcctggctctggttgactcagttctttctctttatttcttccataagattgtagcgtgtctatcctccagctttagaattgttgaatcctaaagtattaattggcattgaacttttttttttttttttttttgagatggagtctcgctctatcgcccaggctggagtgcagtggtgcgatctccactcactgcaagctccacctcccgggttcatgccattctcctgcctcagcctcccgagtagctgggactgtaggcgcccaccaccatgcctggctaattttttgtatttttagtagagacggggtttcaccgtgttagccaggatggtctcgatctcccgacctcgtgatccacccgcctcggcctcccaaagtgctgggattacaagtgtgaaccaccgcgcccggccggcattgaactttttaaaaatcagaaataagtcattttttctctttgagatgatgtctgtcccgtagctccagcctgttggtgctggttgtgtctgtggaacgtgcctgtggttatttgcgggagatactcctgggatgcctgcatggctttgtcactctgtggcaaatctgagggggctccatgccatcatcactgaagtatgcctttgggtggcccagctcctcctgtggctgtgggcactcctccaccttcatgtgggggcaggtttagtgctgttttctggtggtcctggctgtagctggcagccttctgggggcttctccagactccgttggggcctgggattgggaacatgcccccccgcctctgccgtgggtcaggcctctgctagatcactgttttaaccaggctggaggtggggatgtcacatctcctgtgggtcgtgttttctggataactctgcagcagacactccttccccagcgtagggcagaggccgttgctgtgcaggtcacgtccttccccatgtagccgttcctgcctgagcctccagcgcggtcacccaagtgacacctgtgctgtgaggtgccttctctccaagggctcgggtgtcaggttgttccccctgccatgtgccattccaagacacagccagaggggggcaggattagggagggtgaagcgggcctggtacgtccagctcagcagtggcctgtccaggcttccctcatagggacttgttgaaagagcggcacagacgcaagcctccatccacactgtgagaggaaggaagggttttgctcttgcaaacactttttaacctacagagaggaagcagagccacgttgctgtgtaacagaatggaccatggatagcactaatggagttgctgtgccctccccaggttccaaatcccctcatcacccaggctgcgcaagaggctgccagggtctgcttgtgccaggaatgatgggcattatgtcaggcgaccctcactcaagcttgctgtacactgagcaggggctgaagggggaggtgggagctggagtctgggactgctagagcatccagtgacctcgagtgggtccaaggcgccatggagtccagtgtagtgtcctcgcccatgtccctgggatgacagtagctgtggatctccctccatgtagctgtgacaatcagagctgcttcccccactgagtgggaacgccctctctttccatggctcatactccccaagcatgcaccttccttgctggcacagtgggccatgtgcccctcctcctgctcgcccttccacctctgttggacatcccagcagcatcagatgtgcctgtgtctggccctcagtgtgcccgcctgttaccagctcctcccatgtgccttctgtgtcctgtctccaagatcctctcagacatggaaagactctgcttggcccggcgcggtggctcactcctgtaatcccagcactttgggaggccaaggcgggcggatcacgaggtcaggagattgagaccatgctcgctaagtcggtgacaacctgtctctactaaaaatacaaaaaattagccgggcgtgatggcgggtgcctatagtcccagctactcgggaggctgaggcaggagaatggcctgaacctgggaggcggagcttgcagtgagccgagatcgtgccactgtactccagcctaggtgacagagcgagactccgtctcggggtggggggttggagataatggaaaggctctgcttaacccccaggtccctactcctgtgaagccagaccccttcctggtggatcccttccctggatcaccagcctccagcacggaggtccactggatatcaggacgttgaacttgttgagcacttctcacccgcagtggaggctcagcccttccagcccgccggcctctccctaccccccgggaaggagtgtcagctatacccttcactgaggagggtgtgggtctgtcagacgccgaggccatagtttcaggaacatgaaggtttggtgttgctctcacccctccgatggaggacccttaacttcctgatgaaggatttctctccatgaaccccttgcttgggtcctatctgcatctggtgtgttgtaggcagactgcttgccacttcctggcttccctctccatcattttatcttcagcctcccacatccctgtttcaaagccatgtctctcatgagcggttcatagttggtctgttgttggatcactcaggtcagggtgggactctggaatcaacgaatgtgtgttcattttttccaaagaaacaaaagcacaggccaggcgcggtggctcacacctgtaatcccagcactttaggaggccaaggcaggcagatcacaaggtcaggagtttgagaccagcctggccaatatggtgaaaccccatccctactaaagatacaaaaattggtggggcgtggtggcaggtgcctgtagtcctagctacttgggaggctgaggcaggataatcgcttgaactcaggaggcggaggttgcagtgagttgagattgcgccagtgcacttcagccagattttatctaaaaaaaaaaaaggggggcaagggtccttatgtgatatctctcagttcttcccttttgcaaatctgaatttgtatatctgggcctggtaacccgttttcctggggagcccatcgccagctgtgtggagatagcagccttaggggagcaggaatgctggctgtggccaggcttcttggacaagctttcagtcctgtgaaccctgggccgtttcctcatagcagggtgagtgtgatgatcccgtggcctcatggctgtgtttctgggcagcgtctccagctgtctgagatggcagcagtgtcctattgaaggagctccagggtctttgtgagggaggagagtgatgggatcctagagtggccggttgaatgcctccaggcattgagtgagattctccttcaagggcttgtgaggcatttaaagtacactgaggccgagctgcacttggcctcaataagcacatgatgtttgattaagattggagattgcctacgctttagaatctgaccacctgtgaccactggaactcacctagagtgggggctcctgctgagcactggccctctctccgtctcctgccccatctcccacctgcccacagtacccccactgcccagacacagtgcagccgccctccttcctccccttggcctgttagtcatcagcgtctgccgtcctggctcgtgtggcctgagctagagccgggaggccaagagatggctggtgcccaggaccaacttccccgtgatcagtgtgtggcaatttgctggccatgctgccagaccctctggcacagaaaccagggacaggaggaggcaggatgcgagcaccctggtgagctgccaggcggcctgctggggtgggcacaggtcagtgctaggagtatccatctcgtaggccttcctggtgccactcagcagagacatgtgaagcccttcccagggccaggcaccagctggggtcagaggtgcccagcagagcataacgcagaacctggacctgtgggcgacgactgtggagaaaagtggggatctgctgagggggcagggcaggcaggagccggctgagggcaacgggaaagtcaccaggtaccgtcctccacacctagctttgccagattgacgtttcagagggtgaataatcaccctgtggctgcccctggccccagggacagagctctgccccttcagggatctcagatgcaggttgtgtaaggacagccttgtgccaggttggaagccaggcctggaagcagtgtgctcagagcagcccaggcggcccacaggcgagtggaggggaacaactagggaagtctggccaggaggaggtgactgcactgaggggctggctggcaggggtctctgcctggaggctgagaggagctcaggttatttatgaaggcagtatagacctatgtggagcttgaagcccagtgtctggatcagagtctgctgggctgtgggcccagagctgggagccagccactcctgcagtgtccgaagtgatgaggaggggctgggctggagccagtcttgcctgctggccgtggccacagggggtcctttctgctctgactcctggcttctgctgccagggcttggaggcttggaggtggcctctgtcccaacaagagtcctcaaaatcctcagtttgtccaggtgagggatcctgggtgggggaggttcccagggctgcggcagaacagaccataccttgtcagtgtcaagccctgactgacccaggagtgccaggtggtggtgtgctcactgccagaaaggggccagtatttgaagagcagtggaatgtgctgggcacgctgtgcaggcattcctccgccctcctggggctctaagggtgttattggggtatgctgccatacagaatattagaaagcaaaagaaagacgcggttgtcgggaggcagagcttgcagtgagccgagatcacaccactgcactctggcctgggcgacagagcgagactccgtctaaaaaaaaaaaaagacgcagttgtctttgacctgcgtaatgttgaccgagattcgtgtggtttcacattgtttaaatttcatggaaaactatggtcccgttgtaaaaaccaagtctccaggtgaagaggcgacttgcacttcctggtgctgcccctggaccctgatcctgctctctctgcctcccaggcaaaggccggcgtgtgcagccccagtggtcccctcctgctgggacccagccatgcagactccacctttacaacagcctcaccaggaacaaggtaaggagaacacagatgccgtggcacacgcacacaatggggaggcaggaggcaggacagcccatgtgccttgtcgcacaacagacttctctgttccttgtgttgggatctggagttccataaatccaggtttaagatccttcagtcacttccatgttatagtctctgtggcccagaggcagagctgtcctctgaaacccagacacgtgaagtatcatgcctcatgtggaagcctgcccatgacttctgggcatggatcaccctggcttgtctctcggactctgcccaaccatgagtacttgaggtcatccacagccacgcctttcaggaggacgcgtggttgcagcaggtggcactgtatgagccaagcaggatggacaaaacggcaaactggctggatgttgttgggagcacagcaggttttgagaagaaggcaggattggttcctaacagaatggggtttgcatggtttgcttggctcagggcatggccagtgactccagtgatttcagaccaggctctgggcggggctgcttggatttccatcagggagcatgtttggcagacagagagtcaggtgtgagggagttcatggccttccttgggaaactggttgaggatgatgcccccagagaggtctgagggtgctgggatgttggggagtggtgccagagcagcaccacgattcaggggtcctggcctccaagccgcgctcccccaacagggactgaccctggccaagtgttgtctgcctcagtttcttcatccgtaaaaagaaaatgacataacctacgtcctagagtgtactgcatattgaatatttagctcagggcctggcacatggtaggtactcagtaaatattagctgtgttattgttaaataagcagcatttcaacaatcaataaaatcattgattccctttatcgcctccctccatagatgagtagaaccccagggaggaagaggccccacccacccagggctcagttggtgggaggtgccgtacatctcactgggctcccactgagactgtgacttttcacagtaaaacaaaatggtctctgttgaattgtttacactaaacacaaaccacactgtgatgtttgttgctgtttttggtaatcctgtgcagtgtttcttgcatttcttgtgatcgtcattccttcattcctaacaaaggaagtgttcatacctcaagatgggaaaaaggtgacgtggtattgctgtgggccaaccgtctatgacgcatctcacatggggcacgccaggtaggtccaccgcggggtgtccctgcagcttctgcagttgcacgcagaagtcagagccattgggatccacagcagcgatcttaggtccacaaagatcttagatctgctacagagacctgagatttgaggaatcaagactgaatttcttctcttatttttaagatgaaaattttaatgccataagtaatctatattcactgcagaaagactacagatcaccaaaaagaaaatgtccatagccccactgctaacatgctggactcgacctgggcactttttctcacataccttaaagttttctctcatccctcaagctctcgtggggtccccagatgctgagttcccgtgacactcagacctgacaggcctgacgctgggttggctgtgaccgccccccgaccactggatggtcatggctgtagctcctgacgagtagctggctgttggggtaaatgccacagagtccttttatgtgttcatgttttagttgcagtgccaaggtcatgtatagtcaacccttgaacaacctggagggtagagggtgtgaccctctgcacagttgaaaatccacacataacttttgattccccaaaaacttcaccactaaaatagcctcctgttgaccaatagcatgccagtcaatgaacacatattttgtatatacattacatactgtattcctaatgataaaggaagccagagaaaagaaaatattatgaagaaaatcataagggagaggcaatatatttactattcattaggtggaagtggatcattataaaggtcatcatccttgccatcttcacgttgagtagactgaggaggagaagggggggtcttgctgtttcagggatggcagagaaaatcatatataaatgcactcatgcagttcaaacacgtgttgttggaggttaagctatacatatcgtctggtgtggaaatgtttgttttttcattgctttaggtcctacatctcttttgatatcttgagaagagtgttgaaggattacttcaaatttgatgtcttttattgcatgaacattacggatattgatgacaaggtaaagggaatttgtaagattaaattttaaatgcaattggatggtgtaaaagaagatagaactttcgcataagtaaataatgtaggcttgagctagcttgtgttttcacctgataaacatcattttaatcccctcagtgagttaatattaccacttctgctactgatatgatcatttctatgatgttcagacacggttagaaacctgcatgttgctcaggggtcggtagccctgggtgttttgcagaaggaaggcctcccacagcacgcacttcgacatgtggcttgcaggggaagctggggcccccagggctcatttcattaagcgtcagaaagatcatgttaggccttgggcactacttggcaggtgggagatggagggtggtgtttctatttgatgatggtgtgcacgtccggggcccacagttgtctcccaccaccctcaccctcacttagagttggccaagggagagagtggcctgctgcagagggatgcatgtgggatccaagcatcactccccaatgtctgccttccctccccagatcatcaagagggcccggcagaaccacctgttcgagcagtatcgggagaagaggcctgaagcggcacagctcttggaggatgttcaggccgccctgaaggtgggcctcttgctgtctgctctagaaaccgagccctttgctttctgttctcggtcctttgtaggctactgtccctagggtagtgtcagtctcacaggctttcacaaagtgtatgttactcaagccagttccgtcaggggcgctgaagtctccataggtaaggtcccctggcctgtgacaaagtcaccagcaaagatgtactggagtggagtggagagtaggtgacattcctgccacttacaggaaaacaactgaattcatcacagtgccactaattacacttataaaaatgcttaccaatattgctgtctaattttcaatgccaaggttacaactaaatcagaaacttctgcccaagatacaaaagctatactaagctttttaatttggtaatactgtaaattttcagaatcttttgaagaaattagttctctctagtattttcattctgaataaccatcgttatatacttatttttattacaatagtaagaataggtcattttactctctactaattatccttagtaattacagtaatcattatggatatgcttatggcattttatctctggaattaaaaacaggaataaaattagagctgagcaatcttttaggtcagtgaggcctgagtaccttcctgatggatgtgtctgcagcacacctcagaacacactgggtggcctacttttcctcatccccagaacagccctagaaatactgctctcacacccaatttgcattggagaaactgaggcacagagaggttaggtgccctgtccagggtcacacgtgagagggcagaaccaggagctcctgagccgggagcttcagtctctcttagttccttactgcctggccacttgggttgcacacttctctatctctatggggccatgggaaaaaccgttctgttttctacctggaatcacctttatgaatttaggttttgctgagcagtatctaatagatttgacgtctctttatggttgcagccattttcagtaaaattaaatgagaccacggatcccgataaaaagcagatgctcgaacggattcagcacgcagtgcagcttgccacagagccacttgagaaagctgtgcagtccagactcacgggagaggaagtcaacagctgtgtggaggtgaggcttcacacatctcccagacagcccgttcgggtcaaatgtcgggccgtgcatagactgatctgtgtgcacggattgattccacagattgtcttagtggaagacactctgtgtctccagtagctccactgtggcaggcggccctgttctgcggtggctgagtcagtgcccctcccctcccacacccctttgccccatttcctgggtgcagagcctgtgccactggaaggagactcgggatccacaccctcccaccacttccatcagataggcaggaggtgcacttggaacgtggggaggcagccttctgtcgaagtgttccaagattctccagcggactctccccacaccagctggagaaggaggagcagggattaacattgaattgagcattgaggcctgtgggtacctactgagcttggggccttcacgttgaccagctctcctgcccctgccaatatctccttcagacacagggcagagacctgggtgcagaggggaccctgccctcttcctcaggcctttccctgtggctggcgccctggacacagtcaggaaggccttctcctttgtgccagcgccgcctgctggtcaccctttaagaactcgatggaaaagagaagagacggctgcagctgtgtgtagaaaaagaggccccactgaggccgcagccctgccttccctcaccactgccctggccccacctcagtgatggggcagggagtctgtgtctgcccttcgccagcatgtttctttctagtttggtctcttctgtgtcctgactcagcagatcgcttcgttgcgcctgtttccaaacttcacggaaacacgccacgtgtatgtagtcgtcagtgtgctttcacccaagctgtgcttctgggacgacccacatgtggtcactgtcactgcctcagtgcctgcctgggagccgagctgtttgtctgttctcctgggacgggcagttaggtttccttcttaccaacaatgctgctgtaatttttttcccagttgttccactaatattctttttttttttttaattgtggtaaaacacacatcataagaaatttaccatcttagccatttttaaaaactttttttttgtagagacagggtctttttgtgtctggtttattttgcccagcatagtgtgcccatggttgacccatgctgtagtgcatgtcagactctgcttccttcctatggctgaatgatactctgttgtgtatagatgggccacattttgctcatcctttcacctgcccgtggacacgtgggttgtttccaccttttggagatgcaagtaatgctgctataaacctgggtgtacaaatatctgtttgggttcctgctttcacttcttttggggatatacacggaagtggaattgctgggtcatgtgatgattctatttttgatattctgcgtaaccaccgtattgtttctgcagtggctgcactattacacattcccacccatagtgcatggggttctgttttctccacatccttgccaaagcttgttattcttcatttttttcatcccagtaggtgtgaggtggtatactgtggttttggtttgcatttccttaatggctagtgatgtggagtgtcttttgctgaactgtgagttgttttgtgttgtctctaggtggacatttgcaagtttctttaggccatatacctgcaagtggaatcgctgggttgtgtaggatatatgtgagtgactgtcgggggttcccaacactgcccacacattctggggccctagaaggactcatgagactcggcatcgagttatcatcttgtctaaggtttgtagcagtgacacagcgaggagcagaagctcaggcggagtcttcaatcatccatgggcaggctgctgaagcttcctccctgcctcccatgaggggacacagcacactctcccccaccaggaaaaaaatgcagccacatgtgtgaaatgtccctccctagggaagcccatcacataggcaccctctgcctggcacgtgccgcaattcctgactccccaggaggaaagctggtgttccacctgcataagccacagtgtttgttcaacagcccactgggggctgctgccacagagctgggtttcccggcctcttagcacaggggacatttcagctcctggatgccagctaatggccagctctgtaggcaggcctttctcaggtggcagacacagaccttctaggctcacttttatcttcatagtagccatatcagaaatgtctatatggccaggcacagtggctcacacttgtaatcccagcactttgggaagccagggcaagaggatcacttgagcccaggagctccagaccagcctaggcaaaatagtgagactctatttctacaaaacttttaaaaattagccaagcatggtgatgcaagcctgtggttccagctactggggaggctgaggtgagacaatcacctgagcccaggagtttgaggctgcagtgagccatgaacacaccactgcactccagcctgggcagcagagtgagacccagactcttaaaaaaaaagaaagaaatgtctatgcaaatttcttcttcttctaccacattttgggtgtgctgtgtatttgcacatacacctgcatttgtattgttggattcttccctttcatcagtcaatgaatgtgaagtgctgattgctgtggtttgaatgtccctttttccaacctctcctgagactgagcatcttgtcaagtgcttgcttccagctgtgattctgtgcccccatctctccccctttcccatgaggttattggtccttttcttactgttttgtatcattcttatgtcttctgatactaattactatgatttgaatgtttgtcccctccaaaactcatgctgaaacttaatccctagtgtaacagtattaagaggtaaggccttttagaggtgatcgagtcatgagagctctgccctcatgaatgggttaatggattaatgggttatcacagaagtggggtagttatcatgagagtggggctgttacagaagccagtttggccctcatgagccccctggccatgtgatgctctgcgccaccttgggactctgggaaaagtccccaccagcaagaaggcccagaacagatgtggccccttgaccttgaactttccagcctacagaattgtaagaaataaattttatttaaaaattacccattcccaggcagggcatcgtggctcatgcctgtaatcccagcactttgggaggctgaggtgggcagatcacgaggtcaggagatcgagaccatcctggccaacatggtgaaaccccgtctctactaaaaataaaaaaaaaaaaattagctgggtgttgtggcgtgtgcctgtaatcccagctacttgggaggctgaggtgggagaatcccttgaaccagggagtcagaggttgcagtgagccgagatcgtgctgttgcactgcagcctggcgacgaagcaagactccgtctcaaaaagaaaaaaaattttacccattcccggccaggcgcagtgggtcacgcctgtaatcctagcactttgggaggctgaggcgggcggatcacctgaggtcaggggtttgagaccagcctggccaacatggcaaaaccccgttgctactaaaaatacaaaaattagccaaatgtggtggcgcgcgtctgtaatcccagctactctggaggctgaggcaggagaatagcttgaaaccaggaggcggaggttgcagtgagccgagatcacgccactgcattccagcctgggaaacagagtgagactgtctcaaaaaaacaaaacaaaacaaaacaaaaaacagaaaacaaaaaaaagaacaaacaaacaaaaaaacagaaaacagactaagacacgaattcatctctgttacatgttggcatgtgtttgtgtctcttaattctgttctgttggtcaaattgtccagcccagaccaggtgcagtggctcgttcctgtaatcatagcaccttgggaggccaaggcaagaggatcccttgagcccaggagtttgagatcagccgggacaacatagtgagactctatctctacaaaaagtttaagaatttaaaatttaaaaaatttataaaaattgcccagtcctgcaggagtatcatgctgtctctcacaggtatctgatgggtaagaggccccatcttggttttgtcgttaggtgtgttttgaagcctcagcttgtcaagttccatgtaagacactgttgggattttacatgttgtatctaagaaccatctcagatccagtttggctgtgttgatcctctgtagtctttttgttttatcagtttttgtccattctttattccttcttttcttctttttcctttggatttattctgtttttctttgtctcatttagcagtttagcttattttctgatttaagaatttaaggctatacattttcctctgactgtttttgctgcaaaatttgacatcatttacttgtaaacaatttctaatttccattttggattttttagcccaggaattatctagaagtaattacctaaaagttaattatctagaattacttagaagttttaaatttccaaatttaaattggatggtactttttcatattaacttattgttattcgcttataacttaattacccagtggttggagagtatggtctgtcccaatctggatctgtgaacagagacttgtgttgtggcccctgtgtgtgctggtttctgaatgttctcttgtgcttgagaagattccgtctaatcccctagtgcacagttccacatgccatccacttagctatacctgttggccgtgtggttaatattttgtgtgtctttgctaattcttcctgttggcttagcctattcatacagtttcttaaaaaaacaaaaacaagaaccaaaacaaaactccccctctgatgatgaatttgtctgtttctccttattttttcactttttagaaaaaaaaaaagtttttttttagaggagattctggttcacatcagaattgagaggctatatatatcccctacccacctcaccgtcacctcccccagcatccgcacccaccagggggtacgtttcttacagtcagcgaacctgctctgagcgtcattaccctgagtccgtggtttactttagggttcactctcaggattgttacatcctatgggtttggacaaatactatctcgtatccaccattacggtatcacacagaatagtttcactgccctgaacatcctctgtgctccagctattatcccttcctccccaccccaactcctgacagcagctagtctttctactgtctccgtagttttgcctttcccagaatgtcacatacttggaatcctacagtgttgcagccatttcagatcggaaaaaatttttaaacagaatacttcacctctgatcaccaaaatgcatagggatttcttcctcacccagcccacctctgccccgacaaccagtcagttctctagcaggcatcagctgggagtcctaaaatttaattcatttccaacacagtttgccaggaggaagcgtcagatctgacaggttgaagggctcagtcccataagactgtccccaattcagatgccagttgaaagtagtagtttgttacctatacttctgacctaccagttattggccgggcgcggtggctcacgcctgaactcccagcactttgggaggccgagatgggcagatcatgaggtcaagagattgagaccatcccggccaacatggtgaaaccccgtctctactgacaatgcaaacattagctgggcgtggcgtcacgtgactgtaatcccttctactcgggaggctgaggcaggagaattgcttgaacccgggaggcggaggttgcagtgagctgagattgcactactgcactccagcctggtgacagagctagactccatcaaggaaggaaggaaggaaggaaggaaggaaggagggagggagggagggagggagggagggagggagggagggagggagggagggagggagggagggaaggaaggaaggagaaagaaaagaacagagtgcactggtatattttggaatgcttcctttcccttcttgctattggaaacacaaggggatttttctccaatattcactgtgaggcctggtcaggttcctagaggtaaaactcacaaaagtatggggtcccctatgactgggtccctggggttttcaactgtctgacttgcctacaccaagcctgcagcaatctctgttacagtcctggttttcctcccccaacactggttcccacagaattttcagcttatgagtctctgctctggtaagttgtgattgtctgtcttctcctgttggtctctccagtttagggggcagtggtttgccctatgacctaacttctcttatggatctaagaagagttggtttttcagtttattcagctttttacctgttgttaggtagagtggcaacttccaagctcctgacttatgtgaaactggaaagcagaagtctcttatcattttgtatttatgcattttgattgttgatctgtatgcttgaccagcaacattgagtattccagccctatcatcaggcaagttttagaaacattatcttagaagtattggtgggaagcagcttttgtctatcttgaagtgtgtatatttccctgtttgttcaaggtggttgccgtcttctggcttccattgttggctgttgttgaaaacatcggctgcccttcaaattacttttctttgattggtaaatatgtcttttctatcaggcgcattataaaagtattctctcttttcagttttctgctatttcacaaagacattgtaagagatttgtttttacttatcctattggatattttgtgtgcttcccggggctggattgttgcatgggttttgagaaattctcagatgtgtcttcaagtatcacctttactcgattccctctctcctctcctctgggttgccaattagatgtgagtctcatcatttcatctcatccttctccgtgtctcctaacctgtctttcataaaattttccttcttgtctctgtttcattttggatgacttcttcagttctgtcttcctgttcacaaattctccttcagacaggaagtgaaacagtcactcagtaggatggataagactgtttcgcctgttaatagatttcatctctgcaggttccgtttgcttctattttcagatccagctgggccgctttgctggcctgtccctgcttgctattgcctgtcatctgggagtccgtccttatgtctttaagcctgtaatatttactggattttattatgtatctgataactcctccatctgaagcgtccatctgtttgtcgtttctgctgactcccattcacagttgctcatgttcttgggtgtttggtgacctcgattaggatgtcggttcttgctgggtcgtgaccttggtgatcctgagggccaggatgcgcgtttccctgtacttggggcaggcccagtgtttgcttttcgggcagcagacttggcagcctttgctccccagagcgcacaccctgcttttggtgcttgtctgcccactggatgccctgccgcggtggggagggtgtgctcattcctgcagacgtgccttgccacttgcaggcctgcaatacatttaacacatctgtttgattcaggagctgtaggcagggattgcatcaggaacctggcccacgtgggccctgtgccccttctctgtctgtgttgtggctttgtccaccctgtgtccttgctgtctgccaggccattttcctacactttttctctccagccttggttctttgcctccccttcccatagtaggccacagaccatctgcttggtgtcacgccctgtcctgggtccacgtcagtgcattgagactctaggtccctccaagatggcggagggtagacatttctcttttctgacatgagtgcagttggggcgtgtctcatgcctagagtgtgtgtggtcaggacctggttcacataggtgccatgttttgctgggattggtggtttttactcccattccatggtgtgtcaagtggggatggcatcttcagtcaatggcgtcagggagatggggcttttgagacctctgggaccagtgccctgcctatctctcctaacctctggctgtgtccgtcatgaatcttttcctgaatgcaccaaggggttgtgctgtaggtgacacactgtgtgctcctgcccagcctctgcccataaccctgccctgcacggcccaggtaggctgcacatgctcaccaggcccacctcggccctcccacctctttttgcctctgcacccacagtccccttggctttgctcctctgagttcatgtgagacctgcccatttgtagagtcttgtatttgtccctgccgagccagttgtgtaagcatcacagtctccctaggagacggtggctcttcacaggtcaaggtcagcacctttgaattcagggcactgatgggctcacaccagctgcacgagatgttctcatgtgaagtgtgtggcccgctgctggatttttgtttctttctcttcaggtgttgctggaagaagccaaggatttgctctctgactggctggattctacacttggctgtgatgtcactgacaattccatcttctccaagctgcccaagttctgggagggggacttccacagagacatggaagctctgaatgtaagtgtcacgattgtcttgtgctggctctcttgcgctaagggccctgatttctaaattcctgttttggcaaggccagctcaattaagcggccaagtcaacattgaacttgagttgaggggcataatgggcttttcgttttatgaattgggaacgtttttatggagcgcgtggttttcagaagggaaaatcccaggacattctcatgtcttgcacaggttctccctccagatgtcttaacccgggttagtgagtatgtgccagaaattgtgaactttgtccagaagattgtggacaacggttacgggtaagcacaagggccttccctagggagggaagggctgcagaacatcgcacagggaggagctccccagctctgagcctgagtttgggaagcagaggagcaggtgttctggggctgcgtagctagaagtcccagcagacttcctcctacaactctgggcccacccaggggctgaggagcatgggtctgcactgtcctgggggccatggtgagaacctaacccagaatctgctgggaagctcggcagccaagaccatcagtcatggggccccagagctgcataatggtgagtgcgaatactgctgggccttcacagacatcagtgccattgcgtagacattttgagagtgctagtcctggtgtcatatcccgaaggaggatgcatttcatcagcatctatcgcttggctatgattttagtgactttttgttggcaaatccatcatacacttccctggcccgtattgtctcaatctccaaagtaagcattttcagaaatggccaacaaatggaaatgcagacaggaacccggttatctgtctgtagtgtgtagggaccagccccacagggtcggtgggtttttctccccatgtgtggagatgagagattgtagaaataaagacacaagacaaagagataaaagagaagacagctgggcccgggggaccactaccaccaagacgcggagaccggtagtggccccgaatgccaggctgcactgatatttattggatacaagacaaaggggtaggttaaggagagtgagccatcttcaatgataggtaaggccacgtgggtcacgtgtccactggacagggggcccttccctgcctggcagccaaggcagagagagagaggagacagagagaggcagcttacgccattatttctgcatatcagagacttttagtactttcactaatttgctactgctatctagaaggtagagccaggtgtacaggatggaacatgaaggaggactaggagcgtgaccgctgaagcacagcatcacagggagacggttaggcctccggataactgcgggcgagcctgactcatgtcaggccctccacaagaggtggaggagcagagtcttctccagactcccgcggggcaagggagactccctttcccggtctgctaagtagcgggtgtttttccttgacacttacgctaccgctagaccacagtccgcttggcaacgggcatcctcccagacgctggcgttaccactagaccaaggaacccttctggtggccgtgtccgggcataacaggaggttcacactcttgtcttctggtcactcctcactatgtcccctcagctgctatctctgtatggcctggtttttcctagattatgattatagagcgaggattattataatattggaataaagagtaattgctacaaactaatgattaatgatattcatatataatcatatctaagatctatatctggtataactattcttattttatattttattatactggaacagctcgtgccctcggtctcttgcctcggcacctgggtggcttgccgcccacagtagtgctcagcactgtaccgtgcgcctgctcccagagacccactgtgtccagcctcagattgcttccctcccacaggaaccacacaggctggatgaaagagaaacaagaggttgtgacagtgccaggaacggggcagactcttaagcagtagcgctgcttctctccccacttcacacaaactactgtggggcagcataagagcctgtgccaagccgagaggcatgggcaagccgaagctcagagaggacaggtcattccagactggagtaatctagagtgcttcttggaggccaagagcctcagctaagctaatgggtagagtgtggacattcagggaaaggtgaggccacacaagaatgaggacggcagcagccctgagcaaggcagggtgggagctgcatgggtcacaggacgccaggcagagggacgagctgcccagggcaggcaggctgcctccgcagcgggatgggccctggtgtcccactcagtccaaacagctgatacggttttcagtggccaccacagagagtagataggccacagatttcgcacttttatagccctgctttattttgttactgtcatcctgctgacacactttcgggtctgttagatgcacccacccaattccttttctgttttccagctatgtctccaatgggtctgtctactttgatacagcgaagtttgcttctagcgagaagcactcctatgggaagctggtgcctgaggccgttggagatcagaaagcccttcaagaaggggaaggtgaggagggcatgcctgagagcatgtgggctctccctcctggcccagcctgggttgtgttgactttgcaggccacgggggctgcgctgagcccacccctcagactcttgggaacagtgctttttcacctgaaggaattttaggagttttctgcactcaacattgtgcagctctaagaccatgacatgtgtttttttaatggatatataataattatgcaatttatggggaacatgtgatgtcttaatacatgcacaccgtgtgtgatgatcggggtagttaggatgctcgtcaccttagacgtttaccttttctttgcattgggaatgttccagatcttctggctatgttgaaatatacaacaaatgttttggtaactatagtcaccctactgtgctagtgaccacaagaacctattctttctgtctgtgtgtttgtgcctagaaaccaacctctctccactcactgcccctgacctgactcttctcagcttctggtgaccactgttctatgctgcacctccttgaggtccaccgttttttagctcccacataagagagaggacatgtgatatttgtctttctctgcctggtttatttcacttaacagaatgtcttccagttccatccatgttgctgtaaaagacaagatgtcatttttttatggtgtgttattttttaagaaacaaaagacagtaaacgcagtgctgtcttgagaaacatagtggcccctggggcctggattcacagggctggtgtttgctggctgagcatgtgaggtttagggggattgtggggtgctgggatgtgtgccgagtgatgcatatttgacaacagcctgtgcgcccatctggatccaaatgcttcaaacacagatatcagactttttctagaccaggcagaattatattgggaaccctttcgttggtgttttcttcatgtttatcccttaagtgaatctggggacacatccacaagaggcaaggttggaagcctccctgcagagtggggattcccgcaatgtgccagggcacgttctgcacccccaccccgcctgtcctagtgtttctggaagacaatttggccataaaaatgttcatacttttatctaattttaggctctattctaaagaaatatcagaacctaaaataaaggtgcggtggctcacgcctataatcccagcacttttggaggccgaggtgggtggatcacctgaggttgggagttcgagaccagcctggccaacatggcgaaaccccatctctactaaaaatacacaaattagccaggtgtggtggtgcttgcctgtaatcccagctactcaggaggctgaggcatgagaatcacttgaacccaggaggcagaggttatagtgagccaagattgtgccactgcactccagcctgggtgacagaatgagactctgtctcaaaaaaatatataataaaataaaaccagacaacacagactgaagaaagatagagatagccaggttgacacataaatatcagacccatggcatttcaggctccgggtttgtgggagtagaggggcgggtttgtgatgatgaagcgcctcagctctgagaggatgcagcctgggcctctggaccagaaggcttcactaccctagaaccagagtggacatgcccacgtttcatgcacttcccaggagttgacagatcaagtaggccaagaattaatacggatatgaaaggtttgaaatacagttaacaggcttggtttgagagctgggaactttgcactcaggaattaaagaacatcctttccttccaagaacacagaaacatatgccaggccacagaaagatttccacaaatctcaaagaaccgttttcaaggaaccctcattctgtcaaggagccctcattctgtcaccatggagcgattgtattagataacaacacttggccagacatggcgacccacacctgtaatcccagcactttgggaggccgaggcaggaggatcgcttgagcccaggagttccagaccaacctgggcaacatagggagaccccctttctacaaaaaatttaaaaatgagctgggtgtggtggcacgtgcctatagtcccagctacttaagaggctgatgcaggaggatcacttcagcccaagaagtcaaggctgcagtgagccctgattgtgccattgcactccagcctgggcaacagagcaagactctgtctcaaagacattaaaaaaattttttttttaaaataaaaaagataccaacactgacaggacggacgtctaaaatgtacaaacttgtctggggggttgaaatcatgctcctggataactcctaggaaagaaaaccacagtgggaaatcaggggtgtttaagcagaacagcagcaaaggtgccacacaccaaatctggagaatgcccctaaagcaccaattagaggaaactgatgtttttaaatgtagttattaaaaaacaaagatggaaaataagtgaggtgccgggtgcagtggctcacgcctgtaatcccagcactttgggaggccaaggcaggcggatcacgaggtcaggagttcgagaccagcctggccaatgtggtgaaaccccatctctactaaaaatacaaaaattagccgggtgtggtggcgcatgcctgtagtcccagctactcgggaggctgaggcagaagaatcgcttgaaccctggaggcggaggttgcagtgagctgagagcgtgccactgcactccaacctgggtgacagagcaagagtccatctcaaacaaaaaaaaaggaaataagtgagctaagcagtcagtcaaaaagctgggaaaggaacaagaagaagtagaaagaaataggaggaaataaagtaaaatcagagattaaagaaacagaaacaattgtaaaagccaaaagctgattcttctcaaaaaataatatagaagaacccttagcaagtttgattaataaaagtagaagattgaaaaacatattagggctgaattatagctcatgcctataattcagcactttgggaggccgaggcaggaggatcgcttgaggccaggaattcaagaccatcgtgggcaatgtagtgagaccgcatctctacaaaaattttaaaaattagctgagtgtggtagcatgcacctgtagtcccagttactcagaaggctgaggtaagagggttgcttgagccagggaggtcgaggctgtagtgagctgtgattacaccgttgcactccagcctggctgacagcaagatcctgtgtgtgtgtttgaatgtatgtatgtatgtatgtatgtttgaataacaagacaaaaatggaatgtaactatggatatagtagagcatttcttaaagtccttagaggaagccgtgaacaactcgcactgcatttgacacttagatgccgggagggaactggcagcacatgggaaaggtgggagtggtaagtggagcagtgccctcaggtcacgtggtgaaggaatgttctggaggcagctagagcacactgactcaccactttatgatgaattttgctatctggccccatctagggtctttttcttaaataccatttattcttgggcccattttcttccagaatgacttcagcattggtttaagttccaggaaacaggagtagaatctaacagccaatatgcaggaccaaagagggacatggatttccacccctccacagtcagtgatcagacgtgggcacatgaccacccccgcaacctccccccaccatggggagtcataaggagtgtagccttagctctgtgcagtcatgtgctcctcgccatggggactctaatggtagaggaaaaggggaggggtgatgctggggcccaagtggtcctagatgatgacagctcctcactccgccaagtaagatgacccaccagaggcagatgggccatgcagaccactcgggaaggcacgtggcaggaaggcctagtgcagggaggaagctcccccagtgggagagaacaggaccctgttgtgctggtatgaacatgcttgtagggtcaaagctagaaacactcactctgcctctggggagagagacaggaaatgaaaccaagaaggaaaacttgaaagacattgtgttgtaaccataataggtctgttgcccaatgcacagcgagtcagtataccgggataccaggggttgccgtagaagaagcgtagtaattgtatggtggacaaatggagatgggaggaaacctcagatccgcctccctgagatttggggaggggtttttaattgctctggacaggtgatggggattgccggttgctggggaagtgaggggcgaagtcatgggacagggaggtaaaccacatttctgcgacgagtcagttccttggtgcaggtcttcagaccagttggcaacagctgtcctgctggaattcaggatccaaaaaataccttaagcagttcttggtaaaaaggtccagggttagagattctatcgctaggaacagtggtggagcaggtggtcagcgtgctatgtgactctcagttagagctgcagggaagcggatggacgtgcactgcacctggccagtgaccggcctcatcattctgcctatagcctgccttggaattctcattaaccctatgagggcagttgcagtgtgatgtttgctgaaggatagggtgtttgtggggagggtcctgtgttctctgttatcaattttttcaaagcgtatttttaaaaaatcagatataaactttcatgagtaagttcataataatgaaaagttgaaaacgtgaatgtatattttctatcaaagagcatctaaaagcgaatgtcatgggccatatcacattgtgcttttgcggaattgtcagtggcagaacagtgcggaggtagaaggaagccaggacagcggccttccgtgttggtggatagatctggattttgcttgcagaggttttttgtgtttttgtgtgtttgttttttaatctgggaatcagtataccaaaatggtaacagtagtaattcctaggttaaaagataatggcaatttttttcctagttttctttttttatctttcaaatattctacatttagtacatattttataatcatgaacttggtgtttagaaaaatatatttagcggtgcttttcctctggactctgtttctcagggcagcttaggtctgttgcctgattaggctcctgaaaagtggatttgtcacctggaaagatctcactgcagcttcttcagggtcacctgagttagaaccctagatggagtctgttcttcctccacaagggggtgacagcacctaaggcagcccttagaccagggaccaggaaaggctgcagcagccgggcaagacctggcgtgggtcctggtaaccttatgcctagagtgaagacctctgctctgcccattcatcgaacaaagggtgattctctgcgtgacctttggactggctcacaggtttctttattcacagcagctaatcttttccattggtcctgcatgtattgttgagagaaatctgcagtgatggtgcattccttttctggggactcagaccgccttgtaccctgagtgtcaggtggctgagtgtcaccgagtcaatgcatggaattcaccaaggggttatttctcatccctctggcaaggcatagacagtcttgtttttgttggccaggtgatcattggctttgtccaggaaatagaacttgtgccaagagcagtactccccttttcttatggccttcctggactattctttagtttccttcacctattttccccttataaatacacaggaacagcaaatgtccccttcaccactgcactgccaccaggttccctgcagtagtacacagcagcttagctgcatccttgtatcccccgggacccataagcagatagttgtgcgggcccttgacatattgaccccacccgcatgaaccaggcaggatccctgagccatgccccagtggctgcaccactatgtcacctcctagctttagcccagggttcttatcacttgtcctagacactggtgggctaatgctgtgagaaggcagcaggaaggtgaatgtcttacggagaccccagatgtggcctcaagtcagccaggtatataagctggtgactttggggattatgtaccgttttgtaaatctagacactgggtcaacaccagaatctggtaatacatagttaacttgaagaaatgcttgagccaagttaataaacagaagttagtcagaaggactgcccattaggcaccgtggatggccttgaagtgagacatgtgggtctgtgggtgctgctgagtgaccttgcctggcgtccctcgtgtttgcaggtgacctgagcatctctgcagaccgcctgagtgagaagcgctctcccaacgactttgccttatggaaggcctctaagcccggagaaccgtcctggccgtgcccttggggaaaggtgagcgagtggcctagaaggtgtggggcttggacaggggcactggcgccagccacactctcaggcccccagcagagggccgctctgtgtgtgaaggatgttgtcactgggccagagcctggtgctggtgcagcacaggctgcctggccccggggacctggacatcatggagactccctgagtctctggacaaatcacttccctcctgggatttctgttttctggtctgtaagtggagatgtgatcagagtagacgtccatggaggcttcttggttcttgtgttctgtgactctgagtattccaggccccagggtgtaggatgcgttctgatcttcccggtgacaggagttgttgactgcagggtaccctaggaaggggcgtgaccatctgcagctgtcaagggctcagaggtctggatgtaattcagtaacttcacctaaacctcggcccacataggaccggtttatgaacttcaccaaagaaggctatccttagtcttttttttttttttgagacagagtgtcactctgtcaccaggctggagtgcagtggcgcgatctcagctcactgcaacctctgcctcctagtcccggttcaagcaattctcctgcctcagcctcctgagtagctgggattacaggcatacgtcaccatgctcagctaatttttgtatttttttgtatttttagtagagacggggtttcaccatgttggccaggctggtcttgaactcctgacctggtgatccgtctgcctcggcatcgcaaagtgctgggattacaggtgtgagccatctcgcccagccttcccttagtcttttcatgtgcgggatttaacgcttgttccaataaagttcagaggatgtaagggccatcaacttggagtgataagtgataaaggcctggacaagcgggtaggctggtcagtcactgtgtgttcggctttctccagggtcgtccgggctggcatatcgagtgctcggccatggcaggcaccctcctaggggcttcgatggacattcacggaggtgggttcgacctccggttcccccaccatgacaatgagctggcacagtcggaggtaggtgaaaacagagtccccttgtcaggtgcaagagcacagtgttcatactgcagtggaggaaaagtcagcccaggcctcagaagggcctctctcactagaacttgacaccttcatcggggcttgtgggtggaatctgaaccctgatcatttagtgtggtttccgcattgacagcctggcctttggcaacagactagcctggatttgaaccagttgtgttacctgctggcttattaacctgggctgtccttccaagccctgcctgcaccacctggaaaacgcagctcctgcctgtggacagcaccaacaaggcagcagacagtgcaggtggcaggaggcggccccagtaacacatgactgttgacatcctttgtctctttccacgcaggcctactttgaaaacgactgctgggtcaggtacttcctgcacacaggccacctgaccattgcaggctgcaaaatgtcaaagtcactaaaaaacttcatcaccattaaagatgccttgaaaaagcactcaggtatacactggcttctcccacagaccccccaaccaccttctcatacatgtgtaatggctgtagcactcgggagaataagggcgttggctgtcttgtgtccccccacagcacggcagttgcggctggccttcctcatgcactcgtggaaggacaccctggactactccagcaacaccatggagtcagcgcttcaatatgagaagttcttgaatgtgagtccccagccccttcctggaggttggtggagcagcctcccctgcacagtgggcaccttgtgcagtggtgataggtgcaccagcctcccgatgtctctaatggagaccagcacatgggtggaagcacctccatgctagtgggtataacaggctcggggccactcctgaaatggctgacggctcagcagagtggacagaggcctcgtcctcctagtcactgcagtgcacgtccttctgacttgtactttccaccaaatgagcatctgtaaacctaaagcaagagcatgtttctgtcaaagaaatatcttttcctttctttctgaccacttgtgtaattctggtctttcagatttttaccaaaaataaaatcacagcagtagaaagttgtaacagatatttcaggatggaaaagttgcctaaatgctgttaaactgatttttctaacttcaggagtttttcttaaatgtgaaagatatccttcgcgctcctgttgacatcactggtcagtttgagaagtggggagaagaagaagcagaactgaataagaagtaaggtggtgccatttctttggggtttttgagcatgcccatgttctatgcctagcctcgcatcttggccaccatgtgtcctggactgtcgaggaagggctggggacactgtcgtacgttgtgcagaattaattcaggataggcggctctgctaatgggagctgctctgggtgttgaagtgcatggagaatttcttttttgttttttctttttgagacggagtttcgcccttgttgcccaggctggagtgcagtggcgtgatctcggctcaccacaacctccacctcccgggttcgagcgattctcctgcctcagcctcccgagtagctggggttacaggcatgcgccaccatacctggctaatttcagatttttagtagaggtgggggtctctccatgtttgtcaggctggtctcgaactcccgacctcaggtgatccgcccacctcagcctcccaaagtgctgggattataggcgtgagccactgcgcctggccacatggggaatttctatggtgtgttttcaggtctgacttcacattccttcctctttgttgctcagcttttatgacaagaagacagcaattcacaaagccctctgtgacaatgttgacacccgcaccgtcatggaagagatgcgggccttggtcagtcagtgcaacctctatatggcagcccggaaagccgtgaggaagaggcccaaccaggctctgctggagaacatcgccctgtacctcacccatatgctgaaggtaagccaggccccaggcaggcgtatccctcagcctgtgtggacacaggagccaggccccaggactgggagaacagaggcctctggtgccccccagtgctgtgcctggtgcccagcacctctgagacgtggagatatgcttctgtcctctttggttcctggtgtgcttttcacgcgttagaaataacacccataagcggagcacagtggctcacatctataatccaacactgtgggaggccaggtgagtgtatcacctgagcccaggagttcaaaaccagcctggacaacatagtgagatcccgggtctataaaatatattaaaaattagccaggtgtggtggcacacacctgttttccagctgcttgggaggctgaggtgaggggctcgcttgagcccaggaggttgaatagtgaggtgtgattgcactactgcactccactctgggcaatagaggggagaccctgtctcaaaaccagacaaaaataagtaacatccatatagttgtccttactcagagctatttctttcctttgactccgtttccctctactcccatcttggagtttgaaaagcaaaaccacgccaggcgctgtggctcacgcctgtaatcccagcactttgggaggccaaggcgggcggatcacaaggtcaggagatggagaccatcctgactaacacggtgaaaccccgtctctactaaaaaaaatacaaaaaactagccaggcatggtggcgggttcctgtagttccagctactcgggaggctgaggcaggagaatggcatgaacccaggaggcagagcttgcagtgagccaagattgcgccattgcactccagcctgggcgacagagtgagattccatctcaaaaaaaaaaaaaaaagagaagcaaaaccagggacaaggcctcctctctgaacacatcctgtgcagagcccttccccgcagtgcaccttgaaaggccagcagggcctggactcaactcccctcccctctcctcctctttccttgttgttgggctccagtggcttctggctgaaacagagctggagagggtagctgtgagtcagggccatcctggagcaatgagggcaccctcaggctcgggtttctggggctcctggagctgctgcttccatctctttcctggtcttggggcaccccctcccgtgaacgaggaacacagctcacagctgctcgccacatgccgccttcatcttgccgcagcttcaggtcccatctgtttcttttcctagatctttggggccgtagaagaggacagctccctgggattcccggtcggagggcctggaaccagcctcagtgtgagtagcatgcagggtcctgccttctgcacctgctccctccccactccctacccctctgtgtccctctgaactgcccctcctctgtctgcccacccacaccagacccttccggacagcgcctcgagctaaatggcaattctggctctgagagtgctaagtgtggtcagctgccctgccggtgtggagggtctgctttggttgtgactgttggtttggggcactttgccattgtgctgtcccatgagcttggtcttggaccccaactacataggccgctgcttatttgcattttgctgcggccacttggcatcatgaacacacatgacttcgtcacatatactgacctgtattcagtaaatgcttcatcgaaaggctgcagagctcacaaacagcacagaatttacactgatggggagatacgccactgtctgcctcggtccccatggggctgggcagatgccctaacaggcccagtcctgaccctgagcccaggtcggtccacatggcctgagccaggaccccctgccccagagctgtggcccacaggtcagggggaggtcatcctgtagagccccctgtctagtgggtctgtgcggtgagaaaatccatccagaacaccctggcagtctgttgctggcttctgtttgcagttggcatgtgagcagacacacactgtcagtcctgtccttctgctgtagaacccctgtcccgtctgacacacccacagtcaggcttcttaaagatggacttccacctgctcccaggtcaagaatgctctttgactattcgattagaatgcagatctaaatatttaaatagaacaactgtaattttaattaaaacaggagcttaatacaaagtcaaaatgcaaaacctttttaaaatcctgtttcctaatgacaagtggtgtgaagagcccccatgcggatggagcttacagatgctcccccaggaaccaacttgcaaagagaaaacagtccgtgttgtaagaagtcctgccagagcacctagcccatgtgcctggtgccttttgccagccttagcgctagctagcttggttgtggtagttggtgtggtatttttgagacttcctgatatgaaccttctttggtgcttttaagaaaacccacatagcttctttgttctcttgcgcaaatgatactaagatatttattttctttaaaaacaaaaaaccaaaacacacctcctgggttaaagtcagcctgcctttgaactgcagtgtttttcatcttaacggctgctgtggttgtgggggtgccttcagcgtgctgtggacacgcatccgcatcccccaggcagcctcatttggcctttgcagtcagctgattgcgaagaagcagctgcggcgaatggtgagcctgctgacaaaacgtcctgtgcccacacatcatggccatttgacgttcatggattaacttccaaatccaaatggttttaggagcaagggaggcagttcctccatcttgtaccacctcagtgtcgccacacagccacctgctagcatgctcaggtgggggttgcagccccaggcgttcttgagacacacccctgcagccattctgagagttcccctccagtgcccctagggctggaactgagcctagcagtggggtgaatgcctccctttctgtccttccccaaggcttgtctgggctggctgtgtggtgggtggagatacagatcgaaaacccccaagaagtccaaagttcagatgcagaattgggtctcagggagcttggcttagacttaagggcttgctagcctgcctgacttttgcacttgctaaatttgtgtgtttctgtttttgagacagagtctcactctgtcgcccatgccagtccctgccctgtgtcgtggccgctgagctattattcagttatggatataggagtgtgagcagctctcagcgaacaaaaactcttctttccacagctggagtgcagtagcgcaatctccggtcactgcaccctctgcctcccgagttcaagtgattctcctgcctcagcctcctgagtagctgggactacaggcatgcaccaccatgcccggctaatttttttttgtattttagtagagacgggggtttcactatgttggccaggctagtcttgaactcctgacctcatgatccacccacttcgccctcccaaagtgctgggattacagttgtgagtcaccgcgcccagccagcacttgctaatgtttttattttggttactgagctgctgaatcagctaaggggcagggagcaaccttgctcaaaagcctaaaaccttttctgtcctattagaaaaagagaaatgctagcacagcatggtggctcacgcctgtaatcccagcactttgggaggctgaggtgggtgaatcacctgaggtcgggagttcgagaccagcctgaccaacatggagaaaccctgtctctactaaaaatacaaaattagctgggcgtagtggcgcatgcctgtaatcccagctacgcgggaggctgaggcaggagaatcgcttgaacctggaaggtggaggttgcggtgagccgagatcgccattgcatgccagtctgggcaatgagagcaaaactccatctcaaaaaaaaaaaggggaaatgctttgggaggccaaggcgggcagatcacaaggttaggagattgagaccatcctggccaacaaggtgaaacctcatctctactgaaaatacaaaaattagccaggcgtggtggcgcttgcctgtaatcccagctactcgggaggctgaggcaggtgaatcgcttgaacctgggaggctgaggttgcagtgagccgagatcacaccattgcactccagcctggcaacagagcaagattccgtcttaaaaaaaaaaaaaaaaaaaaaaaagggaaatatagtagaaaggtttttctatcctgtggccacctccccagtgttactgtgggtggtgaatctacgtgtagctgctaatgtgcatgtagatagtaggtgcttaatggagatcattcatcttaaacaagtgtatgtgtgaccacagatcagacgaaagcacggcccgggagccgccagcctcagcataggtaaggccccagcctggggagtgatgtccttgggctccttaggaaatagtccctcccagagctggcccctctgaaaccataaagacaagctgtttcacagcagcgtgtctgacctgaggaaagcagggcctgtcagcagctgggcagagcggcggcagacccacctgctgcagtagaaaggaagctcacttcatgctctctggcctgagagtctgtgtgactcgcacacctagcagggactgtgtgtcagggacgagagcgtccaggctctgggatgccggtcacagctgtagtgtgcacagcagcactgcccatgccagtccctgccctgtgtcgcggccactgagctattattctgttatgaatatgggagtgtgagcagctctcagtgaaccaaaactgttctttccgcagctcgaggccacagtcatgccctaccttcaggtgttatcagaattccgagaaggagtgcggaagattgcccgagagcaaaaaggtgaggaccagttgctggaaagagtgtgggagccactcccctcactgggctccccggaccgggcgtctcccccgaggcactatggcgttcaggccggatcatcctctgggaaggctgccccgtgcaccacagggtgttgaacggcatcccgggcctggacccaccaggtgcattagtaccacacgctccagtcaccacagccccacatgtccctgcagggcagaatcctcgagtgagtgcagctgagtgggcagtggggaccgaggatgtgatatgatgggccagggttgatttgcctctccttctctgagccgaggcagaatggtgggtcctctgaccagcccagtcaccacctgccatttggctcacactggggcttatttttgttcctggtgacctggtaggctgggtgcgctgaggtgtggctcgttcctgctgccgagtggagccgagctgcagcttccagggttcccttttctgctcaggcatgccagatgaatgcttgaacttggggttcacacagtggcccctcactgtccataagcagccattccttcatctttttgtttgtttgtttgtttgagatggagtctcactctgtctcccaggctggagtgcagtggcgcgatctcggctcactgcaagctccgcctcccgggttcacgccattcttctgcctcagcctcctgagtagctgggactacaggcgcctgccaccgcgcccggctaattttttgtattttttttttttttagcagagatggggtttcaccgtgttggccaggatggtctcgatctcctgacctcgtgatccacccgcctcggcctcccaaagtgctgggagtacaggcgtgagccaccgcgcctggccattccttcatcttttgaaatttctgagatgtgtgtggtttaagacttagaaagtgctgaatctgagcattcgttttgactgccagttttaagaaagtgttaaacacagcaaaaagcagcatcaggcaggcctttgcttcttcctgtgagtggttctgaattggtgagtaacagcacagctgggaacacacactgaggacttaggatgtgctgggccctgcccactgctttctgcacattgcctcatttaccaccatgatcctccaaaagaggaaaggagagccctggccgggtcacactgacctcgagtgctactccatcacctgctgtgctaattctccctccccagggggcctctgtgtggtgggaagtctgacctaggatccacctggtccccatctgtgcagagcccattatggagggtcacagtggggcagcatccaggcagggcatgctgaagacagagcagacagagacccagcaagcctctaggagaagctgcaccttgaggaaggatcaggaagcctgggtgggtggaggggccgagaggcggaggagccgaatctgggcctgtttcgggcaggggacagtggagcaggaggcaggagggcaggaaagagtttcgggagctcggggctccacaggctgcaggagagtgcaggacactgggtgagaggagaggctggccgggctgctgggctgctgggctgccacaagtgctctggagaggggcctgggcctgactgagcccctaacaggcagcggtgggcgcacttgccctgaccacataagcaccatcgcccctttccaacacctgatgccctcagcatttcaaagcactggaatcaaactgaaccaagcctggaccagcctattcaggaccagcgcagggctctccagcaatcttggcagcactaacttagcggcatcgctggggtcgtgggcttgggaagaccattcctggaggtcgcctgggcatttccacctgccttctgggggacatcgaaggccgagcccgggccccagctccctggggtcatacaagactgtgcacgtggccttggcttccctggcatgccacagccccgggagggcgctaaagggggactggccaggcacaagctcccgctcggtggcactgaccaggacaggacttgctcaggcctggagagtggcaccagccagccagcattggaagtagttcggttttgctttctgtttgcttttcacttttgttttgtggcttggagcaggtagatgggtgatgtggccccaggttaagatggtggtgatccctaccctgtacatcatcccatatgtgccttgtgagccagagaccctggggatccaggggcctcagaccttccgacggggcagcgtgttagaggtggctctggtgcaatcaccctgtctccccagcagcagcaaatagtgactgttttgttattcactgttaacatctcatggctggccaaagagaaagtgagtgtataacaagctcaggggtggccctcagatcagctgggatctgcttggcccaggccagatgctccacagacagacgaaaaagaaactgtttcccctggaaatacccccatggtccagtcagctagagagcacaggcctggcaaggagggcaatgggttcagggtttgaccaggagagaggcactgaagtgagaaagccaggggctgggccagggccctctgcactggggagatgatgccatttccccatcgccacggttttgttttcattatgttaaaatacacagctcagtgccattagggacatttacagtgttgtgcagccgccaccgtccatctccagaactcttcccttttcccaaactggaactctgtccccatggaacagcaactccacatcccctccctcagcccctggtgctcaccctctacttctgtctctttggattttactactccagggaccctacatgagtggagtcacacagtgtttgtcctgtgtctggcttatttcgctgatcacggtgtcctcaggtctatccatgttgcagcctgtgtcaggacctcctgcctttttaatggccaaatcatattccatggatggatgggccctgatctgtctattcttccatggaagaattctcatcacctttgcgttatctttgtagcccacatttctcttcagtaaatccctgatgatgatgtcattgtctgctcctctgccccagctctgctaacagaagccacagaggcttcttcctcagctcctcagaatccagacccagaggtcggtgtgggcctgaggggtacggcgtgtgtccctttcccccagggagtgtggcccgggaggctttcttggtgcctgctctgatgatcacccatggcgggtgggctggggtgctggccttgtggcctcccatgacacccgtgacagtgaccacaggtgctggcttgccttccttctaatgagggtgctatccaggggtggctttcaaagagtgaagggcaggcacctacctcagctcatgccccagtcagctgctcctcaggtggctgaggagggcctgttcccaggaatgatactgcagacaaatataaaggccattgttcccctaggtctctgcctggggaggttgaaactccggaagctgcccaaagtggctgtgcttatgagcgcggccttgaagcccaaggatatgcaattttttttttttttttttgagatggagtcttgccctgtcgctaggctggagtgcagtggtgtcatcttggcccactgcaacctccgactccctggttcaagcgattcttctgcctcagcgtcccaagtagctgggattacaggcacatgccaccacacccagatagtttttgtatttttagtagagatggggtttcaccatgttggccaggatggtctcgatctcctgaccttgtgatccacccgcctcagcctccaaaagtgctgggattacagtcatgagccaccgtgcctgcccggatatgtgaatattttatctagcagtgaatgaaggtgtggggtgcccagcaaggagctctaggggtctcagttatgaggacacagcaggaaaaggacagacgagaatggcagcatgtgcatggtcagtgctgcccaaaggcagggcaggcaggaggatggggtgggatggtgggggtcccagcaggctggggggcagggcacctgcccgcctagcacagttgggcgcagcaagctgaggggccagaagaaaactaaagggtgtggtgattccagcaaacccaaggtcagatttcagagcagaaagttgtcacttggagagcagcaagcatctgtcctgttgatgtagtctaggagatgctgtcacatcacctgatactctggagtctttctgagataggttggcatcccatttaccctgtaacacccaaaacttcttatgtcctgttctctacctgggcgttgtgcgtgggctgggaacgggaaaactcgggcagagcagagacacagagggggcgcctgctagagactgcgtgaggagcccactaggagaaccgtgggatgccgggcaagtctgcactgctgcgctctgaagtcagccacagacacatgggtttccaagcgaagctccctccccatgtgatggaggtcacagtcgccctccctgtcatgcctcctttcaccctcccagctgggtcaggtccccagtcagaggcagaggtgagcacagtcttgggaagcaacctgcggtccacccccaccgctcagccccgcctttacagctgcgtgcgcttcagccctgggagggctgattctcacagagctcgagctccttggtggtcctgggactcagctctcctgggtgccggtcaggacccccatcgcagtcccgtgtgcatttgggaaccaagtccttggggcttgagtgtaaatggtccttctgtaagaaagctgattctggcaccaacagagaggctgcctcagatgaagagtgttagcacccgaagggacccccaggcctgtcctgaccctcccacccctgctgtcggcccaacttgtgtccctttcctggaagaactgcttccggcggccagtgtgctatgcttcctcctggctctgccctgcacccccagaacagcccctgggcttacgggagacactagtctctgggcttctgcagccaatcaagctgctgggccctccctcccaagcactggaggaggtactcgttctgtgggccggggcccctccctcctgagcactggaggaggcacttgttctgtgggccacggcccctccttccccagcactggaggaggcactggttgtgtgggccctggctcctccatgtctgagggaactgctctgcttctcctacagtccctgagattctgcagctcagcgatgccctgcgggacaacatcctgcccgagcttggggtgcggtttgaagaccacgaaggtgggtgagcccttgctgtttgctacaaagttaccaggagcttggagaggtgtcacaaggagagctcccggggctgggctgaggctcatgcttcatgattgctgatgcagaatcccaaagtggcagccccatgggtcccccggcgccattcccacgctggccagcctggcaggggcaggggagcaccccgtagctccttcccactgctgcgtgtggtggtgtcacctcccctgcgcatcatctcccctaggggcctggctgcccgctgcccctgttgctaccgcctttgaagctctcagctgaggaaccagcctgtatcctgtacactgtcaacagattgcatgcttgttctcccacttcgtggaggtctttttgttccacagaaagttaatttttttgttttttattttcaatttttatttatttgtttattgagacagagtttcgctctgtcgcccaggccggagtacagtggcgcgatctcggctcattgcaacctctgcctcccgggttcaagcgattctcctgcctcagcctcccgagtagctgggattacagacgcccatcaccacgctcggctaatttttgtatctttagtagagacggggtttcactgtgttgaccaggctagtgtcgaactcctgacctcaagtaatctgcccacctcggcctcctaaagtggcatgagccacatgcccagccttagtttcagtttttatggatacataatagttgtacatatttatgggctatgtgtgatatttggatacatgcgtatgaggtactatgatcaaatctaggtaactgagatgtccatcacctcaagcatttatcatttctttgtgttacgaaccctccaattccactcttccactctgcccctggtaattttaaatctcagatgtcatgtcctattttcctactcctggctggcaagaccttcctaccttctcgttacaaaatgttctcgccaggtgtggtggctcatacctgtatcctagcactttgggaggctgaggtgggtggattacctgagctcaggagttcgagaccagcctaggcaacatggtgaaaccccgtctccactaaaatacaaaacattagctgggtgtgggctccttgggcagctgagacacgagaattgcttgaacccgataggcaaaggttgcagtgaactgagatcgtgccactgcactccagcctggatgacagagcaagactctgtctcaaaaaaaaaaaaaaaaaaatcacacacacacaaaccaaaatgttctcctgtgcttcactgctgctatggaggtttttgtttgtttttctcctgtgggccctcgctctgactgggcagcaccgcatggtctgggcagggcagggcagggcagggctggccccgcagtggggacggcccacagagcccagactcttctcacacgcagtttattttgcaggactgcccacagtggtgaaactggtagacagaaacaccttattaaaagagagagaagaaaagagacgggtgagtaaagtgaaaatgacttaagcgtgatatttgttgaaaatgtaaaaaccattgcgattattacatagtttactttttaagcattgatgtttacacttttattaaaatcccagtatttataaatgtcagaaagaaaaattaactagtatcttctaatgaaggacctcttttaaaaagattattccctcagtttaagtgaaaaccagtcacttttggcaaactgtgaagctgacttttttttttttttttttttttgagacggagtctcactctgttgctcagactggagtgcagtggcacgatcttggctcactgcaacctccacttccctggttcaagggattctcctgcctcagcctcccaagtagctgggactacaggcacgcaccactgtgcccagctaatttttgtatttttttagtagagatggggtttcaccatgttggtcaggctggtctcaatctcctgacctcgtgatccacccaccttggcctcccaaagtgctgggattacaggcttgagccaccacgcctggcccgaagctgacatgttaagatcccagtcccaccgtgccctcacctgagtggcgcgtgtcactgatgcatctccacctcctattcccagcatactccccacctgcaccccacaacgcccccaggatcagggatggcccaagttcctcggtgcccaataggacagaagaacaggaacaaaaacgcaatgtcagaatctctgggcacagcgcatggggtaccctgggatgcaggcagcaggatgagaggcacctgggcccccagtgcacaccatgggaggtgggccatgggggctgttgccaccagcaggtgggtccccaagaggcttaaagcaggagaccaccgtggagggcgagtttggatgccacagctctcaggaaggaggctctgggaggaactgaggaaggagaatcgacagggtggttgattgatagatgggatgtacaaggtcagggaaggcatctatgcctagccctgcactggcccaaggcacgaggggagagctcatgccagatccaagtgtgggtggctggagtttgcagtgctttggaggaataacgaactggaactctggggaaagctctagacagtggtgagtggtctgcaggtccatcctggttggcaggttgggaagagctgggcttgccctgtgaggttggctggtgtgactgcctcatcagggcccctccccattccatcacagtcactcacctagccttgggtctcgcctgccgtgctgtgctgtgaggtggcctggtgctggctgtgcagacgccctggcttgctgcactccctggcagagtgctcagaagcaggaaacagacaagaggagcgccagggtggcccggccagagcctcacaggccttgcactctttgtgctggcctttccactggccaccttggctgtggcctgtgacttctagtagctcctgtttcccaaccaagggactcttacctcaccaagctgctgcaagaaggcatccccaggcccgaggcaccatgggggaggggtcctgcctctccctgtaccattcccaccagcacataaacacatactaacttttaaagggaaaaagcagaaatcctgagcactgtgtctctggttcctccaagctcagtgcccagctcctcccccacctcagcccctttccctcggccagccctgctctccctccatctatctcgaaagagctcgatcctgttggccccagccccatcctgagtctctgagacctttgtgccttcctggtttcttttccctagctctgtgtgtggcgcctccccaggagaccttatctggtcctgcggcttctccaccatctatcttgtagccggtggcccaaaaacagtttgcccagctgcctacctgatagctccactgggccaggaagcctctgatatctaggctgtccaaagtaaatgtgattttcaactccccaaacttgttcctccttcctgccatggagggcgtgcctacctgatagctccactgggctgggaagcatctgaaacctaggctgtccaaaggaaaggtgaaaatgtgattttcaactccccaaacttgctccttttccgtcagtggagggcatgtctgttcgtgcaatggctcaggccagaacctcccaaagcaaccgagggcttccctcaccggcacccagcctgctggctccactaataagctctccctgcagcatcagactgtcctcgcccctgcccgggtgctgcctgctggttggagtgggctctggtctcctcacctagcccccaaggctgccctccgcccaccatccccatcctgccctggcgctcttgctccttcccaggtaccccaagacccactcaggataaccctcacagtgctgtcctggtcattgccttacagatcctctctccttgggccaggctcaccatgctggtccatttcttcatgttagtggtgcctggatcttttagcattggttctgtttgtctgcctgctgcatacctttgcatctagggcagggccaggcacccaggggtgccgctgaggatccccaaagggaatggaagagggtcggtgtgctgcccggcacatgggcttgtctccccacagtggggagggcctggtcagagttcagccctccatgccaggccctaggagaggggcttgtttggctagacctctcactccgagagacccagcagcctgaggcagccctgtctcatctggctctgtattgaccctccaggttgaagaggagaagaggaagaagaaagaggaggcggcccggaggaaacaggaacaagaagtaatgcattttgtttgggggtgagggctctactgggcaggagtgcaccctgaccccatgccctgtggctctctgtgcctccgtggaccttagccaggcccctgcagaccctcacagaaggagctccgctttctgcctccaccacccaaggcctgccaggcccttctcacatggggtgcagggaaggcctggccaaggggaaggctgtgccatgtggtcacaagctccaagacagcgtttatagacttactactattaggttttctagtaagctttccactattcctgtagaaataacatctggtttaattttaaattccttgtatgttccctccaccttggctttccccttcccatctttcatagcactctgaatctgagggcttggaagcaagttgagggctggaggtatgagcagatgtcgttcacagtgcggagccccaggtgctgctcgggggcagtgactgtgccgtgttgcgtgttctaggcagcaaagctggccaagatgaagattccccccagtgagatgttcttgtcagaaaccgacaaatactccaagtttgatgaaaatgtaagcatgtaagcatccttctcttctattcagaacttgatcagaccacattaaagtgggaggacaggaattttcaaccttggacaagcagattttctgtctgtagaaaatttggaatcaaatctgacacccgctttaggtccagggcctcctggcccaactactgagctccttccacagcccaggcagctaggcaagcccgtgccagggccccctccactggtgtggtgagctctggtccctagccctgggagttgtggccccgggccaagatccacccaggccctcacaagctggctgaagtgccgtggcgcagataggcctcctacccccagtttcttcctttgtcatagcgattcacagccactgcctccaaacctctaggcccctccctgctggcatttggatgtgtttgctatgtacctttgggccagctgtgtcagaactcagccatgggtaggctctgaggggcacagtgcccctcaccttaggcaggaagcacccccagactctggtcgcccctctcccattcttagctgctggagccagcactgccagatgagtgtgctggctccagagcagtgtggtgactgaatgtccaagcaagaggacatggctgcatcagggagatagacactttgagacgggagggcaaagaaaggggagttggggttacccaggtgcagaggagaccaatagccgctgtgctctgggttttcagggtctgcccacacatgacatggagggcaaagagctcagcaaagggcaagccaagaagctgaagaagctcttcgaggctcaggagaagctctacaaggaatatctgcagatggcccagaatggaagcttccagtgagggggcacaggactgactttttaaaccattgtggactagtggctgctgtctgcctcagtgacaatgtcccagcgctcctatcatgtttacagtcacccttgggtcctaaattaagagttgtgttcatgtaggttcgtgtcgtcgttggctctgagacattgataataaatttttctcaacagtg

SEQ ID NO: 15494 - DNA, 56473 bp, Homo sapiens
ctgtagccgcagctgcgggtccgggattcccagccatggcagattcctccgggcagcagggtgagcggcgcggccgggccaggctgagggcggctgggggcctgactgggcgctgggtgctcggctcgaagggcagcgagtccttatgtctgaggggcccgggtgcatgggttctgaggggcagctgtgtccgtggtctgaggggcggcagtgcccgaggtctgaggggtgtcagtgcgcggggtctgagggacggcacgtccttgggtccgaggggcgggggtgctcggggtctgaggggtgtcagtgcccggggtctgagggacggcgggtcctgaggttcgaggggtggcacgtcctaggatccgaaggacaacgggtgcccggctccgagggacggccactgggacccctgggactcctgcgtgagggtctgccagacccgtggctggagcacagaccccgcggggacccgagcccgagcggggcgctgcccagaccacccagcctcagtttcctcacttggttcctgccgaggtccccttgcatcctcaccccgggaggtggccctacatcaaacagcctttccccagccggtgcctgggcgggccctcgctccctcttgccccagctggcctttaggggggagacaaaggcccaagggttgttttggttttctgcccagacctggcagcttccgggaggtgggcggagggcacctgaggttggtatttagggaaatggggcagaggacgccaggggtacgcgtacacacagtaaaagggcttggggctttacgaaggctttcatctccagttccgcaggcagtccactgcaagctgattgtcagagcattactgccccattttattgccaacccgggaggttccccagggacacagctgtgtcagctcccccagtcactcatgtcaccagcgggtagaccttgagagaccagtgggttcttctctcactgtccctccagcaagattttaggtgctggaaaggcaagagactgaatcagaaagcccagattcctaacagtctggagcagcctttccaaaggaaacattctcagtatctagtttttaattcttttggctggcaaaaattagatgcaagttcttgtaagacacctccagcccccaccctcagtttagatcgtaccaagatttccttagcatctggtggtgccctttgcccctgagggtttattgggttatagataggtagttatgacaacccgagtaatctggcggcatggggacacccagatgacagggctacactcttgtgccaagtggcaggaggtggtcaccttccaggcacgccgcctaccaccctacctgtgtgcctggattccagcaccatctccacccgtcccagagccaagcggccctcagaagtcacccagattcctgtaaaacagcatcatagttaacagccccaactctggaaccaccctggaagggccagggttccaactctgcctcccgccccacagcaaaccatgcgtaatggctcctaccttggagcatggagtgtaaatgaattaatagatgggaaggacgtagaacagtgcctggcactcaattaagtgctgtgtctgtgctgaaagttagggcctgtttgttttcaaactaaaaatgtgtttttgttcatttgtgaacgtaaatgacgtattagtagtgttttgtatcttgtttttaaaaatagctttagaattttaggttttcagagccttgtaagaattgccttctttttggagcttgccatataggttgggattgccctctccgggctgtcagggcagcaggcagattgcccagtcctcagcctgcgcacagcatctccagccagtgttcttctgccccagggcatggcccacctgcctttactatcgcctcctcccatcacacacacactctcaaagatgagaacaggaaataaaatccaatcgtaggccaggcgcagtggctcacacctgtaatcccagcactttgggaggccgaggcaggcagatcacgaggtcaggagatcgagaccatggtgaaaccctgtctctactaaaaataaaaaaaaaattagccgggcgcggtggcgggcgcctgactactcggaggctgaggccggagaatgatgtgaacccaggaggcggagcttgcagtgagtcgagattgcgccactgcactccagcctgggcgacagagcgagactccgtctcaaaaaaaaaaaaatccaatcgtaaatgctttcagtgaccatcttcccagatttttcaaggaggccatcatttttgtaccatcttccctaagttgactcagaaggtctatttctctttcctgatctcactgggtgtacagcttttcctttgcggtcttgaaggtgcataggcttggtgcctgtccaagagcctgattatttcagaaggatgagtttcatttctgaggtttctggggtagatggagcctacctcagggcctttccgcacagacttgggataccacttggtcggctgctcatcaggtcagacttatagtttaatttttatacagtttaattcaagggtcttcataataacacagccagcattttttcagcatgagtctgtgccaggcactgctctaaatgctttgcatctgttatctcctgccacccttgggggaacccctttgaggaagatcctgccggcatcttgtacagatgagaatcctgaggttcagagaagtcaagcaatctgtccaccatcacgactagccagaggcacagccaggctcccaacctgggcagcctgactcaatagggaccttaactgctgtgctgtgctgcctttgatgattctcttcagactcacaatagctcaacccagtgagttaaggcagacgagaataaagctgatgcccttcgatgttttccccagagccacatgaaatgtttgctcctctatgaactcaggtaccatgtttccgggtatttgaagagccttaggcagtacccttggggtggagattaagccatttccagtgtgggtgctctgggtggcaatattgctgtctgatcaccccacaggctcattgtgagggatgttggatgcccctaataatgaataacctccctcccagtaaggaggaagatggagatgctgttcttgggggtgagagaggatgcctgggggccacctttgtgaacgagttgcagctggacctccggggctggtgatcaggacggggagtgggaggggaagccctcacctgtgggaggaggcgctggtctctgggagtgggcagtgttggctcctagttggtgagagcaggggtgcatgcccctctctcctccccacgattcatgtctgggggctttttccggtcccctttctgaacacttcttgggcagggagtggatcactgggaaggacccaagaggagcagctgtagagggtgggaccaggggaacatttgcagaaagggagtaacctgcagggtgagatgttgcctggacacccacaagatgaggaccctggtgggacctttgaagtagcagggtcagagggcaaagggtcagggtgagtgaggggtgcagacccccaccaaaccggggcacttattaggagctcagacctgctgtaaaggggtctgcattttagcaagctttccacccatggggaagctggtttaaacctcacttgctgggcccaccccagagattctgatttggcaggtctctggtgagcccaagaatgtgacttctctggatcccccaggttctgctgctgaaggcacaccagggccatgcctggagtggacctgggagagcctcaagggaacgcaggaagagaaacagggcagccgggagaggtttaaatgcttacaggaggccaggcatggtggctcacgtctgtaatcccagcactttgggaggccgaggtgggtggatcacctgaggtcaggagttctagaccagcctggccaatatgtagaaaccccgtctctactaaaaatacaaaaattagctgggcatggtggcgggcacctgtaatcccagctactcgggaggctgaggcaggagaatcgcttgaacccgggaggcagagtttgcagtgagccgagatcatgccactgcactccagcctgggtgacgagcgagactccgtctcaaaaaataaaataaaataaaataaaataaaaataaataaaaaataaatgctgataggaaagagccagagagagggagaggtcgcactgccacagttgtttgacgtgtcagggttgttgttcatttggtgtggctttgttttggtatctgtgctgagcaattgcttggtacttgcatgtgatttcaataaatgttctgtagagactccacctttgtagccggtgacaaccaccatccacctttgggacattcccatgtccctcaatgtgttgatgaactgaactgcaaggtcatccggtggtggacattccttctcatgggggcagagcaggagtttcggcacggagcgtgcaggctctacgatgagggccagtgtcgaggaacaggtccctgggaggttttcagtctgctcagaagtgttctcatctgatctcagcatcagactgatccacagcctggctcaaacccatgaccacttgaaagctgacctatttttatttgtttcctcgagacacacttaaatgcagctaccacgattacccaaatgactgtctgcgtccatctcatggaagcctgtcattctcctgtgcttccctgggcaccagcacctttctgctctgagaagatccttcccaagcatggtcttggttcccttttgatgagccgtctagcctgctctagacggtacatttaagaattatgtgatccaagatcaaggcagatttggtaataaacttttaaaataataaaattaattaaataaaaatgggtgtgtgagccctaggaaaactccaggaaattctctgtgtgtagcatgcggctattacaataacattaataataccagagcgattatgataataatgatggcaaatggggcccctggctctgtgccaggcagcttttaaacattttacaagtgtcatttgacttaatggcctgcagctttacagggctgatgttatgagcgtgttttaccgtgaggaaatgccgccgtgtgtgtgagtgtaggtactcagccctggagggcgtcggggccgcccctcaggtctccagagagcggatacacagcggcttcagttcccagactgcttcctcagcgctcaaaagccactgcagccgccgttaggacatttgatgtttttctcattttaaaaatagcagatgcttactgcagaaaatgtgagcaatgaagaaaaagagggaattaaaatcacctgtcaccccctctcatcaaccatcgtcactgtcagtgttcgggctgttgctggtggtctctccatcagaatccattctgagtgtgagaggcacgtgactgtcagctcgctgtctcagctggaagccgatgctgtgtcactgtttctcagggtgctgctgttgtctcttcttccctcttgctgtcgtggagtccaacccaggcatgagcagttgcagaagaccaaggctcagggaggggacaggggagaggaatgtggagggtcagcattggggaacagctttcgaactgtggcctgatctgtgaggggacaaggctcaccttccagctctgtccatccctctggcaagttctctaatctttagtgaacttcattttctttatcatgaaatgggacccctgctggcagctgcagagctgttggagggaaatatccagctaaactagaagtctcctggctggaagttgctctgcaaaagagtttgtaggagtctgatatttatttagagttagttttccaggacctcactttggggtgcttggagctgcctctgtgggtctgcctccgcctccgtcctccctgatctcatctccagctgggaggagagcgcatctccatgtaagcagcctccttcttctcagagggaagccccggcagtgtcagtgctgacactgggcctgtaactgtggggatggggcaggtgagaggccctcaagagctcccggcaccccccaggcgccttcagtggggccagagtccacccctgtctttctctttccttggactgttggaagagctgaagtgaaaagtgacttgttcttatgtctctggtatctttgggcagcagggctcctgctaagcaagcccctgggggctcaaagcagcagaggctgtggccggttcccagcactggtccttgtgcaggtgtctttctgagaagggtgcatgaggcccagtgccacaggggaacgccagcccaccactggtggcatgcactctgtggtgccattctgctgtccactcatctgtgccctaggcaactttagctgatatctggaatgtcacacgctcagttgtagatgctgaagatcgagcagtgaataaggtagatggagcggtggggcagatggtgaaggaaagaaatgcgggcacgtgttagacaggggtgctgcggagagaaagagcagccaggctcagggtctagaggcgggcgccatatggacagggagtccttgaagacctggtggggaagccggcacctagcagagctgtgaaggattaaggggcctgctggtatctggggagcatgccccctaaaaaaagagcagcaggtggaggggccatgtgactagggtattgtgagtcaggtgggggcccatggccagcatgaggacaggcttgtgctgctggcgaggtgggtgttgggggcagtaatgtgaacgtgcgcttttcagcagggccgctggaggcctgtggctgtgaggggagagccatgctggctacaggtggcggtgtctggcttgcaggaatccaggtgacaagggctggctctcaagtccaaagcttcttttgagttagaggccccggatcctcccgtgggttggctatgggtgctcctaaggataacttgtaaaggggtgtgattccagttttggctagggagtgtgcccagagctttgcttctgggtgcctgtggctgcttggagtgggtggccatcttattggggtcagatgggacagtggctccgtgcagtgggaaggaagcagggcaagttagagggacgctgcactcgtcatcccaccagcgagagtcatcccaggaagccattttaagccctgcatccatgttgagacttcaggaaggctctcccacagagtgcccacccctttactgcagagaagaggtggcttcaggacatcttctccggcagccacggaggctgggccttggggcatcacgtggctccgtaggctccctggcgggtgaagagctcggcccagtggggcattcttgctgctgcagctgtgcactccattctgactcatctttgctgacaccacagcgttccgggaagtgccagttattggcctgacacgaagggctttccccacactaagcaaagcagagaaaggcattcgtgtgcagttacccccgcaacacactctgctctctgttttcagaagctgtgtgggcttggttggggtgactctggctctgtgccaggagtaaacacggagatgggggacaaaagggaatgggagaaggcagagagggggactgtgatgtgcagggcatccacgccccatggctgtgatgtcgggcagcctgtgcccaggaagggcagctggcacagcaaggggtggccagacatgtgcattcctaccctgagtgaactctggggtgagagggtatctgtctggaaggagcaagcatcggtccttttcccacagtcctctcagcaaacacaatcactggttcaaggtttggatgcacctgtgctcatgggctcagggaccagactccctcctctggccagaagcctggcaccatctgcctggtctgcccccactttagggacgtgggctgtggacacagcacctggtccacaactcccgtgtcagaggtaattgcagggagatattccttagaatggtgagacagattttattccctaattcctgacagtaggggaaggagctgcgttccctgccagttcagcagaggtgacttttggatttaaagggagtatgattagctgggcctggtggcatgtgcctgtagtcccagctactcaggaggcttaggctggagggtcacttgagcccagcattttgaggctgtgatgagccttgattgcaccactgcactccagcctgggcagtagagtcagacgctgtctctaaaaaataaaaataaataaataaataaataaataaaaataaaaaagggagaatggaggaggagaaggagggtgagcaggggctcaaatgaaaaaagccatggagctggtcagcgtgcatgtgtcaaggcggccttgtctacagctggcagtggtgaaagttagggttctgctcctcctcccaatggtgacatgcggaacagtggctcttgggtccttgagtgacacacctgagtggtggaggtgcacgcttactgctttgaaggctctaaggagggaggctggggcctggggccaggggccaggggccaggtgaggctggctggagcagccacattttcctggcagccctgtgctttcttgggctggtcctttgagggggcccagtcctcctgaggctgtggccttgacctgcagaagccatgctagagtccagctgtctcttggtgcaggggtgtaaatggcacacattgtcaatgtggggttctcctacccctcatcccccagcacccagagggagagggtgccgctgcggcaaagaggcttgaagttggtttggtttgggggatttctgttgtgagtttttaaaaattgaggttaaattctcgtaacatacttagctgacaggagggataccatgatcatgtaggtagctttcccaaggcgaggcttatccgttatactccagatgtgctgacccctatgatttccccaaatgtcagaaactgaactgtgtaatttgtgatggtgtggaactgtgttcctgctttccctgatagaaaacataaattaaaaatgtaaaaactaagtaatttatatgacataaagtgaaaagtacacaattctgtggtatttggcgcatgatgttgtcatgcagccttcatttctgtctagttccaaagcattttcatcacccaagagggaacccatccatacctgtcaggcagtcactccctcgcccccagtcgaagcgctgcccctgtgcctttgcctgttctggatgtttggcgtccagggaagggcttgaacacctttttccttggttctgtgccatcccctagtccctgtctttctggcggcctctgggctgcccgcctgcctgcctgacaccatgtgccctctgtctttgcagctcctgactacaggtccattctgagcattagtgacgaggcagccagggcacaagccctgaacgagcacctcagcacgcgtagctatgtccaggggtactcactgtcccaggcagacgtggacgcgttcaggcagctctcggccccgcccgctgacccccagctcttccacgtggctcggtggttcaggcacatagaagcgctcctgggtagcccctgtggcaaaggccagccctgcaggctccaagcaagtgagtaacagagtgggttccctggccattagaacctctctcccaaggtcaagggctttctccatcaccctggtgcttacctggcgtctgcggataccccagagggagcctcgcccaagtgtgtctcgagcaagtggcctggatgggcagatgcagcgcttgctggatggaggttgggataaaatcacgccctatggagttggttattcaggagcagtatgttcacatcactggtgtggcaggattgcctgaggtggtggggtgcagagccgctgcggctctggggttccacgtagcatgcccaggccacgggccctagccttgtgatttttagctaaggctgtgcctggctctggttgactcagttctttctctttatttcttccataagattgtagcgtgtctatcctccagctttagaattgttgaatcctaaagtattaattggcattgaacttttttttttttttttttttgagatggagtctcgctctatcgcccaggctggagtgcagtggtgcgatctccactcactgcaagctccacctcccgggttcatgccattctcctgcctcagcctcccgagtagctgggactgtaggcgcccaccaccatgcctggctaattttttgtatttttagtagagacggggtttcaccgtgttagccaggatggtctcgatctcccgacctcgtgatccacccgcctcggcctcccaaagtgctgggattacaagtgtgaaccaccgcgcccggccggcattgaactttttaaaaatcagaaataagtcattttttctctttgagatgatgtctgtcccgtagctccagcctgttggtgctggttgtgtctgtggaacgtgcctgtggttatttgcgggagatactcctgggatgcctgcatggctttgtcactctgtggcaaatctgagggggctccatgccatcatcactgaagtatgcctttgggtggcccagctcctcctgtggctgtgggcactcctccaccttcatgtgggggcaggtttagtgctgttttctggtggtcctggctgtagctggcagccttctgggggcttctccagactccgttggggcctgggattgggaacatgcccccccgcctctgccgtgggtcaggcctctgctagatcactgttttaaccaggctggaggtggggatgtcacatctcctgtgggtcgtgttttctggataactctgcagcagacactccttccccagcgtagggcagaggccgttgctgtgcaggtcacgtccttccccatgtagccgttcctgcctgagcctccagcgcggtcacccaagtgacacctgtgctgtgaggtgccttctctccaagggctcgggtgtcaggttgttccccctgccatgtgccattccaagacacagccagaggggggcaggattagggagggtgaagcgggcctggtacgtccagctcagcagtggcctgtccaggcttccctcatagggacttgttgaaagagcggcacagacgcaagcctccatccacactgtgagaggaaggaagggttttgctcttgcaaacactttttaacctacagagaggaagcagagccacgttgctgtgtaacagaatggaccatggatagcactaatggagttgctgtgccctccccaggttccaaatcccctcatcacccaggctgcgcaagaggctgccagggtctgcttgtgccaggaatgatgggcattatgtcaggcgaccctcactcaagcttgctgtacactgagcaggggctgaagggggaggtgggagctggagtctgggactgctagagcatccagtgacctcgagtgggtccaaggcgccatggagtccagtgtagtgtcctcgcccatgtccctgggatgacagtagctgtggatctccctccatgtagctgtgacaatcagagctgcttcccccactgagtgggaacgccctctctttccatggctcatactccccaagcatgcaccttccttgctggcacagtgggccatgtgcccctcctcctgctcgcccttccacctctgttggacatcccagcagcatcagatgtgcctgtgtctggccctcagtgtgcccgcctgttaccagctcctcccatgtgccttctgtgtcctgtctccaagatcctctcagacatggaaagactctgcttggcccggcgcggtggctcactcctgtaatcccagcactttgggaggccaaggcgggcggatcacgaggtcaggagattgagaccatgctcgctaagtcggtgacaacctgtctctactaaaaatacaaaaaattagccgggcgtgatggcgggtgcctatagtcccagctactcgggaggctgaggcaggagaatggcctgaacctgggaggcggagcttgcagtgagccgagatcgtgccactgtactccagcctaggtgacagagcgagactccgtctcggggtggggggttggagataatggaaaggctctgcttaacccccaggtccctactcctgtgaagccagaccccttcctggtggatcccttccctggatcaccagcctccagcacggaggtccactggatatcaggacgttgaacttgttgagcacttctcacccgcagtggaggctcagcccttccagcccgccggcctctccctaccccccgggaaggagtgtcagctatacccttcactgaggagggtgtgggtctgtcagacgccgaggccatagtttcaggaacatgaaggtttggtgttgctctcacccctccgatggaggacccttaacttcctgatgaaggatttctctccatgaaccccttgcttgggtcctatctgcatctggtgtgttgtaggcagactgcttgccacttcctggcttccctctccatcattttatcttcagcctcccacatccctgtttcaaagccatgtctctcatgagcggttcatagttggtctgttgttggatcactcaggtcagggtgggactctggaatcaacgaatgtgtgttcattttttccaaagaaacaaaagcacaggccaggcgcggtggctcacacctgtaatcccagcactttaggaggccaaggcaggcagatcacaaggtcaggagtttgagaccagcctggccaatatggtgaaaccccatccctactaaagatacaaaaattggtggggcgtggtggcaggtgcctgtagtcctagctacttgggaggctgaggcaggataatcgcttgaactcaggaggcggaggttgcagtgagttgagattgcgccagtgcacttcagccagattttatctaaaaaaaaaaaaggggggcaagggtccttatgtgatatctctcagttcttcccttttgcaaatctgaatttgtatatctgggcctggtaacccgttttcctggggagcccatcgccagctgtgtggagatagcagccttaggggagcaggaatgctggctgtggccaggcttcttggacaagctttcagtcctgtgaaccctgggccgtttcctcatagcagggtgagtgtgatgatcccgtggcctcatggctgtgtttctgggcagcgtctccagctgtctgagatggcagcagtgtcctattgaaggagctccagggtctttgtgagggaggagagtgatgggatcctagagtggccggttgaatgcctccaggcattgagtgagattctccttcaagggcttgtgaggcatttaaagtacactgaggccgagctgcacttggcctcaataagcacatgatgtttgattaagattggagattgcctacgctttagaatctgaccacctgtgaccactggaactcacctagagtgggggctcctgctgagcactggccctctctccgtctcctgccccatctcccacctgcccacagtacccccactgcccagacacagtgcagccgccctccttcctccccttggcctgttagtcatcagcgtctgccgtcctggctcgtgtggcctgagctagagccgggaggccaagagatggctggtgcccaggaccaacttccccgtgatcagtgtgtggcaatttgctggccatgctgccagaccctctggcacagaaaccagggacaggaggaggcaggatgcgagcaccctggtgagctgccaggcggcctgctggggtgggcacaggtcagtgctaggagtatccatctcgtaggccttcctggtgccactcagcagagacatgtgaagcccttcccagggccaggcaccagctggggtcagaggtgcccagcagagcataacgcagaacctggacctgtgggcgacgactgtggagaaaagtggggatctgctgagggggcagggcaggcaggagccggctgagggcaacgggaaagtcaccaggtaccgtcctccacacctagctttgccagattgacgtttcagagggtgaataatcaccctgtggctgcccctggccccagggacagagctctgccccttcagggatctcagatgcaggttgtgtaaggacagccttgtgccaggttggaagccaggcctggaagcagtgtgctcagagcagcccaggcggcccacaggcgagtggaggggaacaactagggaagtctggccaggaggaggtgactgcactgaggggctggctggcaggggtctctgcctggaggctgagaggagctcaggttatttatgaaggcagtatagacctatgtggagcttgaagcccagtgtctggatcagagtctgctgggctgtgggcccagagctgggagccagccactcctgcagtgtccgaagtgatgaggaggggctgggctggagccagtcttgcctgctggccgtggccacagggggtcctttctgctctgactcctggcttctgctgccagggcttggaggcttggaggtggcctctgtcccaacaagagtcctcaaaatcctcagtttgtccaggtgagggatcctgggtgggggaggttcccagggctgcggcagaacagaccataccttgtcagtgtcaagccctgactgacccaggagtgccaggtggtggtgtgctcactgccagaaaggggccagtatttgaagagcagtggaatgtgctgggcacgctgtgcaggcattcctccgccctcctggggctctaagggtgttattggggtatgctgccatacagaatattagaaagcaaaagaaagacgcggttgtcgggaggcagagcttgcagtgagccgagatcacaccactgcactctggcctgggcgacagagcgagactccgtctaaaaaaaaaaaaagacgcagttgtctttgacctgcgtaatgttgaccgagattcgtgtggtttcacattgtttaaatttcatggaaaactatggtcccgttgtaaaaaccaagtctccaggtgaagaggcgacttgcacttcctggtgctgcccctggaccctgatcctgctctctctgcctcccaggcaaaggccggcgtgtgcagccccagtggtcccctcctgctgggacccagccatgcagactccacctttacaacagcctcaccaggaacaaggtaaggagaacacagatgccgtggcacacgcacacaatggggaggcaggaggcaggacagcccatgtgccttgtcgcacaacagacttctctgttccttgtgttgggatctggagttccataaatccaggtttaagatccttcagtcacttccatgttatagtctctgtggcccagaggcagagctgtcctctgaaacccagacacgtgaagtatcatgcctcatgtggaagcctgcccatgacttctgggcatggatcaccctggcttgtctctcggactctgcccaaccatgagtacttgaggtcatccacagccacgcctttcaggaggacgcgtggttgcagcaggtggcactgtatgagccaagcaggatggacaaaacggcaaactggctggatgttgttgggagcacagcaggttttgagaagaaggcaggattggttcctaacagaatggggtttgcatggtttgcttggctcagggcatggccagtgactccagtgatttcagaccaggctctgggcggggctgcttggatttccatcagggagcatgtttggcagacagagagtcaggtgtgagggagttcatggccttccttgggaaactggttgaggatgatgcccccagagaggtctgagggtgctgggatgttggggagtggtgccagagcagcaccacgattcaggggtcctggcctccaagccgcgctcccccaacagggactgaccctggccaagtgttgtctgcctcagtttcttcatccgtaaaaagaaaatgacataacctacgtcctagagtgtactgcatattgaatatttagctcagggcctggcacatggtaggtactcagtaaatattagctgtgttattgttaaataagcagcatttcaacaatcaataaaatcattgattccctttatcgcctccctccatagatgagtagaaccccagggaggaagaggccccacccacccagggctcagttggtgggaggtgccgtacatctcactgggctcccactgagactgtgacttttcacagtaaaacaaaatggtctctgttgaattgtttacactaaacacaaaccacactgtgatgtttgttgctgtttttggtaatcctgtgcagtgtttcttgcatttcttgtgatcgtcattccttcattcctaacaaaggaagtgttcatacctcaagatgggaaaaaggtgacgtggtattgctgtgggccaaccgtctatgacgcatctcacatggggcacgccaggtaggtccaccgcggggtgtccctgcagcttctgcagttgcacgcagaagtcagagccattgggatccacagcagcgatcttaggtccacaaagatcttagatctgctacagagacctgagatttgaggaatcaagactgaatttcttctcttatttttaagatgaaaattttaatgccataagtaatctatattcactgcagaaagactacagatcaccaaaaagaaaatgtccatagccccactgctaacatgctggactcgacctgggcactttttctcacataccttaaagttttctctcatccctcaagctctcgtggggtccccagatgctgagttcccgtgacactcagacctgacaggcctgacgctgggttggctgtgaccgccccccgaccactggatggtcatggctgtagctcctgacgagtagctggctgttggggtaaatgccacagagtccttttatgtgttcatgttttagttgcagtgccaaggtcatgtatagtcaacccttgaacaacctggagggtagagggtgtgaccctctgcacagttgaaaatccacacataacttttgattccccaaaaacttcaccactaaaatagcctcctgttgaccaatagcatgccagtcaatgaacacatattttgtatatacattacatactgtattcctaatgataaaggaagccagagaaaagaaaatattatgaagaaaatcataagggagaggcaatatatttactattcattaggtggaagtggatcattataaaggtcatcatccttgccatcttcacgttgagtagactgaggaggagaagggggggtcttgctgtttcagggatggcagagaaaatcatatataaatgcactcatgcagttcaaacacgtgttgttggaggttaagctatacatatcgtctggtgtggaaatgtttgttttttcattgctttaggtcctacatctcttttgatatcttgagaagagtgttgaaggattacttcaaatttgatgtcttttattgcatgaacattacggatattgatgacaaggtaaagggaatttgtaagattaaattttaaatgcaattggatggtgtaaaagaagatagaactttcgcataagtaaataatgtaggcttgagctagcttgtgttttcacctgataaacatcattttaatcccctcagtgagttaatattaccacttctgctactgatatgatcatttctatgatgttcagacacggttagaaacctgcatgttgctcaggggtcggtagccctgggtgttttgcagaaggaaggcctcccacagcacgcacttcgacatgtggcttgcaggggaagctggggcccccagggctcatttcattaagcgtcagaaagatcatgttaggccttgggcactacttggcaggtgggagatggagggtggtgtttctatttgatgatggtgtgcacgtccggggcccacagttgtctcccaccaccctcaccctcacttagagttggccaagggagagagtggcctgctgcagagggatgcatgtgggatccaagcatcactccccaatgtctgccttccctccccagatcatcaagagggcccggcagaaccacctgttcgagcagtatcgggagaagaggcctgaagcggcacagctcttggaggatgttcaggccgccctgaaggtgggcctcttgctgtctgctctagaaaccgagccctttgctttctgttctcggtcctttgtaggctactgtccctagggtagtgtcagtctcacaggctttcacaaagtgtatgttactcaagccagttccgtcaggggcgctgaagtctccataggtaaggtcccctggcctgtgacaaagtcaccagcaaagatgtactggagtggagtggagagtaggtgacattcctgccacttacaggaaaacaactgaattcatcacagtgccactaattacacttataaaaatgcttaccaatattgctgtctaattttcaatgccaaggttacaactaaatcagaaacttctgcccaagatacaaaagctatactaagctttttaatttggtaatactgtaaattttcagaatcttttgaagaaattagttctctctagtattttcattctgaataaccatcgttatatacttatttttattacaatagtaagaataggtcattttactctctactaattatccttagtaattacagtaatcattatggatatgcttatggcattttatctctggaattaaaaacaggaataaaattagagctgagcaatcttttaggtcagtgaggcctgagtaccttcctgatggatgtgtctgcagcacacctcagaacacactgggtggcctacttttcctcatccccagaacagccctagaaatactgctctcacacccaatttgcattggagaaactgaggcacagagaggttaggtgccctgtccagggtcacacgtgagagggcagaaccaggagctcctgagccgggagcttcagtctctcttagttccttactgcctggccacttgggttgcacacttctctatctctatggggccatgggaaaaaccgttctgttttctacctggaatcacctttatgaatttaggttttgctgagcagtatctaatagatttgacgtctctttatggttgcagccattttcagtaaaattaaatgagaccacggatcccgataaaaagcagatgctcgaacggattcagcacgcagtgcagcttgccacagagccacttgagaaagctgtgcagtccagactcacgggagaggaagtcaacagctgtgtggaggtgaggcttcacacatctcccagacagcccgttcgggtcaaatgtcgggccgtgcatagactgatctgtgtgcacggattgattccacagattgtcttagtggaagacactctgtgtctccagtagctccactgtggcaggcggccctgttctgcggtggctgagtcagtgcccctcccctcccacacccctttgccccatttcctgggtgcagagcctgtgccactggaaggagactcgggatccacaccctcccaccacttccatcagataggcaggaggtgcacttggaacgtggggaggcagccttctgtcgaagtgttccaagattctccagcggactctccccacaccagctggagaaggaggagcagggattaacattgaattgagcattgaggcctgtgggtacctactgagcttggggccttcacgttgaccagctctcctgcccctgccaatatctccttcagacacagggcagagacctgggtgcagaggggaccctgccctcttcctcaggcctttccctgtggctggcgccctggacacagtcaggaaggccttctcctttgtgccagcgccgcctgctggtcaccctttaagaactcgatggaaaagagaagagacggctgcagctgtgtgtagaaaaagaggccccactgaggccgcagccctgccttccctcaccactgccctggccccacctcagtgatggggcagggagtctgtgtctgcccttcgccagcatgtttctttctagtttggtctcttctgtgtcctgactcagcagatcgcttcgttgcgcctgtttccaaacttcacggaaacacgccacgtgtatgtagtcgtcagtgtgctttcacccaagctgtgcttctgggacgacccacatgtggtcactgtcactgcctcagtgcctgcctgggagccgagctgtttgtctgttctcctgggacgggcagttaggtttccttcttaccaacaatgctgctgtaatttttttcccagttgttccactaatattctttttttttttttaattgtggtaaaacacacatcataagaaatttaccatcttagccatttttaaaaactttttttttgtagagacagggtctttttgtgtctggtttattttgcccagcatagtgtgcccatggttgacccatgctgtagtgcatgtcagactctgcttccttcctatggctgaatgatactctgttgtgtatagatgggccacattttgctcatcctttcacctgcccgtggacacgtgggttgtttccaccttttggagatgcaagtaatgctgctataaacctgggtgtacaaatatctgtttgggttcctgctttcacttcttttggggatatacacggaagtggaattgctgggtcatgtgatgattctatttttgatattctgcgtaaccaccgtattgtttctgcagtggctgcactattacacattcccacccatagtgcatggggttctgttttctccacatccttgccaaagcttgttattcttcatttttttcatcccagtaggtgtgaggtggtatactgtggttttggtttgcatttccttaatggctagtgatgtggagtgtcttttgctgaactgtgagttgttttgtgttgtctctaggtggacatttgcaagtttctttaggccatatacctgcaagtggaatcgctgggttgtgtaggatatatgtgagtgactgtcgggggttcccaacactgcccacacattctggggccctagaaggactcatgagactcggcatcgagttatcatcttgtctaaggtttgtagcagtgacacagcgaggagcagaagctcaggcggagtcttcaatcatccatgggcaggctgctgaagcttcctccctgcctcccatgaggggacacagcacactctcccccaccaggaaaaaaatgcagccacatgtgtgaaatgtccctccctagggaagcccatcacataggcaccctctgcctggcacgtgccgcaattcctgactccccaggaggaaagctggtgttccacctgcataagccacagtgtttgttcaacagcccactgggggctgctgccacagagctgggtttcccggcctcttagcacaggggacatttcagctcctggatgccagctaatggccagctctgtaggcaggcctttctcaggtggcagacacagaccttctaggctcacttttatcttcatagtagccatatcagaaatgtctatatggccaggcacagtggctcacacttgtaatcccagcactttgggaagccagggcaagaggatcacttgagcccaggagctccagaccagcctaggcaaaatagtgagactctatttctacaaaacttttaaaaattagccaagcatggtgatgcaagcctgtggttccagctactggggaggctgaggtgagacaatcacctgagcccaggagtttgaggctgcagtgagccatgaacacaccactgcactccagcctgggcagcagagtgagacccagactcttaaaaaaaaagaaagaaatgtctatgcaaatttcttcttcttctaccacattttgggtgtgctgtgtatttgcacatacacctgcatttgtattgttggattcttccctttcatcagtcaatgaatgtgaagtgctgattgctgtggtttgaatgtccctttttccaacctctcctgagactgagcatcttgtcaagtgcttgcttccagctgtgattctgtgcccccatctctccccctttcccatgaggttattggtccttttcttactgttttgtatcattcttatgtcttctgatactaattactatgatttgaatgtttgtcccctccaaaactcatgctgaaacttaatccctagtgtaacagtattaagaggtaaggccttttagaggtgatcgagtcatgagagctctgccctcatgaatgggttaatggattaatgggttatcacagaagtggggtagttatcatgagagtggggctgttacagaagccagtttggccctcatgagccccctggccatgtgatgctctgcgccaccttgggactctgggaaaagtccccaccagcaagaaggcccagaacagatgtggccccttgaccttgaactttccagcctacagaattgtaagaaataaattttatttaaaaattacccattcccaggcagggcatcgtggctcatgcctgtaatcccagcactttgggaggctgaggtgggcagatcacgaggtcaggagatcgagaccatcctggccaacatggtgaaaccccgtctctactaaaaataaaaaaaaaaaaattagctgggtgttgtggcgtgtgcctgtaatcccagctacttgggaggctgaggtgggagaatcccttgaaccagggagtcagaggttgcagtgagccgagatcgtgctgttgcactgcagcctggcgacgaagcaagactccgtctcaaaaagaaaaaaaattttacccattcccggccaggcgcagtgggtcacgcctgtaatcctagcactttgggaggctgaggcgggcggatcacctgaggtcaggggtttgagaccagcctggccaacatggcaaaaccccgttgctactaaaaatacaaaaattagccaaatgtggtggcgcgcgtctgtaatcccagctactctggaggctgaggcaggagaatagcttgaaaccaggaggcggaggttgcagtgagccgagatcacgccactgcattccagcctgggaaacagagtgagactgtctcaaaaaaacaaaacaaaacaaaacaaaaaacagaaaacaaaaaaaagaacaaacaaacaaaaaaacagaaaacagactaagacacgaattcatctctgttacatgttggcatgtgtttgtgtctcttaattctgttctgttggtcaaattgtccagcccagaccaggtgcagtggctcgttcctgtaatcatagcaccttgggaggccaaggcaagaggatcccttgagcccaggagtttgagatcagccgggacaacatagtgagactctatctctacaaaaagtttaagaatttaaaatttaaaaaatttataaaaattgcccagtcctgcaggagtatcatgctgtctctcacaggtatctgatgggtaagaggccccatcttggttttgtcgttaggtgtgttttgaagcctcagcttgtcaagttccatgtaagacactgttgggattttacatgttgtatctaagaaccatctcagatccagtttggctgtgttgatcctctgtagtctttttgttttatcagtttttgtccattctttattccttcttttcttctttttcctttggatttattctgtttttctttgtctcatttagcagtttagcttattttctgatttaagaatttaaggctatacattttcctctgactgtttttgctgcaaaatttgacatcatttacttgtaaacaatttctaatttccattttggattttttagcccaggaattatctagaagtaattacctaaaagttaattatctagaattacttagaagttttaaatttccaaatttaaattggatggtactttttcatattaacttattgttattcgcttataacttaattacccagtggttggagagtatggtctgtcccaatctggatctgtgaacagagacttgtgttgtggcccctgtgtgtgctggtttctgaatgttctcttgtgcttgagaagattccgtctaatcccctagtgcacagttccacatgccatccacttagctatacctgttggccgtgtggttaatattttgtgtgtctttgctaattcttcctgttggcttagcctattcatacagtttcttaaaaaaacaaaaacaagaaccaaaacaaaactccccctctgatgatgaatttgtctgtttctccttattttttcactttttagaaaaaaaaaaagtttttttttagaggagattctggttcacatcagaattgagaggctatatatatcccctacccacctcaccgtcacctcccccagcatccgcacccaccagggggtacgtttcttacagtcagcgaacctgctctgagcgtcattaccctgagtccgtggtttactttagggttcactctcaggattgttacatcctatgggtttggacaaatactatctcgtatccaccattacggtatcacacagaatagtttcactgccctgaacatcctctgtgctccagctattatcccttcctccccaccccaactcctgacagcagctagtctttctactgtctccgtagttttgcctttcccagaatgtcacatacttggaatcctacagtgttgcagccatttcagatcggaaaaaatttttaaacagaatacttcacctctgatcaccaaaatgcatagggatttcttcctcacccagcccacctctgccccgacaaccagtcagttctctagcaggcatcagctgggagtcctaaaatttaattcatttccaacacagtttgccaggaggaagcgtcagatctgacaggttgaagggctcagtcccataagactgtccccaattcagatgccagttgaaagtagtagtttgttacctatacttctgacctaccagttattggccgggcgcggtggctcacgcctgaactcccagcactttgggaggccgagatgggcagatcatgaggtcaagagattgagaccatcccggccaacatggtgaaaccccgtctctactgacaatgcaaacattagctgggcgtggcgtcacgtgactgtaatcccttctactcgggaggctgaggcaggagaattgcttgaacccgggaggcggaggttgcagtgagctgagattgcactactgcactccagcctggtgacagagctagactccatcaaggaaggaaggaaggaaggaaggaaggaaggagggagggagggagggagggagggagggagggagggagggagggagggagggagggagggagggaaggaaggaaggagaaagaaaagaacagagtgcactggtatattttggaatgcttcctttcccttcttgctattggaaacacaaggggatttttctccaatattcactgtgaggcctggtcaggttcctagaggtaaaactcacaaaagtatggggtcccctatgactgggtccctggggttttcaactgtctgacttgcctacaccaagcctgcagcaatctctgttacagtcctggttttcctcccccaacactggttcccacagaattttcagcttatgagtctctgctctggtaagttgtgattgtctgtcttctcctgttggtctctccagtttagggggcagtggtttgccctatgacctaacttctcttatggatctaagaagagttggtttttcagtttattcagctttttacctgttgttaggtagagtggcaacttccaagctcctgacttatgtgaaactggaaagcagaagtctcttatcattttgtatttatgcattttgattgttgatctgtatgcttgaccagcaacattgagtattccagccctatcatcaggcaagttttagaaacattatcttagaagtattggtgggaagcagcttttgtctatcttgaagtgtgtatatttccctgtttgttcaaggtggttgccgtcttctggcttccattgttggctgttgttgaaaacatcggctgcccttcaaattacttttctttgattggtaaatatgtcttttctatcaggcgcattataaaagtattctctcttttcagttttctgctatttcacaaagacattgtaagagatttgtttttacttatcctattggatattttgtgtgcttcccggggctggattgttgcatgggttttgagaaattctcagatgtgtcttcaagtatcacctttactcgattccctctctcctctcctctgggttgccaattagatgtgagtctcatcatttcatctcatccttctccgtgtctcctaacctgtctttcataaaattttccttcttgtctctgtttcattttggatgacttcttcagttctgtcttcctgttcacaaattctccttcagacaggaagtgaaacagtcactcagtaggatggataagactgtttcgcctgttaatagatttcatctctgcaggttccgtttgcttctattttcagatccagctgggccgctttgctggcctgtccctgcttgctattgcctgtcatctgggagtccgtccttatgtctttaagcctgtaatatttactggattttattatgtatctgataactcctccatctgaagcgtccatctgtttgtcgtttctgctgactcccattcacagttgctcatgttcttgggtgtttggtgacctcgattaggatgtcggttcttgctgggtcgtgaccttggtgatcctgagggccaggatgcgcgtttccctgtacttggggcaggcccagtgtttgcttttcgggcagcagacttggcagcctttgctccccagagcgcacaccctgcttttggtgcttgtctgcccactggatgccctgccgcggtggggagggtgtgctcattcctgcagacgtgccttgccacttgcaggcctgcaatacatttaacacatctgtttgattcaggagctgtaggcagggattgcatcaggaacctggcccacgtgggccctgtgccccttctctgtctgtgttgtggctttgtccaccctgtgtccttgctgtctgccaggccattttcctacactttttctctccagccttggttctttgcctccccttcccatagtaggccacagaccatctgcttggtgtcacgccctgtcctgggtccacgtcagtgcattgagactctaggtccctccaagatggcggagggtagacatttctcttttctgacatgagtgcagttggggcgtgtctcatgcctagagtgtgtgtggtcaggacctggttcacataggtgccatgttttgctgggattggtggtttttactcccattccatggtgtgtcaagtggggatggcatcttcagtcaatggcgtcagggagatggggcttttgagacctctgggaccagtgccctgcctatctctcctaacctctggctgtgtccgtcatgaatcttttcctgaatgcaccaaggggttgtgctgtaggtgacacactgtgtgctcctgcccagcctctgcccataaccctgccctgcacggcccaggtaggctgcacatgctcaccaggcccacctcggccctcccacctctttttgcctctgcacccacagtccccttggctttgctcctctgagttcatgtgagacctgcccatttgtagagtcttgtatttgtccctgccgagccagttgtgtaagcatcacagtctccctaggagacggtggctcttcacaggtcaaggtcagcacctttgaattcagggcactgatgggctcacaccagctgcacgagatgttctcatgtgaagtgtgtggcccgctgctggatttttgtttctttctcttcaggtgttgctggaagaagccaaggatttgctctctgactggctggattctacacttggctgtgatgtcactgacaattccatcttctccaagctgcccaagttctgggagggggacttccacagagacatggaagctctgaatgtaagtgtcacgattgtcttgtgctggctctcttgcgctaagggccctgatttctaaattcctgttttggcaaggccagctcaattaagcggccaagtcaacattgaacttgagttgaggggcataatgggcttttcgttttatgaattgggaacgtttttatggagcgcgtggttttcagaagggaaaatcccaggacattctcatgtcttgcacaggttctccctccagatgtcttaacccgggttagtgagtatgtgccagaaattgtgaactttgtccagaagattgtggacaacggttacgggtaagcacaagggccttccctagggagggaagggctgcagaacatcgcacagggaggagctccccagctctgagcctgagtttgggaagcagaggagcaggtgttctggggctgcgtagctagaagtcccagcagacttcctcctacaactctgggcccacccaggggctgaggagcatgggtctgcactgtcctgggggccatggtgagaacctaacccagaatctgctgggaagctcggcagccaagaccatcagtcatggggccccagagctgcataatggtgagtgcgaatactgctgggccttcacagacatcagtgccattgcgtagacattttgagagtgctagtcctggtgtcatatcccgaaggaggatgcatttcatcagcatctatcgcttggctatgattttagtgactttttgttggcaaatccatcatacacttccctggcccgtattgtctcaatctccaaagtaagcattttcagaaatggccaacaaatggaaatgcagacaggaacccggttatctgtctgtagtgtgtagggaccagccccacagggtcggtgggtttttctccccatgtgtggagatgagagattgtagaaataaagacacaagacaaagagataaaagagaagacagctgggcccgggggaccactaccaccaagacgcggagaccggtagtggccccgaatgccaggctgcactgatatttattggatacaagacaaaggggtaggttaaggagagtgagccatcttcaatgataggtaaggccacgtgggtcacgtgtccactggacagggggcccttccctgcctggcagccaaggcagagagagagaggagacagagagaggcagcttacgccattatttctgcatatcagagacttttagtactttcactaatttgctactgctatctagaaggtagagccaggtgtacaggatggaacatgaaggaggactaggagcgtgaccgctgaagcacagcatcacagggagacggttaggcctccggataactgcgggcgagcctgactcatgtcaggccctccacaagaggtggaggagcagagtcttctccagactcccgcggggcaagggagactccctttcccggtctgctaagtagcgggtgtttttccttgacacttacgctaccgctagaccacagtccgcttggcaacgggcatcctcccagacgctggcgttaccactagaccaaggaacccttctggtggccgtgtccgggcataacaggaggttcacactcttgtcttctggtcactcctcactatgtcccctcagctgctatctctgtatggcctggtttttcctagattatgattatagagcgaggattattataatattggaataaagagtaattgctacaaactaatgattaatgatattcatatataatcatatctaagatctatatctggtataactattcttattttatattttattatactggaacagctcgtgccctcggtctcttgcctcggcacctgggtggcttgccgcccacagtagtgctcagcactgtaccgtgcgcctgctcccagagacccactgtgtccagcctcagattgcttccctcccacaggaaccacacaggctggatgaaagagaaacaagaggttgtgacagtgccaggaacggggcagactcttaagcagtagcgctgcttctctccccacttcacacaaactactgtggggcagcataagagcctgtgccaagccgagaggcatgggcaagccgaagctcagagaggacaggtcattccagactggagtaatctagagtgcttcttggaggccaagagcctcagctaagctaatgggtagagtgtggacattcagggaaaggtgaggccacacaagaatgaggacggcagcagccctgagcaaggcagggtgggagctgcatgggtcacaggacgccaggcagagggacgagctgcccagggcaggcaggctgcctccgcagcgggatgggccctggtgtcccactcagtccaaacagctgatacggttttcagtggccaccacagagagtagataggccacagatttcgcacttttatagccctgctttattttgttactgtcatcctgctgacacactttcgggtctgttagatgcacccacccaattccttttctgttttccagctatgtctccaatgggtctgtctactttgatacagcgaagtttgcttctagcgagaagcactcctatgggaagctggtgcctgaggccgttggagatcagaaagcccttcaagaaggggaaggtgaggagggcatgcctgagagcatgtgggctctccctcctggcccagcctgggttgtgttgactttgcaggccacgggggctgcgctgagcccacccctcagactcttgggaacagtgctttttcacctgaaggaattttaggagttttctgcactcaacattgtgcagctctaagaccatgacatgtgtttttttaatggatatataataattatgcaatttatggggaacatgtgatgtcttaatacatgcacaccgtgtgtgatgatcggggtagttaggatgctcgtcaccttagacgtttaccttttctttgcattgggaatgttccagatcttctggctatgttgaaatatacaacaaatgttttggtaactatagtcaccctactgtgctagtgaccacaagaacctattctttctgtctgtgtgtttgtgcctagaaaccaacctctctccactcactgcccctgacctgactcttctcagcttctggtgaccactgttctatgctgcacctccttgaggtccaccgttttttagctcccacataagagagaggacatgtgatatttgtctttctctgcctggtttatttcacttaacagaatgtcttccagttccatccatgttgctgtaaaagacaagatgtcatttttttatggtgtgttattttttaagaaacaaaagacagtaaacgcagtgctgtcttgagaaacatagtggcccctggggcctggattcacagggctggtgtttgctggctgagcatgtgaggtttagggggattgtggggtgctgggatgtgtgccgagtgatgcatatttgacaacagcctgtgcgcccatctggatccaaatgcttcaaacacagatatcagactttttctagaccaggcagaattatattgggaaccctttcgttggtgttttcttcatgtttatcccttaagtgaatctggggacacatccacaagaggcaaggttggaagcctccctgcagagtggggattcccgcaatgtgccagggcacgttctgcacccccaccccgcctgtcctagtgtttctggaagacaatttggccataaaaatgttcatacttttatctaattttaggctctattctaaagaaatatcagaacctaaaataaaggtgcggtggctcacgcctataatcccagcacttttggaggccgaggtgggtggatcacctgaggttgggagttcgagaccagcctggccaacatggcgaaaccccatctctactaaaaatacacaaattagccaggtgtggtggtgcttgcctgtaatcccagctactcaggaggctgaggcatgagaatcacttgaacccaggaggcagaggttatagtgagccaagattgtgccactgcactccagcctgggtgacagaatgagactctgtctcaaaaaaatatataataaaataaaaccagacaacacagactgaagaaagatagagatagccaggttgacacataaatatcagacccatggcatttcaggctccgggtttgtgggagtagaggggcgggtttgtgatgatgaagcgcctcagctctgagaggatgcagcctgggcctctggaccagaaggcttcactaccctagaaccagagtggacatgcccacgtttcatgcacttcccaggagttgacagatcaagtaggccaagaattaatacggatatgaaaggtttgaaatacagttaacaggcttggtttgagagctgggaactttgcactcaggaattaaagaacatcctttccttccaagaacacagaaacatatgccaggccacagaaagatttccacaaatctcaaagaaccgttttcaaggaaccctcattctgtcaaggagccctcattctgtcaccatggagcgattgtattagataacaacacttggccagacatggcgacccacacctgtaatcccagcactttgggaggccgaggcaggaggatcgcttgagcccaggagttccagaccaacctgggcaacatagggagaccccctttctacaaaaaatttaaaaatgagctgggtgtggtggcacgtgcctatagtcccagctacttaagaggctgatgcaggaggatcacttcagcccaagaagtcaaggctgcagtgagccctgattgtgccattgcactccagcctgggcaacagagcaagactctgtctcaaagacattaaaaaaattttttttttaaaataaaaaagataccaacactgacaggacggacgtctaaaatgtacaaacttgtctggggggttgaaatcatgctcctggataactcctaggaaagaaaaccacagtgggaaatcaggggtgtttaagcagaacagcagcaaaggtgccacacaccaaatctggagaatgcccctaaagcaccaattagaggaaactgatgtttttaaatgtagttattaaaaaacaaagatggaaaataagtgaggtgccgggtgcagtggctcacgcctgtaatcccagcactttgggaggccaaggcaggcggatcacgaggtcaggagttcgagaccagcctggccaatgtggtgaaaccccatctctactaaaaatacaaaaattagccgggtgtggtggcgcatgcctgtagtcccagctactcgggaggctgaggcagaagaatcgcttgaaccctggaggcggaggttgcagtgagctgagagcgtgccactgcactccaacctgggtgacagagcaagagtccatctcaaacaaaaaaaaaggaaataagtgagctaagcagtcagtcaaaaagctgggaaaggaacaagaagaagtagaaagaaataggaggaaataaagtaaaatcagagattaaagaaacagaaacaattgtaaaagccaaaagctgattcttctcaaaaaataatatagaagaacccttagcaagtttgattaataaaagtagaagattgaaaaacatattagggctgaattatagctcatgcctataattcagcactttgggaggccgaggcaggaggatcgcttgaggccaggaattcaagaccatcgtgggcaatgtagtgagaccgcatctctacaaaaattttaaaaattagctgagtgtggtagcatgcacctgtagtcccagttactcagaaggctgaggtaagagggttgcttgagccagggaggtcgaggctgtagtgagctgtgattacaccgttgcactccagcctggctgacagcaagatcctgtgtgtgtgtttgaatgtatgtatgtatgtatgtatgtttgaataacaagacaaaaatggaatgtaactatggatatagtagagcatttcttaaagtccttagaggaagccgtgaacaactcgcactgcatttgacacttagatgccgggagggaactggcagcacatgggaaaggtgggagtggtaagtggagcagtgccctcaggtcacgtggtgaaggaatgttctggaggcagctagagcacactgactcaccactttatgatgaattttgctatctggccccatctagggtctttttcttaaataccatttattcttgggcccattttcttccagaatgacttcagcattggtttaagttccaggaaacaggagtagaatctaacagccaatatgcaggaccaaagagggacatggatttccacccctccacagtcagtgatcagacgtgggcacatgaccacccccgcaacctccccccaccatggggagtcataaggagtgtagccttagctctgtgcagtcatgtgctcctcgccatggggactctaatggtagaggaaaaggggaggggtgatgctggggcccaagtggtcctagatgatgacagctcctcactccgccaagtaagatgacccaccagaggcagatgggccatgcagaccactcgggaaggcacgtggcaggaaggcctagtgcagggaggaagctcccccagtgggagagaacaggaccctgttgtgctggtatgaacatgcttgtagggtcaaagctagaaacactcactctgcctctggggagagagacaggaaatgaaaccaagaaggaaaacttgaaagacattgtgttgtaaccataataggtctgttgcccaatgcacagcgagtcagtataccgggataccaggggttgccgtagaagaagcgtagtaattgtatggtggacaaatggagatgggaggaaacctcagatccgcctccctgagatttggggaggggtttttaattgctctggacaggtgatggggattgccggttgctggggaagtgaggggcgaagtcatgggacagggaggtaaaccacatttctgcgacgagtcagttccttggtgcaggtcttcagaccagttggcaacagctgtcctgctggaattcaggatccaaaaaataccttaagcagttcttggtaaaaaggtccagggttagagattctatcgctaggaacagtggtggagcaggtggtcagcgtgctatgtgactctcagttagagctgcagggaagcggatggacgtgcactgcacctggccagtgaccggcctcatcattctgcctatagcctgccttggaattctcattaaccctatgagggcagttgcagtgtgatgtttgctgaaggatagggtgtttgtggggagggtcctgtgttctctgttatcaattttttcaaagcgtatttttaaaaaatcagatataaactttcatgagtaagttcataataatgaaaagttgaaaacgtgaatgtatattttctatcaaagagcatctaaaagcgaatgtcatgggccatatcacattgtgcttttgcggaattgtcagtggcagaacagtgcggaggtagaaggaagccaggacagcggccttccgtgttggtggatagatctggattttgcttgcagaggttttttgtgtttttgtgtgtttgttttttaatctgggaatcagtataccaaaatggtaacagtagtaattcctaggttaaaagataatggcaatttttttcctagttttctttttttatctttcaaatattctacatttagtacatattttataatcatgaacttggtgtttagaaaaatatatttagcggtgcttttcctctggactctgtttctcagggcagcttaggtctgttgcctgattaggctcctgaaaagtggatttgtcacctggaaagatctcactgcagcttcttcagggtcacctgagttagaaccctagatggagtctgttcttcctccacaagggggtgacagcacctaaggcagcccttagaccagggaccaggaaaggctgcagcagccgggcaagacctggcgtgggtcctggtaaccttatgcctagagtgaagacctctgctctgcccattcatcgaacaaagggtgattctctgcgtgacctttggactggctcacaggtttctttattcacagcagctaatcttttccattggtcctgcatgtattgttgagagaaatctgcagtgatggtgcattccttttctggggactcagaccgccttgtaccctgagtgtcaggtggctgagtgtcaccgagtcaatgcatggaattcaccaaggggttatttctcatccctctggcaaggcatagacagtcttgtttttgttggccaggtgatcattggctttgtccaggaaatagaacttgtgccaagagcagtactccccttttcttatggccttcctggactattctttagtttccttcacctattttccccttataaatacacaggaacagcaaatgtccccttcaccactgcactgccaccaggttccctgcagtagtacacagcagcttagctgcatccttgtatcccccgggacccataagcagatagttgtgcgggcccttgacatattgaccccacccgcatgaaccaggcaggatccctgagccatgccccagtggctgcaccactatgtcacctcctagctttagcccagggttcttatcacttgtcctagacactggtgggctaatgctgtgagaaggcagcaggaaggtgaatgtcttacggagaccccagatgtggcctcaagtcagccaggtatataagctggtgactttggggattatgtaccgttttgtaaatctagacactgggtcaacaccagaatctggtaatacatagttaacttgaagaaatgcttgagccaagttaataaacagaagttagtcagaaggactgcccattaggcaccgtggatggccttgaagtgagacatgtgggtctgtgggtgctgctgagtgaccttgcctggcgtccctcgtgtttgcaggtgacctgagcatctctgcagaccgcctgagtgagaagcgctctcccaacgactttgccttatggaaggcctctaagcccggagaaccgtcctggccgtgcccttggggaaaggtgagcgagtggcctagaaggtgtggggcttggacaggggcactggcgccagccacactctcaggcccccagcagagggccgctctgtgtgtgaaggatgttgtcactgggccagagcctggtgctggtgcagcacaggctgcctggccccggggacctggacatcatggagactccctgagtctctggacaaatcacttccctcctgggatttctgttttctggtctgtaagtggagatgtgatcagagtagacgtccatggaggcttcttggttcttgtgttctgtgactctgagtattccaggccccagggtgtaggatgcgttctgatcttcccggtgacaggagttgttgactgcagggtaccctaggaaggggcgtgaccatctgcagctgtcaagggctcagaggtctggatgtaattcagtaacttcacctaaacctcggcccacataggaccggtttatgaacttcaccaaagaaggctatccttagtcttttttttttttttgagacagagtgtcactctgtcaccaggctggagtgcagtggcgcgatctcagctcactgcaacctctgcctcctagtcccggttcaagcaattctcctgcctcagcctcctgagtagctgggattacaggcatacgtcaccatgctcagctaatttttgtatttttttgtatttttagtagagacggggtttcaccatgttggccaggctggtcttgaactcctgacctggtgatccgtctgcctcggcatcgcaaagtgctgggattacaggtgtgagccatctcgcccagccttcccttagtcttttcatgtgcgggatttaacgcttgttccaataaagttcagaggatgtaagggccatcaacttggagtgataagtgataaaggcctggacaagcgggtaggctggtcagtcactgtgtgttcggctttctccagggtcgtccgggctggcatatcgagtgctcggccatggcaggcaccctcctaggggcttcgatggacattcacggaggtgggttcgacctccggttcccccaccatgacaatgagctggcacagtcggaggtaggtgaaaacagagtccccttgtcaggtgcaagagcacagtgttcatactgcagtggaggaaaagtcagcccaggcctcagaagggcctctctcactagaacttgacaccttcatcggggcttgtgggtggaatctgaaccctgatcatttagtgtggtttccgcattgacagcctggcctttggcaacagactagcctggatttgaaccagttgtgttacctgctggcttattaacctgggctgtccttccaagccctgcctgcaccacctggaaaacgcagctcctgcctgtggacagcaccaacaaggcagcagacagtgcaggtggcaggaggcggccccagtaacacatgactgttgacatcctttgtctctttccacgcaggcctactttgaaaacgactgctgggtcaggtacttcctgcacacaggccacctgaccattgcaggctgcaaaatgtcaaagtcactaaaaaacttcatcaccattaaagatgccttgaaaaagcactcaggtatacactggcttctcccacagaccccccaaccaccttctcatacatgtgtaatggctgtagcactcgggagaataagggcgttggctgtcttgtgtccccccacagcacggcagttgcggctggccttcctcatgcactcgtggaaggacaccctggactactccagcaacaccatggagtcagcgcttcaatatgagaagttcttgaatgtgagtccccagccccttcctggaggttggtggagcagcctcccctgcacagtgggcaccttgtgcagtggtgataggtgcaccagcctcccgatgtctctaatggagaccagcacatgggtggaagcacctccatgctagtgggtataacaggctcggggccactcctgaaatggctgacggctcagcagagtggacagaggcctcgtcctcctagtcactgcagtgcacgtccttctgacttgtactttccaccaaatgagcatctgtaaacctaaagcaagagcatgtttctgtcaaagaaatatcttttcctttctttctgaccacttgtgtaattctggtctttcagatttttaccaaaaataaaatcacagcagtagaaagttgtaacagatatttcaggatggaaaagttgcctaaatgctgttaaactgatttttctaacttcaggagtttttcttaaatgtgaaagatatccttcgcgctcctgttgacatcactggtcagtttgagaagtggggagaagaagaagcagaactgaataagaagtaaggtggtgccatttctttggggtttttgagcatgcccatgttctatgcctagcctcgcatcttggccaccatgtgtcctggactgtcgaggaagggctggggacactgtcgtacgttgtgcagaattaattcaggataggcggctctgctaatgggagctgctctgggtgttgaagtgcatggagaatttcttttttgttttttctttttgagacggagtttcgcccttgttgcccaggctggagtgcagtggcgtgatctcggctcaccacaacctccacctcccgggttcgagcgattctcctgcctcagcctcccgagtagctggggttacaggcatgcgccaccatacctggctaatttcagatttttagtagaggtgggggtctctccatgtttgtcaggctggtctcgaactcccgacctcaggtgatccgcccacctcagcctcccaaagtgctgggattataggcgtgagccactgcgcctggccacatggggaatttctatggtgtgttttcaggtctgacttcacattccttcctctttgttgctcagcttttatgacaagaagacagcaattcacaaagccctctgtgacaatgttgacacccgcaccgtcatggaagagatgcgggccttggtcagtcagtgcaacctctatatggcagcccggaaagccgtgaggaagaggcccaaccaggctctgctggagaacatcgccctgtacctcacccatatgctgaaggtaagccaggccccaggcaggcgtatccctcagcctgtgtggacacaggagccaggccccaggactgggagaacagaggcctctggtgccccccagtgctgtgcctggtgcccagcacctctgagacgtggagatatgcttctgtcctctttggttcctggtgtgcttttcacgcgttagaaataacacccataagcggagcacagtggctcacatctataatccaacactgtgggaggccaggtgagtgtatcacctgagcccaggagttcaaaaccagcctggacaacatagtgagatcccgggtctataaaatatattaaaaattagccaggtgtggtggcacacacctgttttccagctgcttgggaggctgaggtgaggggctcgcttgagcccaggaggttgaatagtgaggtgtgattgcactactgcactccactctgggcaatagaggggagaccctgtctcaaaaccagacaaaaataagtaacatccatatagttgtccttactcagagctatttctttcctttgactccgtttccctctactcccatcttggagtttgaaaagcaaaaccacgccaggcgctgtggctcacgcctgtaatcccagcactttgggaggccaaggcgggcggatcacaaggtcaggagatggagaccatcctgactaacacggtgaaaccccgtctctactaaaaaaaatacaaaaaactagccaggcatggtggcgggttcctgtagttccagctactcgggaggctgaggcaggagaatggcatgaacccaggaggcagagcttgcagtgagccaagattgcgccattgcactccagcctgggcgacagagtgagattccatctcaaaaaaaaaaaaaaaagagaagcaaaaccagggacaaggcctcctctctgaacacatcctgtgcagagcccttccccgcagtgcaccttgaaaggccagcagggcctggactcaactcccctcccctctcctcctctttccttgttgttgggctccagtggcttctggctgaaacagagctggagagggtagctgtgagtcagggccatcctggagcaatgagggcaccctcaggctcgggtttctggggctcctggagctgctgcttccatctctttcctggtcttggggcaccccctcccgtgaacgaggaacacagctcacagctgctcgccacatgccgccttcatcttgccgcagcttcaggtcccatctgtttcttttcctagatctttggggccgtagaagaggacagctccctgggattcccggtcggagggcctggaaccagcctcagtgtgagtagcatgcagggtcctgccttctgcacctgctccctccccactccctacccctctgtgtccctctgaactgcccctcctctgtctgcccacccacaccagacccttccggacagcgcctcgagctaaatggcaattctggctctgagagtgctaagtgtggtcagctgccctgccggtgtggagggtctgctttggttgtgactgttggtttggggcactttgccattgtgctgtcccatgagcttggtcttggaccccaactacataggccgctgcttatttgcattttgctgcggccacttggcatcatgaacacacatgacttcgtcacatatactgacctgtattcagtaaatgcttcatcgaaaggctgcagagctcacaaacagcacagaatttacactgatggggagatacgccactgtctgcctcggtccccatggggctgggcagatgccctaacaggcccagtcctgaccctgagcccaggtcggtccacatggcctgagccaggaccccctgccccagagctgtggcccacaggtcagggggaggtcatcctgtagagccccctgtctagtgggtctgtgcggtgagaaaatccatccagaacaccctggcagtctgttgctggcttctgtttgcagttggcatgtgagcagacacacactgtcagtcctgtccttctgctgtagaacccctgtcccgtctgacacacccacagtcaggcttcttaaagatggacttccacctgctcccaggtcaagaatgctctttgactattcgattagaatgcagatctaaatatttaaatagaacaactgtaattttaattaaaacaggagcttaatacaaagtcaaaatgcaaaacctttttaaaatcctgtttcctaatgacaagtggtgtgaagagcccccatgcggatggagcttacagatgctcccccaggaaccaacttgcaaagagaaaacagtccgtgttgtaagaagtcctgccagagcacctagcccatgtgcctggtgccttttgccagccttagcgctagctagcttggttgtggtagttggtgtggtatttttgagacttcctgatatgaaccttctttggtgcttttaagaaaacccacatagcttctttgttctcttgcgcaaatgatactaagatatttattttctttaaaaacaaaaaaccaaaacacacctcctgggttaaagtcagcctgcctttgaactgcagtgtttttcatcttaacggctgctgtggttgtgggggtgccttcagcgtgctgtggacacgcatccgcatcccccaggcagcctcatttggcctttgcagtcagctgattgcgaagaagcagctgcggcgaatggtgagcctgctgacaaaacgtcctgtgcccacacatcatggccatttgacgttcatggattaacttccaaatccaaatggttttaggagcaagggaggcagttcctccatcttgtaccacctcagtgtcgccacacagccacctgctagcatgctcaggtgggggttgcagccccaggcgttcttgagacacacccctgcagccattctgagagttcccctccagtgcccctagggctggaactgagcctagcagtggggtgaatgcctccctttctgtccttccccaaggcttgtctgggctggctgtgtggtgggtggagatacagatcgaaaacccccaagaagtccaaagttcagatgcagaattgggtctcagggagcttggcttagacttaagggcttgctagcctgcctgacttttgcacttgctaaatttgtgtgtttctgtttttgagacagagtctcactctgtcgcccatgccagtccctgccctgtgtcgtggccgctgagctattattcagttatggatataggagtgtgagcagctctcagcgaacaaaaactcttctttccacagctggagtgcagtagcgcaatctccggtcactgcaccctctgcctcccgagttcaagtgattctcctgcctcagcctcctgagtagctgggactacaggcatgcaccaccatgcccggctaatttttttttgtattttagtagagacgggggtttcactatgttggccaggctagtcttgaactcctgacctcatgatccacccacttcgccctcccaaagtgctgggattacagttgtgagtcaccgcgcccagccagcacttgctaatgtttttattttggttactgagctgctgaatcagctaaggggcagggagcaaccttgctcaaaagcctaaaaccttttctgtcctattagaaaaagagaaatgctagcacagcatggtggctcacgcctgtaatcccagcactttgggaggctgaggtgggtgaatcacctgaggtcgggagttcgagaccagcctgaccaacatggagaaaccctgtctctactaaaaatacaaaattagctgggcgtagtggcgcatgcctgtaatcccagctacgcgggaggctgaggcaggagaatcgcttgaacctggaaggtggaggttgcggtgagccgagatcgccattgcatgccagtctgggcaatgagagcaaaactccatctcaaaaaaaaaaaggggaaatgctttgggaggccaaggcgggcagatcacaaggttaggagattgagaccatcctggccaacaaggtgaaacctcatctctactgaaaatacaaaaattagccaggcgtggtggcgcttgcctgtaatcccagctactcgggaggctgaggcaggtgaatcgcttgaacctgggaggctgaggttgcagtgagccgagatcacaccattgcactccagcctggcaacagagcaagattccgtcttaaaaaaaaaaaaaaaaaaaaaaaagggaaatatagtagaaaggtttttctatcctgtggccacctccccagtgttactgtgggtggtgaatctacgtgtagctgctaatgtgcatgtagatagtaggtgcttaatggagatcattcatcttaaacaagtgtatgtgtgaccacagatcagacgaaagcacggcccgggagccgccagcctcagcataggtaaggccccagcctggggagtgatgtccttgggctccttaggaaatagtccctcccagagctggcccctctgaaaccataaagacaagctgtttcacagcagcgtgtctgacctgaggaaagcagggcctgtcagcagctgggcagagcggcggcagacccacctgctgcagtagaaaggaagctcacttcatgctctctggcctgagagtctgtgtgactcgcacacctagcagggactgtgtgtcagggacgagagcgtccaggctctgggatgccggtcacagctgtagtgtgcacagcagcactgcccatgccagtccctgccctgtgtcgcggccactgagctattattctgttatgaatatgggagtgtgagcagctctcagtgaaccaaaactgttctttccgcagctcgaggccacagtcatgccctaccttcaggtgttatcagaattccgagaaggagtgcggaagattgcccgagagcaaaaaggtgaggaccagttgctggaaagagtgtgggagccactcccctcactgggctccccggaccgggcgtctcccccgaggcactatggcgttcaggccggatcatcctctgggaaggctgccccgtgcaccacagggtgttgaacggcatcccgggcctggacccaccaggtgcattagtaccacacgctccagtcaccacagccccacatgtccctgcagggcagaatcctcgagtgagtgcagctgagtgggcagtggggaccgaggatgtgatatgatgggccagggttgatttgcctctccttctctgagccgaggcagaatggtgggtcctctgaccagcccagtcaccacctgccatttggctcacactggggcttatttttgttcctggtgacctggtaggctgggtgcgctgaggtgtggctcgttcctgctgccgagtggagccgagctgcagcttccagggttcccttttctgctcaggcatgccagatgaatgcttgaacttggggttcacacagtggcccctcactgtccataagcagccattccttcatctttttgtttgtttgtttgtttgagatggagtctcactctgtctcccaggctggagtgcagtggcgcgatctcggctcactgcaagctccgcctcccgggttcacgccattcttctgcctcagcctcctgagtagctgggactacaggcgcctgccaccgcgcccggctaattttttgtattttttttttttttagcagagatggggtttcaccgtgttggccaggatggtctcgatctcctgacctcgtgatccacccgcctcggcctcccaaagtgctgggagtacaggcgtgagccaccgcgcctggccattccttcatcttttgaaatttctgagatgtgtgtggtttaagacttagaaagtgctgaatctgagcattcgttttgactgccagttttaagaaagtgttaaacacagcaaaaagcagcatcaggcaggcctttgcttcttcctgtgagtggttctgaattggtgagtaacagcacagctgggaacacacactgaggacttaggatgtgctgggccctgcccactgctttctgcacattgcctcatttaccaccatgatcctccaaaagaggaaaggagagccctggccgggtcacactgacctcgagtgctactccatcacctgctgtgctaattctccctccccagggggcctctgtgtggtgggaagtctgacctaggatccacctggtccccatctgtgcagagcccattatggagggtcacagtggggcagcatccaggcagggcatgctgaagacagagcagacagagacccagcaagcctctaggagaagctgcaccttgaggaaggatcaggaagcctgggtgggtggaggggccgagaggcggaggagccgaatctgggcctgtttcgggcaggggacagtggagcaggaggcaggagggcaggaaagagtttcgggagctcggggctccacaggctgcaggagagtgcaggacactgggtgagaggagaggctggccgggctgctgggctgctgggctgccacaagtgctctggagaggggcctgggcctgactgagcccctaacaggcagcggtgggcgcacttgccctgaccacataagcaccatcgcccctttccaacacctgatgccctcagcatttcaaagcactggaatcaaactgaaccaagcctggaccagcctattcaggaccagcgcagggctctccagcaatcttggcagcactaacttagcggcatcgctggggtcgtgggcttgggaagaccattcctggaggtcgcctgggcatttccacctgccttctgggggacatcgaaggccgagcccgggccccagctccctggggtcatacaagactgtgcacgtggccttggcttccctggcatgccacagccccgggagggcgctaaagggggactggccaggcacaagctcccgctcggtggcactgaccaggacaggacttgctcaggcctggagagtggcaccagccagccagcattggaagtagttcggttttgctttctgtttgcttttcacttttgttttgtggcttggagcaggtagatgggtgatgtggccccaggttaagatggtggtgatccctaccctgtacatcatcccatatgtgccttgtgagccagagaccctggggatccaggggcctcagaccttccgacggggcagcgtgttagaggtggctctggtgcaatcaccctgtctccccagcagcagcaaatagtgactgttttgttattcactgttaacatctcatggctggccaaagagaaagtgagtgtataacaagctcaggggtggccctcagatcagctgggatctgcttggcccaggccagatgctccacagacagacgaaaaagaaactgtttcccctggaaatacccccatggtccagtcagctagagagcacaggcctggcaaggagggcaatgggttcagggtttgaccaggagagaggcactgaagtgagaaagccaggggctgggccagggccctctgcactggggagatgatgccatttccccatcgccacggttttgttttcattatgttaaaatacacagctcagtgccattagggacatttacagtgttgtgcagccgccaccgtccatctccagaactcttcccttttcccaaactggaactctgtccccatggaacagcaactccacatcccctccctcagcccctggtgctcaccctctacttctgtctctttggattttactactccagggaccctacatgagtggagtcacacagtgtttgtcctgtgtctggcttatttcgctgatcacggtgtcctcaggtctatccatgttgcagcctgtgtcaggacctcctgcctttttaatggccaaatcatattccatggatggatgggccctgatctgtctattcttccatggaagaattctcatcacctttgcgttatctttgtagcccacatttctcttcagtaaatccctgatgatgatgtcattgtctgctcctctgccccagctctgctaacagaagccacagaggcttcttcctcagctcctcagaatccagacccagaggtcggtgtgggcctgaggggtacggcgtgtgtccctttcccccagggagtgtggcccgggaggctttcttggtgcctgctctgatgatcacccatggcgggtgggctggggtgctggccttgtggcctcccatgacacccgtgacagtgaccacaggtgctggcttgccttccttctaatgagggtgctatccaggggtggctttcaaagagtgaagggcaggcacctacctcagctcatgccccagtcagctgctcctcaggtggctgaggagggcctgttcccaggaatgatactgcagacaaatataaaggccattgttcccctaggtctctgcctggggaggttgaaactccggaagctgcccaaagtggctgtgcttatgagcgcggccttgaagcccaaggatatgcaattttttttttttttttttgagatggagtcttgccctgtcgctaggctggagtgcagtggtgtcatcttggcccactgcaacctccgactccctggttcaagcgattcttctgcctcagcgtcccaagtagctgggattacaggcacatgccaccacacccagatagtttttgtatttttagtagagatggggtttcaccatgttggccaggatggtctcgatctcctgaccttgtgatccacccgcctcagcctccaaaagtgctgggattacagtcatgagccaccgtgcctgcccggatatgtgaatattttatctagcagtgaatgaaggtgtggggtgcccagcaaggagctctaggggtctcagttatgaggacacagcaggaaaaggacagacgagaatggcagcatgtgcatggtcagtgctgcccaaaggcagggcaggcaggaggatggggtgggatggtgggggtcccagcaggctggggggcagggcacctgcccgcctagcacagttgggcgcagcaagctgaggggccagaagaaaactaaagggtgtggtgattccagcaaacccaaggtcagatttcagagcagaaagttgtcacttggagagcagcaagcatctgtcctgttgatgtagtctaggagatgctgtcacatcacctgatactctggagtctttctgagataggttggcatcccatttaccctgtaacacccaaaacttcttatgtcctgttctctacctgggcgttgtgcgtgggctgggaacgggaaaactcgggcagagcagagacacagagggggcgcctgctagagactgcgtgaggagcccactaggagaaccgtgggatgccgggcaagtctgcactgctgcgctctgaagtcagccacagacacatgggtttccaagcgaagctccctccccatgtgatggaggtcacagtcgccctccctgtcatgcctcctttcaccctcccagctgggtcaggtccccagtcagaggcagaggtgagcacagtcttgggaagcaacctgcggtccacccccaccgctcagccccgcctttacagctgcgtgcgcttcagccctgggagggctgattctcacagagctcgagctccttggtggtcctgggactcagctctcctgggtgccggtcaggacccccatcgcagtcccgtgtgcatttgggaaccaagtccttggggcttgagtgtaaatggtccttctgtaagaaagctgattctggcaccaacagagaggctgcctcagatgaagagtgttagcacccgaagggacccccaggcctgtcctgaccctcccacccctgctgtcggcccaacttgtgtccctttcctggaagaactgcttccggcggccagtgtgctatgcttcctcctggctctgccctgcacccccagaacagcccctgggcttacgggagacactagtctctgggcttctgcagccaatcaagctgctgggccctccctcccaagcactggaggaggtactcgttctgtgggccggggcccctccctcctgagcactggaggaggcacttgttctgtgggccacggcccctccttccccagcactggaggaggcactggttgtgtgggccctggctcctccatgtctgagggaactgctctgcttctcctacagtccctgagattctgcagctcagcgatgccctgcgggacaacatcctgcccgagcttggggtgcggtttgaagaccacgaaggtgggtgagcccttgctgtttgctacaaagttaccaggagcttggagaggtgtcacaaggagagctcccggggctgggctgaggctcatgcttcatgattgctgatgcagaatcccaaagtggcagccccatgggtcccccggcgccattcccacgctggccagcctggcaggggcaggggagcaccccgtagctccttcccactgctgcgtgtggtggtgtcacctcccctgcgcatcatctcccctaggggcctggctgcccgctgcccctgttgctaccgcctttgaagctctcagctgaggaaccagcctgtatcctgtacactgtcaacagattgcatgcttgttctcccacttcgtggaggtctttttgttccacagaaagttaatttttttgttttttattttcaatttttatttatttgtttattgagacagagtttcgctctgtcgcccaggccggagtacagtggcgcgatctcggctcattgcaacctctgcctcccgggttcaagcgattctcctgcctcagcctcccgagtagctgggattacagacgcccatcaccacgctcggctaatttttgtatctttagtagagacggggtttcactgtgttgaccaggctagtgtcgaactcctgacctcaagtaatctgcccacctcggcctcctaaagtggcatgagccacatgcccagccttagtttcagtttttatggatacataatagttgtacatatttatgggctatgtgtgatatttggatacatgcgtatgaggtactatgatcaaatctaggtaactgagatgtccatcacctcaagcatttatcatttctttgtgttacgaaccctccaattccactcttccactctgcccctggtaattttaaatctcagatgtcatgtcctattttcctactcctggctggcaagaccttcctaccttctcgttacaaaatgttctcgccaggtgtggtggctcatacctgtatcctagcactttgggaggctgaggtgggtggattacctgagctcaggagttcgagaccagcctaggcaacatggtgaaaccccgtctccactaaaatacaaaacattagctgggtgtgggctccttgggcagctgagacacgagaattgcttgaacccgataggcaaaggttgcagtgaactgagatcgtgccactgcactccagcctggatgacagagcaagactctgtctcaaaaaaaaaaaaaaaaaaatcacacacacacaaaccaaaatgttctcctgtgcttcactgctgctatggaggtttttgtttgtttttctcctgtgggccctcgctctgactgggcagcaccgcatggtctgggcagggcagggcagggcagggctggccccgcagtggggacggcccacagagcccagactcttctcacacgcagtttattttgcaggactgcccacagtggtgaaactggtagacagaaacaccttattaaaagagagagaagaaaagagacgggtgagtaaagtgaaaatgacttaagcgtgatatttgttgaaaatgtaaaaaccattgcgattattacatagtttactttttaagcattgatgtttacacttttattaaaatcccagtatttataaatgtcagaaagaaaaattaactagtatcttctaatgaaggacctcttttaaaaagattattccctcagtttaagtgaaaaccagtcacttttggcaaactgtgaagctgacttttttttttttttttttttttgagacggagtctcactctgttgctcagactggagtgcagtggcacgatcttggctcactgcaacctccacttccctggttcaagggattctcctgcctcagcctcccaagtagctgggactacaggcacgcaccactgtgcccagctaatttttgtatttttttagtagagatggggtttcaccatgttggtcaggctggtctcaatctcctgacctcgtgatccacccaccttggcctcccaaagtgctgggattacaggcttgagccaccacgcctggcccgaagctgacatgttaagatcccagtcccaccgtgccctcacctgagtggcgcgtgtcactgatgcatctccacctcctattcccagcatactccccacctgcaccccacaacgcccccaggatcagggatggcccaagttcctcggtgcccaataggacagaagaacaggaacaaaaacgcaatgtcagaatctctgggcacagcgcatggggtaccctgggatgcaggcagcaggatgagaggcacctgggcccccagtgcacaccatgggaggtgggccatgggggctgttgccaccagcaggtgggtccccaagaggcttaaagcaggagaccaccgtggagggcgagtttggatgccacagctctcaggaaggaggctctgggaggaactgaggaaggagaatcgacagggtggttgattgatagatgggatgtacaaggtcagggaaggcatctatgcctagccctgcactggcccaaggcacgaggggagagctcatgccagatccaagtgtgggtggctggagtttgcagtgctttggaggaataacgaactggaactctggggaaagctctagacagtggtgagtggtctgcaggtccatcctggttggcaggttgggaagagctgggcttgccctgtgaggttggctggtgtgactgcctcatcagggcccctccccattccatcacagtcactcacctagccttgggtctcgcctgccgtgctgtgctgtgaggtggcctggtgctggctgtgcagacgccctggcttgctgcactccctggcagagtgctcagaagcaggaaacagacaagaggagcgccagggtggcccggccagagcctcacaggccttgcactctttgtgctggcctttccactggccaccttggctgtggcctgtgacttctagtagctcctgtttcccaaccaagggactcttacctcaccaagctgctgcaagaaggcatccccaggcccgaggcaccatgggggaggggtcctgcctctccctgtaccattcccaccagcacataaacacatactaacttttaaagggaaaaagcagaaatcctgagcactgtgtctctggttcctccaagctcagtgcccagctcctcccccacctcagcccctttccctcggccagccctgctctccctccatctatctcgaaagagctcgatcctgttggccccagccccatcctgagtctctgagacctttgtgccttcctggtttcttttccctagctctgtgtgtggcgcctccccaggagaccttatctggtcctgcggcttctccaccatctatcttgtagccggtggcccaaaaacagtttgcccagctgcctacctgatagctccactgggccaggaagcctctgatatctaggctgtccaaagtaaatgtgattttcaactccccaaacttgttcctccttcctgccatggagggcgtgcctacctgatagctccactgggctgggaagcatctgaaacctaggctgtccaaaggaaaggtgaaaatgtgattttcaactccccaaacttgctccttttccgtcagtggagggcatgtctgttcgtgcaatggctcaggccagaacctcccaaagcaaccgagggcttccctcaccggcacccagcctgctggctccactaataagctctccctgcagcatcagactgtcctcgcccctgcccgggtgctgcctgctggttggagtgggctctggtctcctcacctagcccccaaggctgccctccgcccaccatccccatcctgccctggcgctcttgctccttcccaggtaccccaagacccactcaggataaccctcacagtgctgtcctggtcattgccttacagatcctctctccttgggccaggctcaccatgctggtccatttcttcatgttagtggtgcctggatcttttagcattggttctgtttgtctgcctgctgcatacctttgcatctagggcagggccaggcacccaggggtgccgctgaggatccccaaagggaatggaagagggtcggtgtgctgcccggcacatgggcttgtctccccacagtggggagggcctggtcagagttcagccctccatgccaggccctaggagaggggcttgtttggctagacctctcactccgagagacccagcagcctgaggcagccctgtctcatctggctctgtattgaccctccaggttgaagaggagaagaggaagaagaaagaggaggcggcccggaggaaacaggaacaagaagtaatgcattttgtttgggggtgagggctctactgggcaggagtgcaccctgaccccatgccctgtggctctctgtgcctccgtggaccttagccaggcccctgcagaccctcacagaaggagctccgctttctgcctccaccacccaaggcctgccaggcccttctcacatggggtgcagggaaggcctggccaaggggaaggctgtgccatgtggtcacaagctccaagacagcgtttatagacttactactattaggttttctagtaagctttccactattcctgtagaaataacatctggtttaattttaaattccttgtatgttccctccaccttggctttccccttcccatctttcatagcactctgaatctgagggcttggaagcaagttgagggctggaggtatgagcagatgtcgttcacagtgcggagccccaggtgctgctcgggggcagtgactgtgccgtgttgcgtgttctaggcagcaaagctggccaagatgaagattccccccagtgagatgttcttgtcagaaaccgacaaatactccaagtttgatgaaaatgtaagcatgtaagcatccttctcttctattcagaacttgatcagaccacattaaagtgggaggacaggaattttcaaccttggacaagcagattttctgtctgtagaaaatttggaatcaaatctgacacccgctttaggtccagggcctcctggcccaactactgagctccttccacagcccaggcagctaggcaagcccgtgccagggccccctccactggtgtggtgagctctggtccctagccctgggagttgtggccccgggccaagatccacccaggccctcacaagctggctgaagtgccgtggcgcagataggcctcctacccccagtttcttcctttgtcatagcgattcacagccactgcctccaaacctctaggcccctccctgctggcatttggatgtgtttgctatgtacctttgggccagctgtgtcagaactcagccatgggtaggctctgaggggcacagtgcccctcaccttaggcaggaagcacccccagactctggtcgcccctctcccattcttagctgctggagccagcactgccagatgagtgtgctggctccagagcagtgtggtgactgaatgtccaagcaagaggacatggctgcatcagggagatagacactttgagacgggagggcaaagaaaggggagttggggttacccaggtgcagaggagaccaatagccgctgtgctctgggttttcagggtctgcccacacatgacatggagggcaaagagctcagcaaagggcaagccaagaagctgaagaagctcttcgaggctcaggagaagctctacaaggaatatctgcagatggcccagaatggaagcttccagtgagggggcacaggactgactttttaaaccattgtggactagtggctgctgtctgcctcagtgacaatgtcccagcgctcctatcatgtttacagtcacccttgggtcctaaattaagagttgtgttcatgtaggttcgtgtcgtcgttggctctgagacattgataataaatttttctcaacagtg

SEQ ID NO: 15495 - DNA, 56516 bp, Homo sapiens; identical to SEQ ID NO: 15491

SEQ ID NO: 15496 - DNA, 32815 bp, Homo sapiens
agttggctactcgccatggacgaagcggatcggcggctcctgcggcggtgccggctgcggctggtggaagagctgcaggtggaccagctctgggacgccctgctgagccgcgagctgttcaggccccatatgatcgaggacatccaggtgcgcccccggccccctgtccccgcgctgcacggccgggtccccacgcccctcgaggaggcgttgtgcgggagcctagccttccctgtggcttcaaacccctcagcggagccaaagaatcccaaacacctcttagtcgggtgttcgctaaagcgattccatgccatactcagtcagcgtacactgttagtgcttgtgtttcttgtgtaaaggaaaaatgtgagacacatcttgagaactttgaataagaaacaattcatgaattggagaacatcagactgaaagagctttagtgttgcaatgacaaaacgtcagaggcaagtatttattgggaaaatgtggaagcaaaataaagaaattatttgattggtttgcagttacaaaattgccttttttttttaaggtctgttaattgactgcttttggctggtcttaagttttatttctctctaacataagcatttatcagatatgacccaagttaaattttgcttatgtttgcagtttaagcaagatttaggtcacttaggatacctgattggttttgtctgctcaggaattcttcatggttggtctccattttaatttacgttaatacttgcgaggaaggaggcgtgtgcgtttttacttttctagcatagaggtttcgggaacccactttggcatcaggctgcctggcagcgtgttcttgggccagtcacttaccctctttgagccacagtttctgggctgtgaaatgggaataagaataatactgtcataaggactaaatgaaataacggatgtgaaactgtagtgctaggcacagagcgggggatcagcgtaccctgccctctttggccagccccttctgtgttcagtttatgttttgttaagaggttttggaaatgaggggacctgatgcagaatggagaataatgaagtcaaacatttgaggttttgtttaaaagcactttcccatctttgtctcatttgaccctcatcacaggcctgtgaggatgcaggagatatttcctaccatgaggtgcagtaggtgtgagtggctggctggatatccctggccagtgccctggcccagggaaagagtctttaaataattgagtatcatatgagtaattattcattaataataaaataagttttgtgccttctgtgtggcccctactggggaacagtaatggtttgaggccacagtccttgccttcaggaatgttcacggggatcacaaactcaaatgcccatggaggaccaatggatgggcgtcatagtggatagcctttgcactgccctccgtctccagctgagtatggccatatcaacaaatggcccagtattgccacatcttacacttattttgaggcagggtctcactcttgcccagcctggagtgcagggatgagatcatggctcactgcgaccttgacctcctgggcttaagtggtcttcctgcctcagcctttagagcagctgggactttaggcacatgccaccatgcctggctaattaaaaaaaattttttttttgtacagataggagtcttgctatgttgcctagatgagtctcaaactcttggcctcaagtgattctcctgcctcagtgttgggattacaggtgtgagccactgtacccggcccagctttcacatcttaaaaaagaagctgaaaatcttgattcctctgtcaaattccctggcttaaaatgttagcaacaaattcagaaattttttaagaaccttgtgggaaccacaggttgccattttgccattcagtatggctgaaaaacaggcaggttttggaaccagttggatctgggctctcatcctggccttgttacatattagcaagttgtaaaaaaccacaaccaatgagccaaacaaacagaaaaaccctatgactcagtttccctgaaattttttaccctaaaaagttgggaagttctaatttaactctataaagttattgagggagaaaaagatgaaacaatgcatttaacacagtgttgacctcctggagtgttcagcaaatgtggagagaaacctaaacaccaccatctatttgcatgtagccaactgttctgctagtgagacttaccttctcagtggcactgtaggtctgtgctgttcccaacagtagccattagccacatgtcgttaaaggtaaatttgaagtaattaaaattaaataaaactaaaaattggtagggtcaagccttacagggcctgtgggtttttctcctcgtgtgcggagatgagagatcgtagaaataaagacacaggagaaagagatagaaaaaaagacagctgggcccgggggaccactaccacctagacgtggagacagggtagtggccccgaatgcctggctgcgctgttattggatataaggcaaggggacagggtaaggagggtgaatcttctaagtgattgataaggtgaagcaagtcacgtgatcataggacagggggcccttcccttttaggtagctgaagcagagagagaaggcagcatatgtcagcgttttcttctatgcacttataagaaagatcaaagactttaagactttcactatttcttctaccgctatctatgaacttcaaacaggaaccaggagtacgggaggaacatgaaagtgggcaaggagcgtgaccatggaagcacagcaccacagggaggggtttaggtctccggatgactgcgggcaggcatggataatatccagcctcccacaagaagctggtggagcagagtgctccctgacgcctccaaggaaaggagactccctttcttttttttttttttttgaggtggtgtcccactttttcgcccaggctggagtgcaatggtacgatctcagctcactgcaacctccaccttccgggttcaagctattttccttttttttttttttttttttgagacggagtctcgctctgtcgcccaggctggagtgcagtgccgcaatctcggctcactgcaagctccgcctcccgggttcatgccattctcctccctcagcctcccgagtagctgggtctacaggcacccgccaccacgcccggctaattttttgtatttttagtagagatggggtttcaccgtgttagccaggatggtctcgatctcctgacctcgtgatctgcccaccttggcctcccaaagtgctgggattacaggcttgagccaccgcgcccagccagggttcaagctgttctgcctcagcctcctgagtagctggaattacaggtgcgcactaccacgcccagctaatttttttgtatttttagtagagacgggtttcaccgtgttggtcaggctggtcttgaactcctaaccttgtgatctgcctgccttggcctcccaaagtgctgggattacaggcgtgagccaccgcgcctggcaggagactccccttcgcggtctgctaagtaatgggtgtctccccagacactggcattaccgcttgaccaaggagccctcaagcggcccttatgcgggcctgacagagggctcacctcttgccttctaggtcacttctcacaatgtcccttcagcacctgaccctatacccgccggttattcctaagttatattagcaatgcaacaaagagtaatattaaaagctaatgattaataatgtttataataatgattgataattgtccatgatcatctctatacctaatttgtattatgactattcttattctaactattttctttattatactgaaacagtttgtggcttcagtctcttgcctcggcacctgggtaatctttcgcccacaaaaattcagttcctcagttgtactacccaagtgcttaatggtcatgtgatatatggttactaaataggacaatacagaccaagaatatttccatcatcacggaaggttctcatagacagtgctgctgtaggatagttgaggacacggtgccatcttatccctgtggatcctgagaacctgtccagtgctgggtatctgaggacaggtggcagataaccagactcttccttcttagtgactgaccccaccatcctgacacctctcaatttttttttttgagacagggtcttgctctgtcacccaggctgaagtgcagtggtgctatcacagctcactgcagccttatctcctgggctcgagccatcctcttgggagcctcagcctcctgagtagctgggactacaggtgcgtgacaccatacctggctttttttttgttattttttgtagagacagggtctcactgtgttgtccaggctggtctcgaactgggctcaagctatcctcccacttcagcctcccaaagtgctggaattgcaagcatgagccactgtgcctggcctgcctgtcaaccttgacccttgctctgtcttcacagtccccccagtcagtgcccatgtcctatggaccctctctctttgtatctctgctttgtcctttcacttctctctattctagctgcaccatctttgctgcctcctgatctggctatggctcactcctttccatttttcaccctgacccctggatgactttttgaaaggccatatctgtctctgtcactccattcttaaaactctttggtggccgggcatggtagctcacgcctgtaatcctagcactttgagaggctgaggttggtggatcgcttgaggtcaggagttttgagaccagcctggccaacatggtgaaaccctgtcttaaccaaaaaatacaaacattagccaggcatggtggtgggtgcctgtagtcccagctacctgggaggctgatgtgggagaatcatttgtacccaaaaggtggaggttgcagtgagctgagatggtgccactgcattccagcctgggtgacagagcaagactcctcaaaaaacaaacaaaaaaacaaccgatggctggccacggtggctcatgcctataatcccagcactttgggaggccaaggctggaggatcacttgaggtcagttcaagaccagcctgggcaacatggtgaaaccctgtttctactaaaaataaaaaaaaaattagtcaggtatggtggtgtgtgcctgtaaccccaactactccggaggctgaggcaggataatcgcttgaaccttggagttggaggttgcagtgagctgagattgcaccagtacactctagcctgggtgacagagtgagactccgtctcaagaaaaaaaaaaaaaaacaaaaacaaaaccaaaaaactctttggtggcacctgacaggtctcaggatgaatttcttggcctggccacacaaaggccttgtcccttgccactatctacctcccacctcataagactctgaattcgctattcacttcatgatatcctcagccccatgtgcttccctctgggcacttgtctcttgttgtgtcattgctgatttgtctgattgcattccccattagaaatttgctccttaaggactgagactgtccatggcagcattttcagcacttagcatagtgctgggcatcttttgccctgcaaaataatgaacagatcagcaaaggctggtaaatggcacacagtgcacctgcagctccattgctgcccacgtgcctgattgtttagacttacagtagctgggaaatggggagacaaggtgagagccatataaaagtacgtggataattagtatcctgcctttctttccaaacagcgggcaggctctggatctcggcgggatcaggccaggcagctgatcatagatctggagactcgagggagtcaggctcttcctttgttcatctcctgcttagaggacacaggccaggacatgctggcttcgtttctgcgaactaacaggcaagcagcaaagttgtcgaagccaaccctagaaaaccttaccccagtggtgctcagaccagagattcgcaaaccagaggttctcagaccggaaacacccagaccagtggacattggttctggaggatttggtgatgtcggtaagtagcaagagagtgattggtgggtgggcatgacacgtagtcatttgggactcactatgagtacagctgggtgggctgagattcagaatttaattttagcattgtctttctgaatgttcatagggatggcaaaattctgggaggttttcaggaggttgaatcttggcagcccctcctctgaaaagcatgtgttgaggtctgttttggatgtcccaggttttttgtttttgtttttgttttttttcctgcctttgagatagcaggccccaggttttgatcaatgtttccagagccatctattgttttggatttgcctttcagtctgggtgggtagcctggactacctcatgtctgggggcaggagacaggcctcagttgtatctgccccatacaaacagacatctgcaaagtatttacccttaccttcttcgtttatagcaaccttgcaaggcaggtatcattagacccatccttgttgatggagaaactgactgaagctcacggaaattaaacactttgccaaaggtcacacggctacatccaacaaaatgcataaatcccaagagtaagctgggtgatttttacctatgcatacccacaggtaactaacacccatatcatcaagatgaaaacattccggggtcctgtaagaccgttgactctctttccatttcttcccactttccctttcccaaggtaatcaccgttctcatctctatcgccagagatcccttttgcttgtccttaaacttcaatataaatcctatatagtcttatatgctcttgagcctggcttctttcattcatcattgtatctttgaaattcattcatattgttgtacatatcggtagttcattctttttaatttctacatggcattctgaataatccacagtttatttaaccattttcctactgatggacatgtgggttgttttcagttggggctttgttcccatggcagcgtgtggagctctagcacttcctgtttcatgggtgtctggtggaccattgcatggtatcaaagttaataatcataatagtaatggtgaacattattgagtaattgctatttgccaggcaccgttcggagtgcttacataaatgatctaatttaatctctccatctctcttgtaaggcaggtgctttgctgttagaaaaagtgagccacagattgggagatgacttgtgccaaatcacacagctagtgaggagtggagacagggctgcagcccgggcttacctgttctgtctgctctgcagggtagccccatgtgtgctttgtgggacacacctcattgatccgactcatgctggtggacattgtgttgtttctgcagttagccttgcatgtgcgtctagttctgactgcaggatatttctagaaatggaattgtgtgttaaagggtacttgttcctgtccgatagatgctaccaacttatacttcaaaaatatgtcattttagccaggtgtggtggtgtgagcctgtaggacaagctacttgagaggctgaggcaggaggactacatgagcctaggaattcacagccagcctgggtaacttagtgagatcctatctctaagaaaaaagaaattgaaaaattgtgtcttttttttttttttaattgaggcaaggtcttctgtggcccaggctggagtgcagtggcatgatcacggctcactgcatccttgaactcccaggctcaagcgatcctcccactcagcctcccaggtagctgtgtgcgccaccaggcctggctaatttttttgtattttttgtagagacagggtctcaccatgtggcccaggctggtcttgatctcctgggctcaagcaatcctcccatctcggcctcctggatagctgtgcatgttatccctggccattttttttttttttttttaagagggagtctcgctctgtcacccaggctggagtgcagtggcgcaatctcagctcactgcaacctccacctcctgggttcaagcaattatcctgcctcagcctcctgagtagctgggactacaggcagccgccaccatgcctggctaatttttgtatttttagtagagatggggtttcaccatgttgcctaggctgatcttgaactcctggcctcaagtgatccacctgcctcagcctcccaaagtgctgggattaaaggtgtgagccaccactcccagcccatgcctggccaattttaaaattttttgtagagatagggtcttaccgtgttgcccaggctgccctcaaactcctgtgctccagtagtctgcccacctcggcctcccaaagtgctggaattacaggtgtgagccactgcactcggcccaaattgtgtcattttataatctcaccaactgcgagtgaaggtgaccactttcccacattcttgccaacagtgaatattgacattttttcctgtgtgatgggtaaaaagtgctgttttctttcaacaaaaattcaccaaaactcattcatattgttgtgcatatcagtagttcattctttttaatttctagatggcagcagttcctgttctgaataatccacaatttatttaaccattttcctattgatggacatgtgggttgttttcagttggggctttgttcccatggcagcgtgtggagctctagcacttcctgtttcatgggtgcctggtggaccattgcatggtatcagagttaatattcataatagtaatggtgaacattattgagtacttgctgcataatggtgatttttgggcaatccactaaagcagagaaacagacaaacatgataagggtaggaagctgcatttgcttgaagtgtaaggaagaagactggttctggaattggccatgtgcattaccatcctgtaaaggaggcaggcagaatacaaagctcatctgttgttatttggttctgggaaatgtcaacgtgagtcatttaggaccaacagtcagaatttgaaacttcctgtttttttggaaggtgttttatttcctgtttcttgtgaatatttattcctagtaggagcttaattctgaagggtaaataacaacagcaatagtaagatcacttaattttttttactttattattattattttttgagatagggtcttactctgtcacccagggtggagtgcggtggtgtgttttcggctcactgcaacctctgcctcccaggttcaaacaattctctcacctcagcctcccaagtagctgggactacaggtgcaccaccatgcctggctagtttttgtattttttgatagagacaaggtttccccatgttggccaggctggtcttgaactcctgacctcaagtgataaacccgcctcagcctcccaaagtgctgggattataggtatgagccagcacggctggcccaagatcactttaaataatgtgaatatcactttgtagtatacacagtgttttttcaggtcatcaaaaccaccctgtgccgtggtagacatggcaagcccgtctgtcattatatgctacttacaggggaggaaactgggttctgagagcaacagtcacaaagtgagttccagtacagagctaggacttgggcctaggtcttctggcttaatagagcgactgtcccattttccatgagctgctgagagatgtcctttttagatgctgggccttagactccagagtactgcatgggaatgtttcccaaggtaggtttcatggtgacccacaaaggaagagctgtgtattcatatgtatgggaaggtctggctgagcaagaatagggccagcagcagagcctttaataagtgaatacaggaaaggatgctgtaggtcagtgtttcacactggggacgatttttccccgacctccaagggacatttgacaatgtctagagacaaatctggttgttatagctgagggtgggtgggtgctactggcatctagtgggtagacagagatgctgccaaaacccaacagtgtacagagtagctctgcacaataaagaagaatctggcccaaagggttagtgtggtggggctgagtacacacactgcactcatacatattcattgagcatgagtgtcaatgaataataatgtggacacatcagttttattgagttgtcaagtgtgtcgggtattgttctatgtgcctcacatgtattaattgtttgaggtgtcatcacaatcctatgaggttggtagttgctcctattatcctgtaatacagatggggaaatcagaagcccagagactctgagctccttgcccattgtgacacaggtgctaagtgttggagttgggatttgaacccaagtacctcagactcactccatcactgtctcatgaagaacaaatggctcattctctttcttgtccctatatttgtgccattactcattagctcacacaaatgtttactaagtacctgttgggttctaggtgttggggatgcagcttcgaacaaggatgcccagtccttgccttcaggtggagaggggcaggtactcagttcatgcttgcctaatttggtctttattcacggctgtgggtagtgctatgaagctgaacacggtgctttagaggtgcatcattaggggacccaccagagagagtggctttgtctttgtatattcaaaggaaaatgccttttccttcagaatggaaggaactttcttagtttcagacgtgatgccttgtgtgtaactgcttgttccagccagggcctcttgcccgggaggactgggagaactgttggtggctgtgttctcatgattctccagagaaagagaaccaatagggggtgtgtgtatgtgtataaaacagcatcttttgttcaatgctgcatccccaacacctagaactcagcaggtacttagtaaacatttgcatgagctaatgattaatggcacatatacacagacaagaaagagaatgagccgttcgtttttttttttttttttgagacggagtcttgttctgttgcccaggctggagtgcagtggcgcgatctccgcacactgcaagctctgcctcctgggttcacgccattctctcgcctcagcctcccgagtatctgggactacaggcacctgccaccatgcccagctaatttttttgtattttttttagtagagacagggtttcaccatgttaaccagtatggtcttgatctcctgacctcgtgatctgtccgcctcagcctcccaaagtggtgggattacaggcgtgagccactgcacctggccaagccatttgtcctttatgaggcagtgatggagtgagtccgaggtacttggttcaaagcccaactccaacacttagcagctgtgtcacagtggacaagtagttgagtctctgggcctctgttttatatatatacatatacacacatacacacacggatatatatagaaagatatatgcattttttttgtgtgtgtatatatatatatctttatctaaaaacatatttattacaaggaacaggctcatgcaattatggacgctgagaagttccaagatctgccatctgcaagttggagaccaggaaagctggtggtgtagttccagtctgagtctgaaggcctgagatccaggagcaccaatggtagaagtcccattccaaaggcaggagaagactgatgtcccagctcaagtagtgagacagagagagatcaaattctcccattctccactgtttcgttctattcaggcccttgacggattggacgcggcccaccatcctggggagggccatctgctttactctgtctacctattcaaatcccattctcatccccaaaacactctcacaggcaccctgagaaatactgttatatttaaccaaatatttgggtaccctgtgatctagtcaagttgacctgtgaactcaaccatcagtggctttctctgctcatgccttgcctgggttggaacttccttgaaagtagaagttggcttttcagccctacctggcttcttggtctctttgctctggggctggtggctgtgctcacctcccattacaactcagggtctctgagcccccaattcccctctggcaaatggggatgtgtgccagtacttctgtgctgaagggcctgctctgaggagtaaatgaggcagtgtgtggagggacttcacatggggcctcctattgagtgagccttgggtcttgttggtcagctctgcttccttctgtgatttctaaattgccaagggctggggagggccagtcctagggcatcttcccttctgtagggtcccccagttcccctgtttctttctgtgtcctgattgaaaatcacagagtgctttgaccaccctgtgacccagccagctacaggtttttcccagcagacctgagcccaaacctgggccttaaacattctcaggcattgataaaggtatctaggtaggctgggcatggtggctcacgcctgtgatcccagcacttggggaggccaagacggatggatcacttgaggccagtagtttgagaccagcctggccaacatgatgaaaccctgtctctactaaaaatgcaaaaattagctgggcgtggtggtgtgtgcttgtaatcccagctacttgggaggctgaggcaggagaattgtttgaacctgggagacagaggttgcagtgagccaagattgtgccattgtactccagcctgggcgacagagcgggactctgtctgaaaaaaaaaaaaaaattaggtgtggtggtgtagtcctagctacttggatggcttaggagggagggtcacttgagcccagcaggcaaagtttgcaatgagttgagattgtaccactgcactccagcctggacaagagagtgagactccgtctccaaaaacaaaacaaaacaaaaaggtatctaggttatcacccaaaacaactgaaagaaaccagccttggccctgagccaaattccttaaaccctcatataaactccttaccctgacctcttcactttggaccaaacctaggtagacacctgtttttttttctcgcctccgcacctcgaggattgctttggccagatcgccctggcatttattgcttctttctttggaatcccaactggccccatcttaggacagtttggggcactcccttgtgggaactcttctgctgccacttctggggtgattccagcataggttcggagggacgaaaccccttctttcccttgggtggcagagaggatgtgcttgccctcttctgtttgtgttggagacctgggcacatgcccagtgactcaggctggaagactgattcttttgcacacacttagccatgtgtgtttattgtccccatgggagtggccatttcaggagaaactggtctcatgcaccttgtatctgaccatgtcacccaacttgaggggccctgaacatgccatgctcctgcatcctccctgcctttgctcatgccggggcctctgcctggagtgtctcctctccctctttctttgggcaccccttggttgatttgctccctccatgggcacctgtagcccttggcctcttgagagcagtcattttgctttatcaatagatatttctaatttggggaatgagtgaattcctcagtagtggatagtagttatatttttggggtacagcggaattttggaaatgagcaaatgttctcagaatgaagtctgtggatgaataggaattttcagggtaggtaaaaccatttctaactttaaaaatgggatgtgaatgggatgtgagtgcttttctgctgtggcctttaagctggcagaatagttcagacctgttctaagcaaggaatggcactgttattggaacaggagtatgggctccactgcaacttggaggtggccactgtattctccttgtttaaaaaagaaaaaatgtaggccgggcgtggtggctcatgcctgtaatcccagcactttgggagggtgaggcaggtggatcacctgaggtcaggagttcgagaccagcctggctaacatggtgaaaccccatctctactaaaaatacaaaaattagccaagcgtgatgcaggtgcctgtactcccagctacttgggaggctgaggcaggagaatcgcttgaacccaggaggcagaagttgcagcgaggcaagatcgcgccactgcactccagcctgggtgacagagcgagactctgtctcaaaaaaaaagaaaaaacatctcataaccttttaggctggtggccagtcaacttcttgctaacggaaatgaaaactcttttgatgttgatggaaaataatcatctttattcatttattcattctgcaagtatttcctgaggacctgctgtgtgctgggcccctgtggactcgcagacagtgagcatccgctctcctgagcttctctcacctctttctgctctggaatttcttctcaatgagaccacactatttctatactctctggtgtctggcttttttcacgcagcacgttttctttcttttttttttttttgagatggagttttgctcttgttgcccaggctggagtgcaatgacgtgatctcgactcactgcaacctctgcctcccaggttcaagcgattctcctgcctcagcctcccgagtagctgggattacaggcgcctgccccctcgcctggctaatttttctttttttttttttttttttgtatttttagtacagatggggtttcaccacgttggccaggctagtctcgaactcctgacctcaggtgatctgcctcccaaagtgccaggattataggcgtgagccaccgcacctggccttacgcagcacattttcaaggttatcccgcattgcgtgtatcagtgaagcggtgtcactcgtctggggtaaatacccaagattcattgtcttcacagccacggaagactaggacacggacatacagtgaggttcagagtggaagtataataggtgaaagaaagagaagagctctgtctgctgcagagagaggggttccagtgaaatgggttgctgtttctgcaatgaaatgcaaggggttttaaagatgagcctgaggagatggtgtctgatttacaaagggcacaaagattggtcagaccaggtgtttcatttgcataggatgcataaaactggttagggctaggtgtgccatttgcatgtggtgcgaaaagctggccagccccactccaatcttgtgttatgcagatgggttctctacctggccagtgccatgttgcctacttctttactgtcttgtggtaacaaaagggaagatagagcctctttgctgagtatatctggccccctggtagcccttttctattggcacagctgctggcattcactcctgtgagcttccagcttgcttatctatgtctgcagcttgatttttcaggctgctcttttttagaaaagaaatgatttgaggctgggtgcagtggctcacacctgtaatctcaacactttgggaggctgaggtgggtggatcaactgaggtcaagagtttgagactagcctggccaacatggtgaaaccccgtctctactaaaaatacaaaaaaattagccgggcatggtggtgggtgcctgtaattccagctacttgggaggctgagacaggagaattgcttgaatctgggaggtagagtttgcagtgagccaagatagtgccattgcactcctgcctgggcgacaagagtgaaactccgtctcaaaaaagaaaaagaaaaaagaaaaaaaagaaaagaaacgatttggggattttgttaaaagggaaattctgccgaggactgttttaccctcactatctgcctaaataatttctttctgtctcctgtatcatcagtagctcattcctttttaggctgtgtaatgttctcttgtgtggctgtatcacaatttgtatatctaccaaactgttgttagattggttgtttccatgttggggcgtgatgaataaggcctcagggaacattttggccaagtcttttgtgcccgtttgcactccttgctctttgatatatacctaagggtggacttgctgtcagagggtaggtgtgtgtttaactttgttagaaacctctaaacagatctccaaggtggctctcccaccagcagagtctgagggtctgagttctcgctgctccgttcttggggggctgtcctcacagagccccttgcccctcctctgctgtaacccaacattcatgtttctctctttctctgcctcttcaggtgctcttgagagtttgaggggaaatgcagatttggtgagtctccatgaaatttgggccagtagctcgggctctgggcccttccctccccacccctcaggtccttccctgcaggtgtgtcaggagcccagggaacccaaccctaggcagtgcagtgggggtctggtctcagcctccctgactccggcccagcgcctgctggggcagattgttcatctctgcgcttcctcatctgcaaagctgacagcagaagcagggcagacctgatgaggggcagtcatcgggatccagaccaagtcgccactctctcattcacaagtatttattgtgtggctcccatgctctgtgctggggccacctgggaaggagccatcagtcagttaggcgagagagaagttagacaaatgagtatataaatagaaatagtgataagtaccatcaacaaaagaacaggctgccttgagagaattacaaggggactgagcctggggagagggcagccttgggtgcctccaggtggcctgggcatggttctgctgacagagttctcaggtacaccccggcctaggtgacccgtgaggtcctttgggatgaatgctcatggctgttggatttccaggttaccagctcccttcccttaataccaagatgggggggtcaccttctagtgctagtcttccctgcagttgcttctcttttgccctggaatgccgggtggagaccctgctactccttgtgcgagagggcagaccccgttttcttcccgcctctccagactgtcctctagggagcgtggggagagcccgggtttacgtgggtccctgtgctggcaggcttacatcctgagcatggagccctgtggccactgcctcattatcaacaatgtgaacttctgccgtgagtccgggctccgcacccgcactggctccaacatcgactgtgagaagttgcggcgtcgcttctcctcgctgcatttcatggtggaggtgaagggcgacctgactgccaaggtacactcactatctgtggagggagacagggtggggggcagtgggtggggaagtatcttttgagggactccaaaagccagctgactccccaggcgagcccttacatctggaggaccatgggaggtaggacggcccagcggctacaggttcaagttcagacgcagaagtccgggtttgaggactggctctctcggccacctgctgtgtgacctcctgtgcctcagtttccttgtctggaaagcaggaatagtacctgcctccttgggttgttttgggggttagatgaacagtgcccaagcgtagcaccttctccccaaaaatggtggctattacgactgctgggactgtcagcacttcggtactggccctgggaaaccgagaaagtgctctgcccaggcgtttgggttgggccctttgttgttttattttttggggggggcgggggcacagagtcccactctgtcatccaggctggagtacagtggcgcgatctcggctcactgcaacctccacctcccaggttcaagcaattctcctgcctcagcctcctgagtagctgggattacaggtgtgtgccaccatgcctggctaaatttttttttttgtatttttagtagagacggggtttcaccatgttggccaggctggtctcgaactcgtgacctcaaatgatccacctgccttggcctcccaaagtgctgggattacaggcgtgaaccaccatgcctggccaggctgggcccttttattgttaggaacggtccagtctgcatctagacctatccgtgcttctggctcacctgcagccctctcttgtagaaaatggtgctggctttgctggagctggcgcagcaggaccacggtgctctggactgctgcgtggtggtcattctctctcacggctgtcaggtaggaagcctcccactgttccctgggcaggcattgggtactggccgtgccaagaggctgtgcaggggccatgtcccttcttgtgtccaaaacacccttggctttgtggaaaagggctgtggggccctgcccacctcctgttgttttcttgggagccatgtggtcctctgaggagttggctgcaccgtcctgggcaggtcggtgttcctgggagaagccctctgggagagggagggcagagaccaggtctgctcacgaagctcctgcacccagagtttgttcagaggcgggtacagcacacatgttgtctcagctcctgtctctgtcctgtgaggcactgccccaggccccttgctgctggtgggactcaggacaccaggcccactgggggcttggccccttacgtatttgtcactgtgattaagcccttaccccttactgggcctcagtttcctcatcttttaagttgaggagttggacagatcacagttataagctggggcctggagtccccctgtggtctgcacggtgttttgaaaactggcaaatttcacataaaaatcaggatttctagtttctcttgacaaaccgcaaaggtctggcctgacgaggccagcatcttcagccagtaaaactccagcctgtggctgggcagggctttccctttggtcctttctctcataatatggtccctagagctcatgaagaatgtggactcccaggccctaccctggacctcttcattccaagtccgcccagcaacaaggtttccaggtgatttccatgcccttgaggtctgagctgaactgatttaaagcagccactctcagcgttgagctgcctcagtcagaggggcctggaggaccatactgctgattaggaggtctgggtggggcccaggaatcacatttcttacaagttcccaagcgatattgatgccgctgctgcaggggccaaactttgagaaccactggtctagaggccgcagccagcactctccaggcacactggcccctagaggcacatgagtttgacatgcaaccccttgctgtcaaggtgtctttccagatgctgaccagggtctttccagaaccaacctgctctgtctcaatcagcctcgtgcccctggctttgaccttccaaatccttggctcccacaaaacctctgaacaggctgttggattcctactccaacttcttggttttgtaaccagggttcttggtcttctaggccagccacctgcagttcccaggggctgtctacggcacagatggatgccctgtgtcggtcgagaagattgtgaacatcttcaatgggaccagctgccccagcctgggagggaagcccaagctctttttcatccaggcctgtggtgggggtaagcagctcctcagcctccctctgggtgggtctggtggggagggagccgccacctgcttctttctccagcctgcccctcacagggcccatgaggtctctccaggcagtcagagggtaccacacatggtccctttttggcagcacctctgtctggctggagcaggccctgctctgtctgctttgtagaggtcagagtcttctgtttcatggcacagtggcatcatgggctcaagtaactttggcagcttcaattccaaagacttggcaaaaagaaagcagaagagagaggagaaacctctttttatttttcttgtcaccattctcctgacctccatcaactagaccccgtttccactatcccagagaaagggtggccacagctaaactgcatggagaaaccaaagaatttaaatattggaattttcaaaagtgtagttgtgggggttcgaggaacatttaaagattacttgggctgggtgcagtgtctcatgcccaacactttgggaggccgaggcaggaggattgcttgagccaggagttcgagaccagcctgggcaacacagcgagaccctgtctctatttttgttttgttttttaaatgtattacttggattctttgtagttttgctgtatgctctaattttaaacttaactcctattacagtgttatctgattttcttataaaaaaagagggaagagagacaaacatggggttcctagtttgtgggtcatgacaggaatatcagggagcgctagaaattctgtcccagggagtcccctctgccctaggctctccacggactggaacattcagaaggtatatcagttccttgcctccagcctgatctgccagagaagtgagcactgttataccatagcgctgtccagctcgtccagctgtgacatgggcacctgtggtctatttctcctgtgcacatccaactgccccatccctattccacgttggtggagttgggtggaggctacctaggagagcagtctctggtcacatcattcatccagtaagtgtttattgagcaccatctgtatataccaggctgtgcgttaggtgctggggataggggaaaaacagagtttcagtctcctggaatttataatttgacatgaactgtattaagtcactgtcatgacccatgcccataacttgaccacaagtgattgagaacacttgattaaccctggatgggctactgacctatctatcacacagccctgggccagttcatctctagacagctcagcaaatggggaaaataacagaacccactcccaagctcaggtgatcctcccacctcagcctcctgagtagctggggctacaggtgcacactaccatgcccagctaatttttctattttttttttgtagagacagggttttgccatgttgcccaggctggtcttgaactcctgggttcaagcaatctgctcacttcggcctcccaaagtgctgggattacaggcgtgagccactgtgcccaggcaactttaataatatttaatgcactaattggtgtgtgtacagtgattggttcattttaataactgaaaacccagcctgccccccgctcccaccccggaggacccagtgtcacataagagtcccccaccccgctgtcgccagcagagttccctcaggacaacagtaacaggaagtgaggaaggctgccactctcggggctgtagaaaccctgctctgcctcacctcctgtcttatccacagtgtgtggtccagcaatgctcttccttcggagcctccggtccctctttctcctatgaatcaaatgaaagacagaaagggcaggggaattaggaatgcaggctgagcaggcatacctactttctggacagttagtcagtcttgtgctcctcccatgccccatccagtctcagtctcaacagcagggagggcctttgtcacgtgaatatctgctgtcactcttaggactcagtagcagggcttccaaggcctttggtgacctggcccctgccacttcaccttccccagcctggcatgctccgagtccccagcacggcccagccttcccaggatgtccaggctcttgcttgctcttctacctgctcccctggctaactctttttttaaaattcatttttacttattttgttttagagatgggggtctcactatattgcccaggctagtcttgaactgttgggttcaagtgatactcccacctccgcctcccaaagtgctgggataacaggcatgagccaccgtgcctggcacctggctgactcttaatcatccatccttctggttacaatttattgtcacttccctaaacaccccctttcttggccaaagtcagggttagctggcctttgtgctcctgcagcctctgtccctcccctaccatagcactgtctcattgtattgagatgggcttatcccctggtcagctctgaggggagggccaggcctaccctgcagccaggcccccagcctggcacagagcccacagtctggttgcgtctcatgtggattctaatttgaatgtaaaggagaaccatacaaaagcatctgtggtggttcacgcctgtaatcccaacagtttgggaggccaaggtgggaggatctcttgagacgaggagtttgagaccagtctctatcataaaatttaaaacattagccaggcctggtggtgtgtgcctatggtcccagctacttgggatgtttaggcaggaagatcgcttgagccctggaggtcgaggctacagtgagccatgtttacactattgcactccggcctgagtgacagagccagtctgtcacctgtctctaaaaaaataaaaaataaaaaaaaaatatgagccaaatttggcataatgtagatttccatcattaaaacaaaactcacagaaaacagcaagatttcaaagccagcatgcagtgattaagatatccctttggagtcgggtccttgctttgcctccgcaggctgcgtgacctggtgcttaacgcagttaccacatggtggcgccacgtcagctgagagcagaaatagaaaggtccccgttcttcactagtgcctggcgaggggtctgtttacatgcatcagaacacctgtcctgggttttgaggactcttgtattgctattttataactcactataatactttaaaaatatttaatttaaaaatcatttaataattaatttaaatataataataaataatttaaaaatcatttttaaataataattttaaaaccctccaacatgtcatccacccattcattaggaggtaacagcaccagggctgaaaaatgtgcattaaagtcgataactttggtgtgcaacgtcagcgtgataggcaaccaagtagccacctctctgaggctgagccgtcaattttggggtgacccctctttgggatttgagagatcgggctgagaagacagaaagcaatgacaatatgctgcagtggtcgtggattttctgtgcggagggaacatctcctcctactgtatatttattcttgtggggaatgagtcctgccctacggggagttttgcattaatgaggctctctaagaaccgaggctctccaagaaccaagccatgcatacagtgcagaacaccctaggcaaggccttcacatcagatttgtgggctgaggctgacacgtgaacggagctgccttagcgccccgcctgaccccctctttcctttcccccacaccccctgctctgatctgctgtctcttctcagcctctctgctcaccctgtctcttctggccattcttaacggcatcccccacttaggcatccctccgcccccacaggctgccaggcagacccagcaccatcacattcacgcctcaggcctccttgctgtgctgtttcacgtcattcccagacacctggggcagattccggagtctctaccaagaaaacaaccagaagcaatgaaccacaaaatctggagaaaaacatggctgtcacagatcaaagaggcccccctttggaggctgggggcctccgtgagaagcagtgggatagttgagaggcaaaaaacatggggcagaattccgcgcccctcatatcagctgggagaatgccaatgaccagtggtttctgagctttagctgtgtggggtaagaggtcaatagattttggtgttactattatggggttgccagagccacctctgttcctgccagatgggcccccagctcctctgggtgaactgtgacttccctcagtcacatagatccagccatgcaaacctgcctgcgttgcggccacagcacttgctgtctctctcaccaggaccgttctccctgatggcatcagggcctggatcacagtcacattctccaggagtgtttttgcaggggaccctctggatcactcctactccaacttcagcctatttttaaaaaaatttctctttttttttctgcagtatgtatacatagttaaatatatatttatattttttaaccaaagctcttgttagatgccttctttcctgagtagccctctgtgctccgccttaccccacccaccatgagccctactgcagaagacctcatcccggaagacctccgtcagtgtctccacttcagtagctctgtagctgagccatgtggggcacaagtcctgccaggacctctctgttttccaagcttggcactgcctttggggagtctagattttaaaatggaaaagacaaaaaatatggcaacctaaaaaagaaaataattcagaatgttataagctaatacagccatctcatttttgcatcttccttttggattccagcccatgagcacagtctgcttttctcagctaacgttatcccttaagcagttccccagatctccatggccttcatcatcactagctcaaatggctttataatgggccattttcatgacatgcactaatttactaaaccattttcctaatgtcggccatttaggtgatatctaatttttggctcacacaaccacaggtgtcttcatatagaaagcttttgactgcatttgaattattttcttaggaaattactggattagaaggtgtaaacatctccatggatttcattatccatgacttggtgtctatttggtatttttctgatggcttctttgattctagaaaaggatttgccatagtgcaagaagtacaaatgataacactaggacaaaatagagagggaacacaaggagagaagaaaagtaaaagtttggattccaaaaatacatcctaggatgtcctgcagctttctacagttctctaatgtacaagtgaattaaaaatttaaggtatacaacgactgattttagagataaaatcactttgcagatgtaaagaaacatggaaaaatcccagccattggtaatagtagactcaaaaatgaggtaggtcaaagtcccagtcagcctctgtctggggggaaaccccttaacttatctcagtctcagttgcctaattacataaaatggaatactgatagctacttgctagaggtggcctgcgcattttttacgctttccagccgccattggaaataagatcattggccaggggcggtggctcacgcctgtcatcccagcactttgggaggctgaggcgggcagatcacgaggtcaggagatcaagaccatcctggctaacacagtgaagccccatctctacaaataattagccaggtgtggtggcacacgcctgtagtcccagctacttgggaggctgagacaggagaatcgcttgaacccaggaggcgaagcttgcagtgagccatcgcgccactgcattccagcctggatgacagagcgagactctgtctcaaaaaaaaaaaaaaaaaaaaaaaaagatcactttcaagatccatggaatctggtgttctatagttctatatctggtatttgcaagacagaagtcaggaatagagactccagacacatttcttcccttggttgtcttaaaggggacactgtgatcttgacagcctgagtaaagggtttgagtgagtgcctatgatatagtggacagtttcctcaactatatttctaaaaaaagacaagttttatgtctttttaaaaattgtggcaaaatacatataacataaaatttactatcttaaccatttttttggggtgattgcttgagctcaggagtttgaggctggagcgagttaagatcatgccacttcaatctgggcaacagagcaaaagtgtgtctcttaaaaaaaaaaatgcctgtaatcccagcactttgggaggccaaggcaggcagattgcttgagcccaggagtttgagaccagcccgggcaacatggcaagatcctgtctctacaaaaaatacaaaaattaactgggtgtggtggcacctgtagtcccagctacttgagaggctgaggtgggggatcacttgagcctggcaggtcaaggctgcagtgagctgtgattgcaccactgcactccagcctgggtgacagaatgagactctctcaaaaaacaaaaacaaaaacaaaaaacaatcccccaaaacaaaacaaaaaaccactgccctctccccactgaatggtcctgccacccttttcaaaattcatttgaccacgcatgtgagggtgtatgtctgggctctattcaatgacattgacctatgtctgtctttatgccagtaccatactgttttgattactgtagctttgtagtaagttttgaaatcaggaagtgtgagtcctccaattttgctctttttccagattgttttgtctatttggggtcccttgagattctcgtgtgaattttaggatagattttctatttctgcaaaaaacatcattggggttttgatagggattacatttaatctatggattgctttgggtagtattgagatctttaagttttctaatccatgaacataggatatatttccatttatttatatcttttttttttttttcttgagacagagtctcgctctgttgtcagactggaggactgtggcgccatctcggctcactgcaacctctgactccctggttcaagcaattctcctgcttcagcctcctgagtagctgggattacaggcacacgccaccacgcccagctaatttttatatttttagtagagacggggtttcaccatgttggctaggatggtctcaatctcctgacctagtgatccaccagcctcggtctcccaaagtgctgggattacaggcgtgagccactgtgcctggcctatgtcttctttatttttctttctttctttctttcttttttttttttttttttagatggagtcctgctctgttgcccaggctggagtgcaatggcacgatcttgactcactgcaacctccgcctcctggattcaagtgattttcctgcctcagcctcccaagtagctgggattacaggtgcccaccaccacgcctgggtaatttttgtattttttaatagagacggggttttaccatgttggccaggcttgtttcaaactcctgacctcaggtgatctgcctgccttggcctcccaaagtgctgggattacaggtgtgagccactgtgcccggctctttttcttttttgagactgggtcttgctttgtcacccaggctgaagtgcagtggcgcgatcactgcacactgcagcctcaactgcttggactcaagtggttctcccacctcagcctcacgagtagctgggaccacaggcacatgccaccacacctggctaaattttttattatgtgtagagatgaggttttgctggtctggaactcctgggctcaagggatcctcctgcctcagcctcccaaagtgttgagattacaggcgtgagccatggcatccagccttctttctttcagcaatgttttgtagttttcattttacaagtctttcatcttggttaagttaatttctaactattttattatttttgatgctattgtcaatggaaccatttttgtaatttctttttctgattgttcattgttagtgtatagaaatggaagtattttttgtggttggcttcgtatcctgctaatatgctaattttatttgttctaatagtgtttcatctttagggttttctgcatataaaatcataccatttgtgagtagagataattttactccttctttccaatttgaatgtcttttatttctttttcttgcctccttgctctattaacttctagtaatgtgttgaatagaagtggcaaaagcagaaattcttgccttcttcctgatcttatagaaaaaggtttcagtctttcaccattgagtataatgtttgctgtgggtttttcatatatggcttttactatgttgaggtagtttccttctattctgagtttgttgactgtttttatcatgaaagcttgttgaattttgtcatgtgcttttttctgcatcaattgagatgatgatgtagggtttttttcattctcttatgaaccccaaaaatctgagacaggtctcagtcaatttaagaagtttcttttgccaaagttaaggatgcacgcccaggagacaggtctatgcctttctctgaacatgaattttagggttccaaatttaaaggggaaagggcaggatattgagaagtacacagttttcaggtaagagcagggtagggggaaatagtcattcaagcatttgtctggctcagtgaatttgcatttttacgtaaggtaacatagggcaggggaaaatgcagggaacctgcatttttacgtaagataacaaagacaaatggggcaggggaataatcagatatgcatttgtgccaggtgggcagaggggtgatgcctctgtaaagataagctatccatttacattgccgtggtgaattttatcagacaactatcttggagctcaccaggaatttccttgtgggcaaaatatgggagaggtgtgtagcttttcatcttgtagccatcttatttaggaaccaaaacggggaggcaggtttgcgtgacccagttcccagcttgacttttccgtttggcttaatgagtttggggtcccaagatttattttcctttcacactgttaatgtagtatattgcaccgactttcatatgttgaaccatccttgtctgtgtatttcaatgacaagaggtgtttgtttctgcttcctgcagagcagaaagaccatgggtttgaggtggcctccacttcccctgaagacgagtcccctggcagtaaccccgagccagatgccaccccgttccaggaaggtttgaggaccttcgaccagctggacgccatatctagtttgcccacacccagtgacatctttgtgtcctactctactttcccaggtgagcacatcagaagggctcgtcctcgcagccagtgggtcttcccgtctgccctagaggcagctgtgtggtgagagaaaagaccagggtatgagtcctggttctgtcttttgcccctctgtgaccctgagcaagttacttctctctgagcctcggctcaggctgagcgggcaaggatgcgcgctgcaaggaggcctgcgcccttgggttcctatgcctcacttgcctctcctctgcctgaccctgcctctgccttcgcatctttagcaggggaataggaatcgtgcctcaggggtttccatgggaattaaacaaggtggctggcacgtcactgagcacagtgcggggcacgtagtagttgcagcaagcggtagtttccttccttcttttttttttttttttttttttttgagatggaatctcgctctgttgcccaggctggagtgcagtggcgcgatcttgggtcactgcaagctctgcatcccgggttcacaccattctcctgcctcagcctcccaagtagctgggactacaagcacctgccaccacgcctggctaattttttgtatttttagtagagatggggtttcaccgtgttagccacgatggtctcgatctcctgacctcgtgatccacctgcctcggcttcccaaagtgctgggattacaggcgtgagccaccgcgcccagcctttttttttttttttttgagacggagtcttgctttgtcgcccaggctggagttcagtagcatgatctcagctcactgcaacctccacctcccgggttgaagtaattctcctgccttagcctcctaagtagctgggattacaggcatgcatcaccacacccagctaatttttgtatttttagtagacacagggtttcaccatgttggccaggctggtcaagaattcctgacctcaagtgatttgcccacctcggccttccaaaatgctgggattacaggtgtgagccactgtgcctggcagtttccttcctttcttatgtcttggatgagtcacttgacttttccaagccttggtttccttgctgggaaaacaggaattatagccggaatcaggggatggtcatgagggtgaaataagatcatgattagggcagagcctcaggggccaggctgctcctgttggatgtatgtatgagtcaaggtctggagggcgcccgagccagcgtgcatggccagaggggtggtggggagccggcggaggggtggctctccagcagtgttcagccctcctccctccaaaggttttgtttcctggagggaccccaagagtggctcctggtacgttgagaccctggacgacatctttgagcagtgggctcactctgaagacctgcagtccctcctgcttagggtgagtgctgccttcctctgcaaaggagaggggaggctgctgaggggcagcgtgtcctcctggggctggggatttggggtgagcagggcaggcccaaaccaagggtaaaaggtagtagactcctgcctctgagccttggagtcggcacttttgtgtctctttatgagaggcatcctgcctgtggtgacgtttgccctttattcaaagagttgccttccctgtctcctccaaggtccccaggttgacacctcccgctcctccactgatggagctggtcctcagtgccagcgcaggatggctctgtccagaccctgaaggcgggtcatgggcccctccctatatcctgtgggcatcatgtagtcttctactcttgaccctcaagaattgtgaacccctccttgtacatcgccttctcaggaggccccagtgaggaaacagatagggaagggtggcctgataggcccagtcctactccatagaaacccgactcagagcagttgcttcctctgagggtcctgtggccttgtggctgccttgggaggcagcatgtatgggccccagctgctctgctcaggtattcatgccacgagaaggggctgcgaggctggggccactcctggctccttgcaaatatttcagtctgatttgaactttatgaatttggaaattttgaattttgagttttttaaaggtaaagttgaggtgcgtattctttaagccctcctgctcaaagaggctgcagtttgagctgtttttaaggtgcgggttgagtggacattccccccagcccctcttgaattcttccttcagtccagagaactgaactcacagagctctccatggtcatgtcttacaggtcgctaatgctgtttcggtgaaagggatttataaacagatgcctggttgctttaatttcctccggaaaaaacttttctttaaaacatcataaggccagggcccctcaccctgccttatcttgcaccccaaagctttcctgccccaggcctgaaagaggctgaggcctggactttcctgcaactcaaggactttgcagccggcacagggtctgctctttctctgccagtgacagacaggctcttagcagcttccagattgacgacaagtgctgaacagtggaggaagagggacagatgaatgccgtggattgcacgtggcctcttgagcagtggctggtccagggctagtgacttgtgtcccatgatccctgtgttgtctctagagcagggattaacctctgcactactgacatgtggggccaggtcaccctttgctgtgaggctgtcctgtacattgtgggatgttcagcactgtcccttgcctcaatgccagtaacgcgtcttcctgagtggtgccaaacaaaaaggttctcaggtgttgccaaatatgtcctggggtataaaactttcctcgcctgacaaccactggtctgtagggatttttggctacacacaaaccagtatcgctcatagatcagcaaaccggggcctactagagtctgaacagctgtaatctatgaattctaagtgaaattttaaaaattgttaatttttcctatattgcattaattttaaaaaataaatctgaggcaaatatggactctcttttgcctatttcttccctcattttgctccaactctttcttcttccttacaaaagagacttttgcttttttcgaaacatttccccatgtttttctggggtctcgctatgttgcccaggctggtctcaaactcctgggctcaagtgaccctcccaagtagctcttactacaggcgtgcaccattgcacccagccccatttattcatgtcttatttcacttgatccttatcccatcccaggaaggcaacaagggtgagaaccctgtgctcagggaggttaggtctcttgtccaagggaaaacgattatccagagaagagacctggccagaacctgggtcccctgagtcctagccatgcttcccatgtgccttacttgctgaagcacccccggactgcagtgtgaacgtgctgtgcaatagtgacacgctgggcttccccacaaggctccaccctgaggtcttttaagctgtccttatgccagcctatttcttgttttttgggcctttttttttggagatagggtctcactctgtcgcccaggctggagtgcaatgacgcaatcttggcttattgcagtctcgacctcctgggctcaagagatccttccacctcagccacctgagtagcttggactacaggtgtgcaccacctctcccagttaatttttgtatttttagtagagacagagttatgccatgttactcaggctggtcttgaactcctggactcaagcgatcagcctgccttagcctcccaaagtgcaggggttacaggcttgagccattgcgcctgacctatttctggttcttagggccctggatgttaggatggatttctgaattaataataataataaaaccctcatcaaga

SEQ ID NO: 15497 - DNA, 32078 bp, Homo sapiens
gtccggaggcggtggggagcgaagactgacccggggccgtgacgcgggggcaggccctggggcgggggcgggtcctggggactggggcgggcggccgaggcccggaagcggactgaggcggcctggagtcttagttggctactcgccatggacgaagcggatcggcggctcctgcggcggtgccggctgcggctggtggaagagctgcaggtggaccagctctgggacgccctgctgagccgcgagctgttcaggccccatatgatcgaggacatccaggtgcgcccccggccccctgtccccgcgctgcacggccgggtccccacgcccctcgaggaggcgttgtgcgggagcctagccttccctgtggcttcaaacccctcagcggagccaaagaatcccaaacacctcttagtcgggtgttcgctaaagcgattccatgccatactcagtcagcgtacactgttagtgcttgtgtttcttgtgtaaaggaaaaatgtgagacacatcttgagaactttgaataagaaacaattcatgaattggagaacatcagactgaaagagctttagtgttgcaatgacaaaacgtcagaggcaagtatttattgggaaaatgtggaagcaaaataaagaaattatttgattggtttgcagttacaaaattgccttttttttttaaggtctgttaattgactgcttttggctggtcttaagttttatttctctctaacataagcatttatcagatatgacccaagttaaattttgcttatgtttgcagtttaagcaagatttaggtcacttaggatacctgattggttttgtctgctcaggaattcttcatggttggtctccattttaatttacgttaatacttgcgaggaaggaggcgtgtgcgtttttacttttctagcatagaggtttcgggaacccactttggcatcaggctgcctggcagcgtgttcttgggccagtcacttaccctctttgagccacagtttctgggctgtgaaatgggaataagaataatactgtcataaggactaaatgaaataacggatgtgaaactgtagtgctaggcacagagcgggggatcagcgtaccctgccctctttggccagccccttctgtgttcagtttatgttttgttaagaggttttggaaatgaggggacctgatgcagaatggagaataatgaagtcaaacatttgaggttttgtttaaaagcactttcccatctttgtctcatttgaccctcatcacaggcctgtgaggatgcaggagatatttcctaccatgaggtgcagtaggtgtgagtggctggctggatatccctggccagtgccctggcccagggaaagagtctttaaataattgagtatcatatgagtaattattcattaataataaaataagttttgtgccttctgtgtggcccctactggggaacagtaatggtttgaggccacagtccttgccttcaggaatgttcacggggatcacaaactcaaatgcccatggaggaccaatggatgggcgtcatagtggatagcctttgcactgccctccgtctccagctgagtatggccatatcaacaaatggcccagtattgccacatcttacacttattttgaggcagggtctcactcttgcccagcctggagtgcagggatgagatcatggctcactgcgaccttgacctcctgggcttaagtggtcttcctgcctcagcctttagagcagctgggactttaggcacatgccaccatgcctggctaattaaaaaaaattttttttttgtacagataggagtcttgctatgttgcctagatgagtctcaaactcttggcctcaagtgattctcctgcctcagtgttgggattacaggtgtgagccactgtacccggcccagctttcacatcttaaaaaagaagctgaaaatcttgattcctctgtcaaattccctggcttaaaatgttagcaacaaattcagaaattttttaagaaccttgtgggaaccacaggttgccattttgccattcagtatggctgaaaaacaggcaggttttggaaccagttggatctgggctctcatcctggccttgttacatattagcaagttgtaaaaaaccacaaccaatgagccaaacaaacagaaaaaccctatgactcagtttccctgaaattttttaccctaaaaagttgggaagttctaatttaactctataaagttattgagggagaaaaagatgaaacaatgcatttaacacagtgttgacctcctggagtgttcagcaaatgtggagagaaacctaaacaccaccatctatttgcatgtagccaactgttctgctagtgagacttaccttctcagtggcactgtaggtctgtgctgttcccaacagtagccattagccacatgtcgttaaaggtaaatttgaagtaattaaaattaaataaaactaaaaattggtagggtcaagccttacagggcctgtgggtttttctcctcgtgtgcggagatgagagatcgtagaaataaagacacaggagaaagagatagaaaaaaagacagctgggcccgggggaccactaccacctagacgtggagacagggtagtggccccgaatgcctggctgcgctgttattggatataaggcaaggggacagggtaaggagggtgaatcttctaagtgattgataaggtgaagcaagtcacgtgatcataggacagggggcccttcccttttaggtagctgaagcagagagagaaggcagcatatgtcagcgttttcttctatgcacttataagaaagatcaaagactttaagactttcactatttcttctaccgctatctatgaacttcaaacaggaaccaggagtacgggaggaacatgaaagtgggcaaggagcgtgaccatggaagcacagcaccacagggaggggtttaggtctccggatgactgcgggcaggcatggataatatccagcctcccacaagaagctggtggagcagagtgctccctgacgcctccaaggaaaggagactccctttcttttttttttttttttgaggtggtgtcccactttttcgcccaggctggagtgcaatggtacgatctcagctcactgcaacctccaccttccgggttcaagctattttccttttttttttttttttttttgagacggagtctcgctctgtcgcccaggctggagtgcagtgccgcaatctcggctcactgcaagctccgcctcccgggttcatgccattctcctccctcagcctcccgagtagctgggtctacaggcacccgccaccacgcccggctaattttttgtatttttagtagagatggggtttcaccgtgttagccaggatggtctcgatctcctgacctcgtgatctgcccaccttggcctcccaaagtgctgggattacaggcttgagccaccgcgcccagccagggttcaagctgttctgcctcagcctcctgagtagctggaattacaggtgcgcactaccacgcccagctaatttttttgtatttttagtagagacgggtttcaccgtgttggtcaggctggtcttgaactcctaaccttgtgatctgcctgccttggcctcccaaagtgctgggattacaggcgtgagccaccgcgcctggcaggagactccccttcgcggtctgctaagtaatgggtgtctccccagacactggcattaccgcttgaccaaggagccctcaagcggcccttatgcgggcctgacagagggctcacctcttgccttctaggtcacttctcacaatgtcccttcagcacctgaccctatacccgccggttattcctaagttatattagcaatgcaacaaagagtaatattaaaagctaatgattaataatgtttataataatgattgataattgtccatgatcatctctatacctaatttgtattatgactattcttattctaactattttctttattatactgaaacagtttgtggcttcagtctcttgcctcggcacctgggtaatctttcgcccacaaaaattcagttcctcagttgtactacccaagtgcttaatggtcatgtgatatatggttactaaataggacaatacagaccaagaatatttccatcatcacggaaggttctcatagacagtgctgctgtaggatagttgaggacacggtgccatcttatccctgtggatcctgagaacctgtccagtgctgggtatctgaggacaggtggcagataaccagactcttccttcttagtgactgaccccaccatcctgacacctctcaatttttttttttgagacagggtcttgctctgtcacccaggctgaagtgcagtggtgctatcacagctcactgcagccttatctcctgggctcgagccatcctcttgggagcctcagcctcctgagtagctgggactacaggtgcgtgacaccatacctggctttttttttgttattttttgtagagacagggtctcactgtgttgtccaggctggtctcgaactgggctcaagctatcctcccacttcagcctcccaaagtgctggaattgcaagcatgagccactgtgcctggcctgcctgtcaaccttgacccttgctctgtcttcacagtccccccagtcagtgcccatgtcctatggaccctctctctttgtatctctgctttgtcctttcacttctctctattctagctgcaccatctttgctgcctcctgatctggctatggctcactcctttccatttttcaccctgacccctggatgactttttgaaaggccatatctgtctctgtcactccattcttaaaactctttggtggccgggcatggtagctcacgcctgtaatcctagcactttgagaggctgaggttggtggatcgcttgaggtcaggagttttgagaccagcctggccaacatggtgaaaccctgtcttaaccaaaaaatacaaacattagccaggcatggtggtgggtgcctgtagtcccagctacctgggaggctgatgtgggagaatcatttgtacccaaaaggtggaggttgcagtgagctgagatggtgccactgcattccagcctgggtgacagagcaagactcctcaaaaaacaaacaaaaaaacaaccgatggctggccacggtggctcatgcctataatcccagcactttgggaggccaaggctggaggatcacttgaggtcagttcaagaccagcctgggcaacatggtgaaaccctgtttctactaaaaataaaaaaaaaattagtcaggtatggtggtgtgtgcctgtaaccccaactactccggaggctgaggcaggataatcgcttgaaccttggagttggaggttgcagtgagctgagattgcaccagtacactctagcctgggtgacagagtgagactccgtctcaagaaaaaaaaaaaaaaacaaaaacaaaaccaaaaaactctttggtggcacctgacaggtctcaggatgaatttcttggcctggccacacaaaggccttgtcccttgccactatctacctcccacctcataagactctgaattcgctattcacttcatgatatcctcagccccatgtgcttccctctgggcacttgtctcttgttgtgtcattgctgatttgtctgattgcattccccattagaaatttgctccttaaggactgagactgtccatggcagcattttcagcacttagcatagtgctgggcatcttttgccctgcaaaataatgaacagatcagcaaaggctggtaaatggcacacagtgcacctgcagctccattgctgcccacgtgcctgattgtttagacttacagtagctgggaaatggggagacaaggtgagagccatataaaagtacgtggataattagtatcctgcctttctttccaaacagcgggcaggctctggatctcggcgggatcaggccaggcagctgatcatagatctggagactcgagggagtcaggctcttcctttgttcatctcctgcttagaggacacaggccaggacatgctggcttcgtttctgcgaactaacaggcaagcagcaaagttgtcgaagccaaccctagaaaaccttaccccagtggtgctcagaccagagattcgcaaaccagaggttctcagaccggaaacacccagaccagtggacattggttctggaggatttggtgatgtcggtaagtagcaagagagtgattggtgggtgggcatgacacgtagtcatttgggactcactatgagtacagctgggtgggctgagattcagaatttaattttagcattgtctttctgaatgttcatagggatggcaaaattctgggaggttttcaggaggttgaatcttggcagcccctcctctgaaaagcatgtgttgaggtctgttttggatgtcccaggttttttgtttttgtttttgttttttttcctgcctttgagatagcaggccccaggttttgatcaatgtttccagagccatctattgttttggatttgcctttcagtctgggtgggtagcctggactacctcatgtctgggggcaggagacaggcctcagttgtatctgccccatacaaacagacatctgcaaagtatttacccttaccttcttcgtttatagcaaccttgcaaggcaggtatcattagacccatccttgttgatggagaaactgactgaagctcacggaaattaaacactttgccaaaggtcacacggctacatccaacaaaatgcataaatcccaagagtaagctgggtgatttttacctatgcatacccacaggtaactaacacccatatcatcaagatgaaaacattccggggtcctgtaagaccgttgactctctttccatttcttcccactttccctttcccaaggtaatcaccgttctcatctctatcgccagagatcccttttgcttgtccttaaacttcaatataaatcctatatagtcttatatgctcttgagcctggcttctttcattcatcattgtatctttgaaattcattcatattgttgtacatatcggtagttcattctttttaatttctacatggcattctgaataatccacagtttatttaaccattttcctactgatggacatgtgggttgttttcagttggggctttgttcccatggcagcgtgtggagctctagcacttcctgtttcatgggtgtctggtggaccattgcatggtatcaaagttaataatcataatagtaatggtgaacattattgagtaattgctatttgccaggcaccgttcggagtgcttacataaatgatctaatttaatctctccatctctcttgtaaggcaggtgctttgctgttagaaaaagtgagccacagattgggagatgacttgtgccaaatcacacagctagtgaggagtggagacagggctgcagcccgggcttacctgttctgtctgctctgcagggtagccccatgtgtgctttgtgggacacacctcattgatccgactcatgctggtggacattgtgttgtttctgcagttagccttgcatgtgcgtctagttctgactgcaggatatttctagaaatggaattgtgtgttaaagggtacttgttcctgtccgatagatgctaccaacttatacttcaaaaatatgtcattttagccaggtgtggtggtgtgagcctgtaggacaagctacttgagaggctgaggcaggaggactacatgagcctaggaattcacagccagcctgggtaacttagtgagatcctatctctaagaaaaaagaaattgaaaaattgtgtcttttttttttttttaattgaggcaaggtcttctgtggcccaggctggagtgcagtggcatgatcacggctcactgcatccttgaactcccaggctcaagcgatcctcccactcagcctcccaggtagctgtgtgcgccaccaggcctggctaatttttttgtattttttgtagagacagggtctcaccatgtggcccaggctggtcttgatctcctgggctcaagcaatcctcccatctcggcctcctggatagctgtgcatgttatccctggccattttttttttttttttttaagagggagtctcgctctgtcacccaggctggagtgcagtggcgcaatctcagctcactgcaacctccacctcctgggttcaagcaattatcctgcctcagcctcctgagtagctgggactacaggcagccgccaccatgcctggctaatttttgtatttttagtagagatggggtttcaccatgttgcctaggctgatcttgaactcctggcctcaagtgatccacctgcctcagcctcccaaagtgctgggattaaaggtgtgagccaccactcccagcccatgcctggccaattttaaaattttttgtagagatagggtcttaccgtgttgcccaggctgccctcaaactcctgtgctccagtagtctgcccacctcggcctcccaaagtgctggaattacaggtgtgagccactgcactcggcccaaattgtgtcattttataatctcaccaactgcgagtgaaggtgaccactttcccacattcttgccaacagtgaatattgacattttttcctgtgtgatgggtaaaaagtgctgttttctttcaacaaaaattcaccaaaactcattcatattgttgtgcatatcagtagttcattctttttaatttctagatggcagcagttcctgttctgaataatccacaatttatttaaccattttcctattgatggacatgtgggttgttttcagttggggctttgttcccatggcagcgtgtggagctctagcacttcctgtttcatgggtgcctggtggaccattgcatggtatcagagttaatattcataatagtaatggtgaacattattgagtacttgctgcataatggtgatttttgggcaatccactaaagcagagaaacagacaaacatgataagggtaggaagctgcatttgcttgaagtgtaaggaagaagactggttctggaattggccatgtgcattaccatcctgtaaaggaggcaggcagaatacaaagctcatctgttgttatttggttctgggaaatgtcaacgtgagtcatttaggaccaacagtcagaatttgaaacttcctgtttttttggaaggtgttttatttcctgtttcttgtgaatatttattcctagtaggagcttaattctgaagggtaaataacaacagcaatagtaagatcacttaattttttttactttattattattattttttgagatagggtcttactctgtcacccagggtggagtgcggtggtgtgttttcggctcactgcaacctctgcctcccaggttcaaacaattctctcacctcagcctcccaagtagctgggactacaggtgcaccaccatgcctggctagtttttgtattttttgatagagacaaggtttccccatgttggccaggctggtcttgaactcctgacctcaagtgataaacccgcctcagcctcccaaagtgctgggattataggtatgagccagcacggctggcccaagatcactttaaataatgtgaatatcactttgtagtatacacagtgttttttcaggtcatcaaaaccaccctgtgccgtggtagacatggcaagcccgtctgtcattatatgctacttacaggggaggaaactgggttctgagagcaacagtcacaaagtgagttccagtacagagctaggacttgggcctaggtcttctggcttaatagagcgactgtcccattttccatgagctgctgagagatgtcctttttagatgctgggccttagactccagagtactgcatgggaatgtttcccaaggtaggtttcatggtgacccacaaaggaagagctgtgtattcatatgtatgggaaggtctggctgagcaagaatagggccagcagcagagcctttaataagtgaatacaggaaaggatgctgtaggtcagtgtttcacactggggacgatttttccccgacctccaagggacatttgacaatgtctagagacaaatctggttgttatagctgagggtgggtgggtgctactggcatctagtgggtagacagagatgctgccaaaacccaacagtgtacagagtagctctgcacaataaagaagaatctggcccaaagggttagtgtggtggggctgagtacacacactgcactcatacatattcattgagcatgagtgtcaatgaataataatgtggacacatcagttttattgagttgtcaagtgtgtcgggtattgttctatgtgcctcacatgtattaattgtttgaggtgtcatcacaatcctatgaggttggtagttgctcctattatcctgtaatacagatggggaaatcagaagcccagagactctgagctccttgcccattgtgacacaggtgctaagtgttggagttgggatttgaacccaagtacctcagactcactccatcactgtctcatgaagaacaaatggctcattctctttcttgtccctatatttgtgccattactcattagctcacacaaatgtttactaagtacctgttgggttctaggtgttggggatgcagcttcgaacaaggatgcccagtccttgccttcaggtggagaggggcaggtactcagttcatgcttgcctaatttggtctttattcacggctgtgggtagtgctatgaagctgaacacggtgctttagaggtgcatcattaggggacccaccagagagagtggctttgtctttgtatattcaaaggaaaatgccttttccttcagaatggaaggaactttcttagtttcagacgtgatgccttgtgtgtaactgcttgttccagccagggcctcttgcccgggaggactgggagaactgttggtggctgtgttctcatgattctccagagaaagagaaccaatagggggtgtgtgtatgtgtataaaacagcatcttttgttcaatgctgcatccccaacacctagaactcagcaggtacttagtaaacatttgcatgagctaatgattaatggcacatatacacagacaagaaagagaatgagccgttcgtttttttttttttttttgagacggagtcttgttctgttgcccaggctggagtgcagtggcgcgatctccgcacactgcaagctctgcctcctgggttcacgccattctctcgcctcagcctcccgagtatctgggactacaggcacctgccaccatgcccagctaatttttttgtattttttttagtagagacagggtttcaccatgttaaccagtatggtcttgatctcctgacctcgtgatctgtccgcctcagcctcccaaagtggtgggattacaggcgtgagccactgcacctggccaagccatttgtcctttatgaggcagtgatggagtgagtccgaggtacttggttcaaagcccaactccaacacttagcagctgtgtcacagtggacaagtagttgagtctctgggcctctgttttatatatatacatatacacacatacacacacggatatatatagaaagatatatgcattttttttgtgtgtgtatatatatatatctttatctaaaaacatatttattacaaggaacaggctcatgcaattatggacgctgagaagttccaagatctgccatctgcaagttggagaccaggaaagctggtggtgtagttccagtctgagtctgaaggcctgagatccaggagcaccaatggtagaagtcccattccaaaggcaggagaagactgatgtcccagctcaagtagtgagacagagagagatcaaattctcccattctccactgtttcgttctattcaggcccttgacggattggacgcggcccaccatcctggggagggccatctgctttactctgtctacctattcaaatcccattctcatccccaaaacactctcacaggcaccctgagaaatactgttatatttaaccaaatatttgggtaccctgtgatctagtcaagttgacctgtgaactcaaccatcagtggctttctctgctcatgccttgcctgggttggaacttccttgaaagtagaagttggcttttcagccctacctggcttcttggtctctttgctctggggctggtggctgtgctcacctcccattacaactcagggtctctgagcccccaattcccctctggcaaatggggatgtgtgccagtacttctgtgctgaagggcctgctctgaggagtaaatgaggcagtgtgtggagggacttcacatggggcctcctattgagtgagccttgggtcttgttggtcagctctgcttccttctgtgatttctaaattgccaagggctggggagggccagtcctagggcatcttcccttctgtagggtcccccagttcccctgtttctttctgtgtcctgattgaaaatcacagagtgctttgaccaccctgtgacccagccagctacaggtttttcccagcagacctgagcccaaacctgggccttaaacattctcaggcattgataaaggtatctaggtaggctgggcatggtggctcacgcctgtgatcccagcacttggggaggccaagacggatggatcacttgaggccagtagtttgagaccagcctggccaacatgatgaaaccctgtctctactaaaaatgcaaaaattagctgggcgtggtggtgtgtgcttgtaatcccagctacttgggaggctgaggcaggagaattgtttgaacctgggagacagaggttgcagtgagccaagattgtgccattgtactccagcctgggcgacagagcgggactctgtctgaaaaaaaaaaaaaaattaggtgtggtggtgtagtcctagctacttggatggcttaggagggagggtcacttgagcccagcaggcaaagtttgcaatgagttgagattgtaccactgcactccagcctggacaagagagtgagactccgtctccaaaaacaaaacaaaacaaaaaggtatctaggttatcacccaaaacaactgaaagaaaccagccttggccctgagccaaattccttaaaccctcatataaactccttaccctgacctcttcactttggaccaaacctaggtagacacctgtttttttttctcgcctccgcacctcgaggattgctttggccagatcgccctggcatttattgcttctttctttggaatcccaactggccccatcttaggacagtttggggcactcccttgtgggaactcttctgctgccacttctggggtgattccagcataggttcggagggacgaaaccccttctttcccttgggtggcagagaggatgtgcttgccctcttctgtttgtgttggagacctgggcacatgcccagtgactcaggctggaagactgattcttttgcacacacttagccatgtgtgtttattgtccccatgggagtggccatttcaggagaaactggtctcatgcaccttgtatctgaccatgtcacccaacttgaggggccctgaacatgccatgctcctgcatcctccctgcctttgctcatgccggggcctctgcctggagtgtctcctctccctctttctttgggcaccccttggttgatttgctccctccatgggcacctgtagcccttggcctcttgagagcagtcattttgctttatcaatagatatttctaatttggggaatgagtgaattcctcagtagtggatagtagttatatttttggggtacagcggaattttggaaatgagcaaatgttctcagaatgaagtctgtggatgaataggaattttcagggtaggtaaaaccatttctaactttaaaaatgggatgtgaatgggatgtgagtgcttttctgctgtggcctttaagctggcagaatagttcagacctgttctaagcaaggaatggcactgttattggaacaggagtatgggctccactgcaacttggaggtggccactgtattctccttgtttaaaaaagaaaaaatgtaggccgggcgtggtggctcatgcctgtaatcccagcactttgggagggtgaggcaggtggatcacctgaggtcaggagttcgagaccagcctggctaacatggtgaaaccccatctctactaaaaatacaaaaattagccaagcgtgatgcaggtgcctgtactcccagctacttgggaggctgaggcaggagaatcgcttgaacccaggaggcagaagttgcagcgaggcaagatcgcgccactgcactccagcctgggtgacagagcgagactctgtctcaaaaaaaaagaaaaaacatctcataaccttttaggctggtggccagtcaacttcttgctaacggaaatgaaaactcttttgatgttgatggaaaataatcatctttattcatttattcattctgcaagtatttcctgaggacctgctgtgtgctgggcccctgtggactcgcagacagtgagcatccgctctcctgagcttctctcacctctttctgctctggaatttcttctcaatgagaccacactatttctatactctctggtgtctggcttttttcacgcagcacgttttctttcttttttttttttttgagatggagttttgctcttgttgcccaggctggagtgcaatgacgtgatctcgactcactgcaacctctgcctcccaggttcaagcgattctcctgcctcagcctcccgagtagctgggattacaggcgcctgccccctcgcctggctaatttttctttttttttttttttttttgtatttttagtacagatggggtttcaccacgttggccaggctagtctcgaactcctgacctcaggtgatctgcctcccaaagtgccaggattataggcgtgagccaccgcacctggccttacgcagcacattttcaaggttatcccgcattgcgtgtatcagtgaagcggtgtcactcgtctggggtaaatacccaagattcattgtcttcacagccacggaagactaggacacggacatacagtgaggttcagagtggaagtataataggtgaaagaaagagaagagctctgtctgctgcagagagaggggttccagtgaaatgggttgctgtttctgcaatgaaatgcaaggggttttaaagatgagcctgaggagatggtgtctgatttacaaagggcacaaagattggtcagaccaggtgtttcatttgcataggatgcataaaactggttagggctaggtgtgccatttgcatgtggtgcgaaaagctggccagccccactccaatcttgtgttatgcagatgggttctctacctggccagtgccatgttgcctacttctttactgtcttgtggtaacaaaagggaagatagagcctctttgctgagtatatctggccccctggtagcccttttctattggcacagctgctggcattcactcctgtgagcttccagcttgcttatctatgtctgcagcttgatttttcaggctgctcttttttagaaaagaaatgatttgaggctgggtgcagtggctcacacctgtaatctcaacactttgggaggctgaggtgggtggatcaactgaggtcaagagtttgagactagcctggccaacatggtgaaaccccgtctctactaaaaatacaaaaaaattagccgggcatggtggtgggtgcctgtaattccagctacttgggaggctgagacaggagaattgcttgaatctgggaggtagagtttgcagtgagccaagatagtgccattgcactcctgcctgggcgacaagagtgaaactccgtctcaaaaaagaaaaagaaaaaagaaaaaaaagaaaagaaacgatttggggattttgttaaaagggaaattctgccgaggactgttttaccctcactatctgcctaaataatttctttctgtctcctgtatcatcagtagctcattcctttttaggctgtgtaatgttctcttgtgtggctgtatcacaatttgtatatctaccaaactgttgttagattggttgtttccatgttggggcgtgatgaataaggcctcagggaacattttggccaagtcttttgtgcccgtttgcactccttgctctttgatatatacctaagggtggacttgctgtcagagggtaggtgtgtgtttaactttgttagaaacctctaaacagatctccaaggtggctctcccaccagcagagtctgagggtctgagttctcgctgctccgttcttggggggctgtcctcacagagccccttgcccctcctctgctgtaacccaacattcatgtttctctctttctctgcctcttcaggtgctcttgagagtttgaggggaaatgcagatttggtgagtctccatgaaatttgggccagtagctcgggctctgggcccttccctccccacccctcaggtccttccctgcaggtgtgtcaggagcccagggaacccaaccctaggcagtgcagtgggggtctggtctcagcctccctgactccggcccagcgcctgctggggcagattgttcatctctgcgcttcctcatctgcaaagctgacagcagaagcagggcagacctgatgaggggcagtcatcgggatccagaccaagtcgccactctctcattcacaagtatttattgtgtggctcccatgctctgtgctggggccacctgggaaggagccatcagtcagttaggcgagagagaagttagacaaatgagtatataaatagaaatagtgataagtaccatcaacaaaagaacaggctgccttgagagaattacaaggggactgagcctggggagagggcagccttgggtgcctccaggtggcctgggcatggttctgctgacagagttctcaggtacaccccggcctaggtgacccgtgaggtcctttgggatgaatgctcatggctgttggatttccaggttaccagctcccttcccttaataccaagatgggggggtcaccttctagtgctagtcttccctgcagttgcttctcttttgccctggaatgccgggtggagaccctgctactccttgtgcgagagggcagaccccgttttcttcccgcctctccagactgtcctctagggagcgtggggagagcccgggtttacgtgggtccctgtgctggcaggcttacatcctgagcatggagccctgtggccactgcctcattatcaacaatgtgaacttctgccgtgagtccgggctccgcacccgcactggctccaacatcgactgtgagaagttgcggcgtcgcttctcctcgctgcatttcatggtggaggtgaagggcgacctgactgccaaggtacactcactatctgtggagggagacagggtggggggcagtgggtggggaagtatcttttgagggactccaaaagccagctgactccccaggcgagcccttacatctggaggaccatgggaggtaggacggcccagcggctacaggttcaagttcagacgcagaagtccgggtttgaggactggctctctcggccacctgctgtgtgacctcctgtgcctcagtttccttgtctggaaagcaggaatagtacctgcctccttgggttgttttgggggttagatgaacagtgcccaagcgtagcaccttctccccaaaaatggtggctattacgactgctgggactgtcagcacttcggtactggccctgggaaaccgagaaagtgctctgcccaggcgtttgggttgggccctttgttgttttattttttggggggggcgggggcacagagtcccactctgtcatccaggctggagtacagtggcgcgatctcggctcactgcaacctccacctcccaggttcaagcaattctcctgcctcagcctcctgagtagctgggattacaggtgtgtgccaccatgcctggctaaatttttttttttgtatttttagtagagacggggtttcaccatgttggccaggctggtctcgaactcgtgacctcaaatgatccacctgccttggcctcccaaagtgctgggattacaggcgtgaaccaccatgcctggccaggctgggcccttttattgttaggaacggtccagtctgcatctagacctatccgtgcttctggctcacctgcagccctctcttgtagaaaatggtgctggctttgctggagctggcgcagcaggaccacggtgctctggactgctgcgtggtggtcattctctctcacggctgtcaggtaggaagcctcccactgttccctgggcaggcattgggtactggccgtgccaagaggctgtgcaggggccatgtcccttcttgtgtccaaaacacccttggctttgtggaaaagggctgtggggccctgcccacctcctgttgttttcttgggagccatgtggtcctctgaggagttggctgcaccgtcctgggcaggtcggtgttcctgggagaagccctctgggagagggagggcagagaccaggtctgctcacgaagctcctgcacccagagtttgttcagaggcgggtacagcacacatgttgtctcagctcctgtctctgtcctgtgaggcactgccccaggccccttgctgctggtgggactcaggacaccaggcccactgggggcttggccccttacgtatttgtcactgtgattaagcccttaccccttactgggcctcagtttcctcatcttttaagttgaggagttggacagatcacagttataagctggggcctggagtccccctgtggtctgcacggtgttttgaaaactggcaaatttcacataaaaatcaggatttctagtttctcttgacaaaccgcaaaggtctggcctgacgaggccagcatcttcagccagtaaaactccagcctgtggctgggcagggctttccctttggtcctttctctcataatatggtccctagagctcatgaagaatgtggactcccaggccctaccctggacctcttcattccaagtccgcccagcaacaaggtttccaggtgatttccatgcccttgaggtctgagctgaactgatttaaagcagccactctcagcgttgagctgcctcagtcagaggggcctggaggaccatactgctgattaggaggtctgggtggggcccaggaatcacatttcttacaagttcccaagcgatattgatgccgctgctgcaggggccaaactttgagaaccactggtctagaggccgcagccagcactctccaggcacactggcccctagaggcacatgagtttgacatgcaaccccttgctgtcaaggtgtctttccagatgctgaccagggtctttccagaaccaacctgctctgtctcaatcagcctcgtgcccctggctttgaccttccaaatccttggctcccacaaaacctctgaacaggctgttggattcctactccaacttcttggttttgtaaccagggttcttggtcttctaggccagccacctgcagttcccaggggctgtctacggcacagatggatgccctgtgtcggtcgagaagattgtgaacatcttcaatgggaccagctgccccagcctgggagggaagcccaagctctttttcatccaggcctgtggtgggggtaagcagctcctcagcctccctctgggtgggtctggtggggagggagccgccacctgcttctttctccagcctgcccctcacagggcccatgaggtctctccaggcagtcagagggtaccacacatggtccctttttggcagcacctctgtctggctggagcaggccctgctctgtctgctttgtagaggtcagagtcttctgtttcatggcacagtggcatcatgggctcaagtaactttggcagcttcaattccaaagacttggcaaaaagaaagcagaagagagaggagaaacctctttttatttttcttgtcaccattctcctgacctccatcaactagaccccgtttccactatcccagagaaagggtggccacagctaaactgcatggagaaaccaaagaatttaaatattggaattttcaaaagtgtagttgtgggggttcgaggaacatttaaagattacttgggctgggtgcagtgtctcatgcccaacactttgggaggccgaggcaggaggattgcttgagccaggagttcgagaccagcctgggcaacacagcgagaccctgtctctatttttgttttgttttttaaatgtattacttggattctttgtagttttgctgtatgctctaattttaaacttaactcctattacagtgttatctgattttcttataaaaaaagagggaagagagacaaacatggggttcctagtttgtgggtcatgacaggaatatcagggagcgctagaaattctgtcccagggagtcccctctgccctaggctctccacggactggaacattcagaaggtatatcagttccttgcctccagcctgatctgccagagaagtgagcactgttataccatagcgctgtccagctcgtccagctgtgacatgggcacctgtggtctatttctcctgtgcacatccaactgccccatccctattccacgttggtggagttgggtggaggctacctaggagagcagtctctggtcacatcattcatccagtaagtgtttattgagcaccatctgtatataccaggctgtgcgttaggtgctggggataggggaaaaacagagtttcagtctcctggaatttataatttgacatgaactgtattaagtcactgtcatgacccatgcccataacttgaccacaagtgattgagaacacttgattaaccctggatgggctactgacctatctatcacacagccctgggccagttcatctctagacagctcagcaaatggggaaaataacagaacccactcccaagctcaggtgatcctcccacctcagcctcctgagtagctggggctacaggtgcacactaccatgcccagctaatttttctattttttttttgtagagacagggttttgccatgttgcccaggctggtcttgaactcctgggttcaagcaatctgctcacttcggcctcccaaagtgctgggattacaggcgtgagccactgtgcccaggcaactttaataatatttaatgcactaattggtgtgtgtacagtgattggttcattttaataactgaaaacccagcctgccccccgctcccaccccggaggacccagtgtcacataagagtcccccaccccgctgtcgccagcagagttccctcaggacaacagtaacaggaagtgaggaaggctgccactctcggggctgtagaaaccctgctctgcctcacctcctgtcttatccacagtgtgtggtccagcaatgctcttccttcggagcctccggtccctctttctcctatgaatcaaatgaaagacagaaagggcaggggaattaggaatgcaggctgagcaggcatacctactttctggacagttagtcagtcttgtgctcctcccatgccccatccagtctcagtctcaacagcagggagggcctttgtcacgtgaatatctgctgtcactcttaggactcagtagcagggcttccaaggcctttggtgacctggcccctgccacttcaccttccccagcctggcatgctccgagtccccagcacggcccagccttcccaggatgtccaggctcttgcttgctcttctacctgctcccctggctaactctttttttaaaattcatttttacttattttgttttagagatgggggtctcactatattgcccaggctagtcttgaactgttgggttcaagtgatactcccacctccgcctcccaaagtgctgggataacaggcatgagccaccgtgcctggcacctggctgactcttaatcatccatccttctggttacaatttattgtcacttccctaaacaccccctttcttggccaaagtcagggttagctggcctttgtgctcctgcagcctctgtccctcccctaccatagcactgtctcattgtattgagatgggcttatcccctggtcagctctgaggggagggccaggcctaccctgcagccaggcccccagcctggcacagagcccacagtctggttgcgtctcatgtggattctaatttgaatgtaaaggagaaccatacaaaagcatctgtggtggttcacgcctgtaatcccaacagtttgggaggccaaggtgggaggatctcttgagacgaggagtttgagaccagtctctatcataaaatttaaaacattagccaggcctggtggtgtgtgcctatggtcccagctacttgggatgtttaggcaggaagatcgcttgagccctggaggtcgaggctacagtgagccatgtttacactattgcactccggcctgagtgacagagccagtctgtcacctgtctctaaaaaaataaaaaataaaaaaaaaatatgagccaaatttggcataatgtagatttccatcattaaaacaaaactcacagaaaacagcaagatttcaaagccagcatgcagtgattaagatatccctttggagtcgggtccttgctttgcctccgcaggctgcgtgacctggtgcttaacgcagttaccacatggtggcgccacgtcagctgagagcagaaatagaaaggtccccgttcttcactagtgcctggcgaggggtctgtttacatgcatcagaacacctgtcctgggttttgaggactcttgtattgctattttataactcactataatactttaaaaatatttaatttaaaaatcatttaataattaatttaaatataataataaataatttaaaaatcatttttaaataataattttaaaaccctccaacatgtcatccacccattcattaggaggtaacagcaccagggctgaaaaatgtgcattaaagtcgataactttggtgtgcaacgtcagcgtgataggcaaccaagtagccacctctctgaggctgagccgtcaattttggggtgacccctctttgggatttgagagatcgggctgagaagacagaaagcaatgacaatatgctgcagtggtcgtggattttctgtgcggagggaacatctcctcctactgtatatttattcttgtggggaatgagtcctgccctacggggagttttgcattaatgaggctctctaagaaccgaggctctccaagaaccaagccatgcatacagtgcagaacaccctaggcaaggccttcacatcagatttgtgggctgaggctgacacgtgaacggagctgccttagcgccccgcctgaccccctctttcctttcccccacaccccctgctctgatctgctgtctcttctcagcctctctgctcaccctgtctcttctggccattcttaacggcatcccccacttaggcatccctccgcccccacaggctgccaggcagacccagcaccatcacattcacgcctcaggcctccttgctgtgctgtttcacgtcattcccagacacctggggcagattccggagtctctaccaagaaaacaaccagaagcaatgaaccacaaaatctggagaaaaacatggctgtcacagatcaaagaggcccccctttggaggctgggggcctccgtgagaagcagtgggatagttgagaggcaaaaaacatggggcagaattccgcgcccctcatatcagctgggagaatgccaatgaccagtggtttctgagctttagctgtgtggggtaagaggtcaatagattttggtgttactattatggggttgccagagccacctctgttcctgccagatgggcccccagctcctctgggtgaactgtgacttccctcagtcacatagatccagccatgcaaacctgcctgcgttgcggccacagcacttgctgtctctctcaccaggaccgttctccctgatggcatcagggcctggatcacagtcacattctccaggagtgtttttgcaggggaccctctggatcactcctactccaacttcagcctatttttaaaaaaatttctctttttttttctgcagtatgtatacatagttaaatatatatttatattttttaaccaaagctcttgttagatgccttctttcctgagtagccctctgtgctccgccttaccccacccaccatgagccctactgcagaagacctcatcccggaagacctccgtcagtgtctccacttcagtagctctgtagctgagccatgtggggcacaagtcctgccaggacctctctgttttccaagcttggcactgcctttggggagtctagattttaaaatggaaaagacaaaaaatatggcaacctaaaaaagaaaataattcagaatgttataagctaatacagccatctcatttttgcatcttccttttggattccagcccatgagcacagtctgcttttctcagctaacgttatcccttaagcagttccccagatctccatggccttcatcatcactagctcaaatggctttataatgggccattttcatgacatgcactaatttactaaaccattttcctaatgtcggccatttaggtgatatctaatttttggctcacacaaccacaggtgtcttcatatagaaagcttttgactgcatttgaattattttcttaggaaattactggattagaaggtgtaaacatctccatggatttcattatccatgacttggtgtctatttggtatttttctgatggcttctttgattctagaaaaggatttgccatagtgcaagaagtacaaatgataacactaggacaaaatagagagggaacacaaggagagaagaaaagtaaaagtttggattccaaaaatacatcctaggatgtcctgcagctttctacagttctctaatgtacaagtgaattaaaaatttaaggtatacaacgactgattttagagataaaatcactttgcagatgtaaagaaacatggaaaaatcccagccattggtaatagtagactcaaaaatgaggtaggtcaaagtcccagtcagcctctgtctggggggaaaccccttaacttatctcagtctcagttgcctaattacataaaatggaatactgatagctacttgctagaggtggcctgcgcattttttacgctttccagccgccattggaaataagatcattggccaggggcggtggctcacgcctgtcatcccagcactttgggaggctgaggcgggcagatcacgaggtcaggagatcaagaccatcctggctaacacagtgaagccccatctctacaaataattagccaggtgtggtggcacacgcctgtagtcccagctacttgggaggctgagacaggagaatcgcttgaacccaggaggcgaagcttgcagtgagccatcgcgccactgcattccagcctggatgacagagcgagactctgtctcaaaaaaaaaaaaaaaaaaaaaaaaagatcactttcaagatccatggaatctggtgttctatagttctatatctggtatttgcaagacagaagtcaggaatagagactccagacacatttcttcccttggttgtcttaaaggggacactgtgatcttgacagcctgagtaaagggtttgagtgagtgcctatgatatagtggacagtttcctcaactatatttctaaaaaaagacaagttttatgtctttttaaaaattgtggcaaaatacatataacataaaatttactatcttaaccatttttttggggtgattgcttgagctcaggagtttgaggctggagcgagttaagatcatgccacttcaatctgggcaacagagcaaaagtgtgtctcttaaaaaaaaaaatgcctgtaatcccagcactttgggaggccaaggcaggcagattgcttgagcccaggagtttgagaccagcccgggcaacatggcaagatcctgtctctacaaaaaatacaaaaattaactgggtgtggtggcacctgtagtcccagctacttgagaggctgaggtgggggatcacttgagcctggcaggtcaaggctgcagtgagctgtgattgcaccactgcactccagcctgggtgacagaatgagactctctcaaaaaacaaaaacaaaaacaaaaaacaatcccccaaaacaaaacaaaaaaccactgccctctccccactgaatggtcctgccacccttttcaaaattcatttgaccacgcatgtgagggtgtatgtctgggctctattcaatgacattgacctatgtctgtctttatgccagtaccatactgttttgattactgtagctttgtagtaagttttgaaatcaggaagtgtgagtcctccaattttgctctttttccagattgttttgtctatttggggtcccttgagattctcgtgtgaattttaggatagattttctatttctgcaaaaaacatcattggggttttgatagggattacatttaatctatggattgctttgggtagtattgagatctttaagttttctaatccatgaacataggatatatttccatttatttatatcttttttttttttttcttgagacagagtctcgctctgttgtcagactggaggactgtggcgccatctcggctcactgcaacctctgactccctggttcaagcaattctcctgcttcagcctcctgagtagctgggattacaggcacacgccaccacgcccagctaatttttatatttttagtagagacggggtttcaccatgttggctaggatggtctcaatctcctgacctagtgatccaccagcctcggtctcccaaagtgctgggattacaggcgtgagccactgtgcctggcctatgtcttctttatttttctttctttctttctttcttttttttttttttttttagatggagtcctgctctgttgcccaggctggagtgcaatggcacgatcttgactcactgcaacctccgcctcctggattcaagtgattttcctgcctcagcctcccaagtagctgggattacaggtgcccaccaccacgcctgggtaatttttgtattttttaatagagacggggttttaccatgttggccaggcttgtttcaaactcctgacctcaggtgatctgcctgccttggcctcccaaagtgctgggattacaggtgtgagccactgtgcccggctctttttcttttttgagactgggtcttgctttgtcacccaggctgaagtgcagtggcgcgatcactgcacactgcagcctcaactgcttggactcaagtggttctcccacctcagcctcacgagtagctgggaccacaggcacatgccaccacacctggctaaattttttattatgtgtagagatgaggttttgctggtctggaactcctgggctcaagggatcctcctgcctcagcctcccaaagtgttgagattacaggcgtgagccatggcatccagccttctttctttcagcaatgttttgtagttttcattttacaagtctttcatcttggttaagttaatttctaactattttattatttttgatgctattgtcaatggaaccatttttgtaatttctttttctgattgttcattgttagtgtatagaaatggaagtattttttgtggttggcttcgtatcctgctaatatgctaattttatttgttctaatagtgtttcatctttagggttttctgcatataaaatcataccatttgtgagtagagataattttactccttctttccaatttgaatgtcttttatttctttttcttgcctccttgctctattaacttctagtaatgtgttgaatagaagtggcaaaagcagaaattcttgccttcttcctgatcttatagaaaaaggtttcagtctttcaccattgagtataatgtttgctgtgggtttttcatatatggcttttactatgttgaggtagtttccttctattctgagtttgttgactgtttttatcatgaaagcttgttgaattttgtcatgtgcttttttctgcatcaattgagatgatgatgtagggtttttttcattctcttatgaaccccaaaaatctgagacaggtctcagtcaatttaagaagtttcttttgccaaagttaaggatgcacgcccaggagacaggtctatgcctttctctgaacatgaattttagggttccaaatttaaaggggaaagggcaggatattgagaagtacacagttttcaggtaagagcagggtagggggaaatagtcattcaagcatttgtctggctcagtgaatttgcatttttacgtaaggtaacatagggcaggggaaaatgcagggaacctgcatttttacgtaagataacaaagacaaatggggcaggggaataatcagatatgcatttgtgccaggtgggcagaggggtgatgcctctgtaaagataagctatccatttacattgccgtggtgaattttatcagacaactatcttggagctcaccaggaatttccttgtgggcaaaatatgggagaggtgtgtagcttttcatcttgtagccatcttatttaggaaccaaaacggggaggcaggtttgcgtgacccagttcccagcttgacttttccgtttggcttaatgagtttggggtcccaagatttattttcctttcacactgttaatgtagtatattgcaccgactttcatatgttgaaccatccttgtctgtgtatttcaatgacaagaggtgtttgtttctgcttcctgcagagcagaaagaccatgggtttgaggtggcctccacttcccctgaagacgagtcccctggcagtaaccccgagccagatgccaccccgttccaggaaggtttgaggaccttcgaccagctggacgccatatctagtttgcccacacccagtgacatctttgtgtcctactctactttcccaggtgagcacatcagaagggctcgtcctcgcagccagtgggtcttcccgtctgccctagaggcagctgtgtggtgagagaaaagaccagggtatgagtcctggttctgtcttttgcccctctgtgaccctgagcaagttacttctctctgagcctcggctcaggctgagcgggcaaggatgcgcgctgcaaggaggcctgcgcccttgggttcctatgcctcacttgcctctcctctgcctgaccctgcctctgccttcgcatctttagcaggggaataggaatcgtgcctcaggggtttccatgggaattaaacaaggtggctggcacgtcactgagcacagtgcggggcacgtagtagttgcagcaagcggtagtttccttccttcttttttttttttttttttttttttgagatggaatctcgctctgttgcccaggctggagtgcagtggcgcgatcttgggtcactgcaagctctgcatcccgggttcacaccattctcctgcctcagcctcccaagtagctgggactacaagcacctgccaccacgcctggctaattttttgtatttttagtagagatggggtttcaccgtgttagccacgatggtctcgatctcctgacctcgtgatccacctgcctcggcttcccaaagtgctgggattacaggcgtgagccaccgcgcccagcctttttttttttttttttgagacggagtcttgctttgtcgcccaggctggagttcagtagcatgatctcagctcactgcaacctccacctcccgggttgaagtaattctcctgccttagcctcctaagtagctgggattacaggcatgcatcaccacacccagctaatttttgtatttttagtagacacagggtttcaccatgttggccaggctggtcaagaattcctgacctcaagtgatttgcccacctcggccttccaaaatgctgggattacaggtgtgagccactgtgcctggcagtttccttcctttcttatgtcttggatgagtcacttgacttttccaagccttggtttccttgctgggaaaacaggaattatagccggaatcaggggatggtcatgagggtgaaataagatcatgattagggcagagcctcaggggccaggctgctcctgttggatgtatgtatgagtcaaggtctggagggcgcccgagccagcgtgcatggccagaggggtggtggggagccggcggaggggtggctctccagcagtgttcagccctcctccctccaaaggttttgtttcctggagggaccccaagagtggctcctggtacgttgagaccctggacgacatctttgagcagtgggctcactctgaagacctgcagtccctcctgcttagggtgagtgctgccttcctctgcaaaggagaggggaggctgctgaggggcagcgtgtcctcctggggctggggatttggggtgagcagggcaggcccaaaccaagggtaaaaggtagtagactcctgcctctgagccttggagtcggcacttttgtgtctctttatgagaggcatcctgcctgtggtgacgtttgccctttattcaaagagttgccttccctgtctcctccaaggtccccaggttgacacctcccgctcctccactgatggagctggtcctcagtgccagcgcaggatggctctgtccagaccctgaaggcgggtcatgggcccctccctatatcctgtgggcatcatgtagtcttctactcttgaccctcaagaattgtgaacccctccttgtacatcgccttctcaggaggccccagtgaggaaacagatagggaagggtggcctgataggcccagtcctactccatagaaacccgactcagagcagttgcttcctctgagggtcctgtggccttgtggctgccttgggaggcagcatgtatgggccccagctgctctgctcaggtattcatgccacgagaaggggctgcgaggctggggccactcctggctccttgcaaatatttcagtctgatttgaactttatgaatttggaaattttgaattttgagttttttaaaggtaaagttgaggtgcgtattctttaagccctcctgctcaaagaggctgcagtttgagctgtttttaaggtgcgggttgagtggacattccccccagcccctcttgaattcttccttcagtccagagaactgaactcacagagctctccatggtcatgtcttacaggtcgctaatgctgtttcggtgaaagggatttataaacagatgcctggttgctttaatttcctccggaaaaaacttttctttaaaacatcataaggccagggcccctcaccctgccttatcttgcaccccaaagctttcctgccccaggcctgaaagaggctgaggcctggactttcctgcaactcaaggactttgcagccggcacagggtctgctctttctctgccagtgacagacaggctcttagcagcttccagattgacgacaagtgctgaacagtggaggaagagggacagatgaatgccgtggattgcacgtggcctcttgagcagtggctggtccagggctagtgacttgtgtcccatgatccctgtgttgtctctagagcagggattaacctctgcactactgacatgtggggccaggtcaccctttgctgtgaggctgtcctgtacattgtgggatgttcagcactgtcccttgcctcaatgccagtaacgcgtcttcctgagtggtgccaaacaaaaaggttctcaggtgttgccaaatatgtcctggggtataaaactttcctcgcctgacaaccactggtctgtagggatttttggctacacacaaaccagtatcgctcatagatcagcaaaccggggcctactagagtctgaacagctgtaatctatgaattctaagtgaaattttaaaaattgttaatttttcctatattgcattaattttaaaaaataaatctgaggcaaatatggactctc

SEQ ID NO: 15498 - DNA, 31872 bp, Homo sapiens
aattgaccctggggacagggcgaggcgcggaggcgtcctgaaggcgaggcggtgacgcaagagcgaatccttggggcggggcgaggcgttggagatgcgtcctgcgggcgggacggtaacgcgggggcggggcggtgacgtgaggtcagtgcggggatacggggcgggttctggggcggggacgcagtggtggattctggagcggggcggtgacgtggggcgggttctggggcggggcggtgacgcggagcgtgttctggggcggcgcggtgatgggaggcttggccctgggggcggggcgaggcgcagaggtgcgtcctgagggcggggcggtgacgcaagagcgactcctgggggcggggcgaggccttggagatgcgtccggaggcggtggggagcgaagactgacccggggccgtgacgcgggggcaggccctggggcgggggcgggtcctggggactggggcgggcggccgaggcccggaagcggactgaggcggcctggagtcttagttggctactcgccatggacgaagcggatcggcggctcctgcggcggtgccggctgcggctggtggaagagctgcaggtggaccagctctgggacgccctgctgagccgcgagctgttcaggccccatatgatcgaggacatccaggtgcgcccccggccccctgtccccgcgctgcacggccgggtccccacgcccctcgaggaggcgttgtgcgggagcctagccttccctgtggcttcaaacccctcagcggagccaaagaatcccaaacacctcttagtcgggtgttcgctaaagcgattccatgccatactcagtcagcgtacactgttagtgcttgtgtttcttgtgtaaaggaaaaatgtgagacacatcttgagaactttgaataagaaacaattcatgaattggagaacatcagactgaaagagctttagtgttgcaatgacaaaacgtcagaggcaagtatttattgggaaaatgtggaagcaaaataaagaaattatttgattggtttgcagttacaaaattgccttttttttttaaggtctgttaattgactgcttttggctggtcttaagttttatttctctctaacataagcatttatcagatatgacccaagttaaattttgcttatgtttgcagtttaagcaagatttaggtcacttaggatacctgattggttttgtctgctcaggaattcttcatggttggtctccattttaatttacgttaatacttgcgaggaaggaggcgtgtgcgtttttacttttctagcatagaggtttcgggaacccactttggcatcaggctgcctggcagcgtgttcttgggccagtcacttaccctctttgagccacagtttctgggctgtgaaatgggaataagaataatactgtcataaggactaaatgaaataacggatgtgaaactgtagtgctaggcacagagcgggggatcagcgtaccctgccctctttggccagccccttctgtgttcagtttatgttttgttaagaggttttggaaatgaggggacctgatgcagaatggagaataatgaagtcaaacatttgaggttttgtttaaaagcactttcccatctttgtctcatttgaccctcatcacaggcctgtgaggatgcaggagatatttcctaccatgaggtgcagtaggtgtgagtggctggctggatatccctggccagtgccctggcccagggaaagagtctttaaataattgagtatcatatgagtaattattcattaataataaaataagttttgtgccttctgtgtggcccctactggggaacagtaatggtttgaggccacagtccttgccttcaggaatgttcacggggatcacaaactcaaatgcccatggaggaccaatggatgggcgtcatagtggatagcctttgcactgccctccgtctccagctgagtatggccatatcaacaaatggcccagtattgccacatcttacacttattttgaggcagggtctcactcttgcccagcctggagtgcagggatgagatcatggctcactgcgaccttgacctcctgggcttaagtggtcttcctgcctcagcctttagagcagctgggactttaggcacatgccaccatgcctggctaattaaaaaaaattttttttttgtacagataggagtcttgctatgttgcctagatgagtctcaaactcttggcctcaagtgattctcctgcctcagtgttgggattacaggtgtgagccactgtacccggcccagctttcacatcttaaaaaagaagctgaaaatcttgattcctctgtcaaattccctggcttaaaatgttagcaacaaattcagaaattttttaagaaccttgtgggaaccacaggttgccattttgccattcagtatggctgaaaaacaggcaggttttggaaccagttggatctgggctctcatcctggccttgttacatattagcaagttgtaaaaaaccacaaccaatgagccaaacaaacagaaaaaccctatgactcagtttccctgaaattttttaccctaaaaagttgggaagttctaatttaactctataaagttattgagggagaaaaagatgaaacaatgcatttaacacagtgttgacctcctggagtgttcagcaaatgtggagagaaacctaaacaccaccatctatttgcatgtagccaactgttctgctagtgagacttaccttctcagtggcactgtaggtctgtgctgttcccaacagtagccattagccacatgtcgttaaaggtaaatttgaagtaattaaaattaaataaaactaaaaattggtagggtcaagccttacagggcctgtgggtttttctcctcgtgtgcggagatgagagatcgtagaaataaagacacaggagaaagagatagaaaaaaagacagctgggcccgggggaccactaccacctagacgtggagacagggtagtggccccgaatgcctggctgcgctgttattggatataaggcaaggggacagggtaaggagggtgaatcttctaagtgattgataaggtgaagcaagtcacgtgatcataggacagggggcccttcccttttaggtagctgaagcagagagagaaggcagcatatgtcagcgttttcttctatgcacttataagaaagatcaaagactttaagactttcactatttcttctaccgctatctatgaacttcaaacaggaaccaggagtacgggaggaacatgaaagtgggcaaggagcgtgaccatggaagcacagcaccacagggaggggtttaggtctccggatgactgcgggcaggcatggataatatccagcctcccacaagaagctggtggagcagagtgctccctgacgcctccaaggaaaggagactccctttcttttttttttttttttgaggtggtgtcccactttttcgcccaggctggagtgcaatggtacgatctcagctcactgcaacctccaccttccgggttcaagctattttccttttttttttttttttttttgagacggagtctcgctctgtcgcccaggctggagtgcagtgccgcaatctcggctcactgcaagctccgcctcccgggttcatgccattctcctccctcagcctcccgagtagctgggtctacaggcacccgccaccacgcccggctaattttttgtatttttagtagagatggggtttcaccgtgttagccaggatggtctcgatctcctgacctcgtgatctgcccaccttggcctcccaaagtgctgggattacaggcttgagccaccgcgcccagccagggttcaagctgttctgcctcagcctcctgagtagctggaattacaggtgcgcactaccacgcccagctaatttttttgtatttttagtagagacgggtttcaccgtgttggtcaggctggtcttgaactcctaaccttgtgatctgcctgccttggcctcccaaagtgctgggattacaggcgtgagccaccgcgcctggcaggagactccccttcgcggtctgctaagtaatgggtgtctccccagacactggcattaccgcttgaccaaggagccctcaagcggcccttatgcgggcctgacagagggctcacctcttgccttctaggtcacttctcacaatgtcccttcagcacctgaccctatacccgccggttattcctaagttatattagcaatgcaacaaagagtaatattaaaagctaatgattaataatgtttataataatgattgataattgtccatgatcatctctatacctaatttgtattatgactattcttattctaactattttctttattatactgaaacagtttgtggcttcagtctcttgcctcggcacctgggtaatctttcgcccacaaaaattcagttcctcagttgtactacccaagtgcttaatggtcatgtgatatatggttactaaataggacaatacagaccaagaatatttccatcatcacggaaggttctcatagacagtgctgctgtaggatagttgaggacacggtgccatcttatccctgtggatcctgagaacctgtccagtgctgggtatctgaggacaggtggcagataaccagactcttccttcttagtgactgaccccaccatcctgacacctctcaatttttttttttgagacagggtcttgctctgtcacccaggctgaagtgcagtggtgctatcacagctcactgcagccttatctcctgggctcgagccatcctcttgggagcctcagcctcctgagtagctgggactacaggtgcgtgacaccatacctggctttttttttgttattttttgtagagacagggtctcactgtgttgtccaggctggtctcgaactgggctcaagctatcctcccacttcagcctcccaaagtgctggaattgcaagcatgagccactgtgcctggcctgcctgtcaaccttgacccttgctctgtcttcacagtccccccagtcagtgcccatgtcctatggaccctctctctttgtatctctgctttgtcctttcacttctctctattctagctgcaccatctttgctgcctcctgatctggctatggctcactcctttccatttttcaccctgacccctggatgactttttgaaaggccatatctgtctctgtcactccattcttaaaactctttggtggccgggcatggtagctcacgcctgtaatcctagcactttgagaggctgaggttggtggatcgcttgaggtcaggagttttgagaccagcctggccaacatggtgaaaccctgtcttaaccaaaaaatacaaacattagccaggcatggtggtgggtgcctgtagtcccagctacctgggaggctgatgtgggagaatcatttgtacccaaaaggtggaggttgcagtgagctgagatggtgccactgcattccagcctgggtgacagagcaagactcctcaaaaaacaaacaaaaaaacaaccgatggctggccacggtggctcatgcctataatcccagcactttgggaggccaaggctggaggatcacttgaggtcagttcaagaccagcctgggcaacatggtgaaaccctgtttctactaaaaataaaaaaaaaattagtcaggtatggtggtgtgtgcctgtaaccccaactactccggaggctgaggcaggataatcgcttgaaccttggagttggaggttgcagtgagctgagattgcaccagtacactctagcctgggtgacagagtgagactccgtctcaagaaaaaaaaaaaaaaacaaaaacaaaaccaaaaaactctttggtggcacctgacaggtctcaggatgaatttcttggcctggccacacaaaggccttgtcccttgccactatctacctcccacctcataagactctgaattcgctattcacttcatgatatcctcagccccatgtgcttccctctgggcacttgtctcttgttgtgtcattgctgatttgtctgattgcattccccattagaaatttgctccttaaggactgagactgtccatggcagcattttcagcacttagcatagtgctgggcatcttttgccctgcaaaataatgaacagatcagcaaaggctggtaaatggcacacagtgcacctgcagctccattgctgcccacgtgcctgattgtttagacttacagtagctgggaaatggggagacaaggtgagagccatataaaagtacgtggataattagtatcctgcctttctttccaaacagcgggcaggctctggatctcggcgggatcaggccaggcagctgatcatagatctggagactcgagggagtcaggctcttcctttgttcatctcctgcttagaggacacaggccaggacatgctggcttcgtttctgcgaactaacaggcaagcagcaaagttgtcgaagccaaccctagaaaaccttaccccagtggtgctcagaccagagattcgcaaaccagaggttctcagaccggaaacacccagaccagtggacattggttctggaggatttggtgatgtcggtaagtagcaagagagtgattggtgggtgggcatgacacgtagtcatttgggactcactatgagtacagctgggtgggctgagattcagaatttaattttagcattgtctttctgaatgttcatagggatggcaaaattctgggaggttttcaggaggttgaatcttggcagcccctcctctgaaaagcatgtgttgaggtctgttttggatgtcccaggttttttgtttttgtttttgttttttttcctgcctttgagatagcaggccccaggttttgatcaatgtttccagagccatctattgttttggatttgcctttcagtctgggtgggtagcctggactacctcatgtctgggggcaggagacaggcctcagttgtatctgccccatacaaacagacatctgcaaagtatttacccttaccttcttcgtttatagcaaccttgcaaggcaggtatcattagacccatccttgttgatggagaaactgactgaagctcacggaaattaaacactttgccaaaggtcacacggctacatccaacaaaatgcataaatcccaagagtaagctgggtgatttttacctatgcatacccacaggtaactaacacccatatcatcaagatgaaaacattccggggtcctgtaagaccgttgactctctttccatttcttcccactttccctttcccaaggtaatcaccgttctcatctctatcgccagagatcccttttgcttgtccttaaacttcaatataaatcctatatagtcttatatgctcttgagcctggcttctttcattcatcattgtatctttgaaattcattcatattgttgtacatatcggtagttcattctttttaatttctacatggcattctgaataatccacagtttatttaaccattttcctactgatggacatgtgggttgttttcagttggggctttgttcccatggcagcgtgtggagctctagcacttcctgtttcatgggtgtctggtggaccattgcatggtatcaaagttaataatcataatagtaatggtgaacattattgagtaattgctatttgccaggcaccgttcggagtgcttacataaatgatctaatttaatctctccatctctcttgtaaggcaggtgctttgctgttagaaaaagtgagccacagattgggagatgacttgtgccaaatcacacagctagtgaggagtggagacagggctgcagcccgggcttacctgttctgtctgctctgcagggtagccccatgtgtgctttgtgggacacacctcattgatccgactcatgctggtggacattgtgttgtttctgcagttagccttgcatgtgcgtctagttctgactgcaggatatttctagaaatggaattgtgtgttaaagggtacttgttcctgtccgatagatgctaccaacttatacttcaaaaatatgtcattttagccaggtgtggtggtgtgagcctgtaggacaagctacttgagaggctgaggcaggaggactacatgagcctaggaattcacagccagcctgggtaacttagtgagatcctatctctaagaaaaaagaaattgaaaaattgtgtcttttttttttttttaattgaggcaaggtcttctgtggcccaggctggagtgcagtggcatgatcacggctcactgcatccttgaactcccaggctcaagcgatcctcccactcagcctcccaggtagctgtgtgcgccaccaggcctggctaatttttttgtattttttgtagagacagggtctcaccatgtggcccaggctggtcttgatctcctgggctcaagcaatcctcccatctcggcctcctggatagctgtgcatgttatccctggccattttttttttttttttttaagagggagtctcgctctgtcacccaggctggagtgcagtggcgcaatctcagctcactgcaacctccacctcctgggttcaagcaattatcctgcctcagcctcctgagtagctgggactacaggcagccgccaccatgcctggctaatttttgtatttttagtagagatggggtttcaccatgttgcctaggctgatcttgaactcctggcctcaagtgatccacctgcctcagcctcccaaagtgctgggattaaaggtgtgagccaccactcccagcccatgcctggccaattttaaaattttttgtagagatagggtcttaccgtgttgcccaggctgccctcaaactcctgtgctccagtagtctgcccacctcggcctcccaaagtgctggaattacaggtgtgagccactgcactcggcccaaattgtgtcattttataatctcaccaactgcgagtgaaggtgaccactttcccacattcttgccaacagtgaatattgacattttttcctgtgtgatgggtaaaaagtgctgttttctttcaacaaaaattcaccaaaactcattcatattgttgtgcatatcagtagttcattctttttaatttctagatggcagcagttcctgttctgaataatccacaatttatttaaccattttcctattgatggacatgtgggttgttttcagttggggctttgttcccatggcagcgtgtggagctctagcacttcctgtttcatgggtgcctggtggaccattgcatggtatcagagttaatattcataatagtaatggtgaacattattgagtacttgctgcataatggtgatttttgggcaatccactaaagcagagaaacagacaaacatgataagggtaggaagctgcatttgcttgaagtgtaaggaagaagactggttctggaattggccatgtgcattaccatcctgtaaaggaggcaggcagaatacaaagctcatctgttgttatttggttctgggaaatgtcaacgtgagtcatttaggaccaacagtcagaatttgaaacttcctgtttttttggaaggtgttttatttcctgtttcttgtgaatatttattcctagtaggagcttaattctgaagggtaaataacaacagcaatagtaagatcacttaattttttttactttattattattattttttgagatagggtcttactctgtcacccagggtggagtgcggtggtgtgttttcggctcactgcaacctctgcctcccaggttcaaacaattctctcacctcagcctcccaagtagctgggactacaggtgcaccaccatgcctggctagtttttgtattttttgatagagacaaggtttccccatgttggccaggctggtcttgaactcctgacctcaagtgataaacccgcctcagcctcccaaagtgctgggattataggtatgagccagcacggctggcccaagatcactttaaataatgtgaatatcactttgtagtatacacagtgttttttcaggtcatcaaaaccaccctgtgccgtggtagacatggcaagcccgtctgtcattatatgctacttacaggggaggaaactgggttctgagagcaacagtcacaaagtgagttccagtacagagctaggacttgggcctaggtcttctggcttaatagagcgactgtcccattttccatgagctgctgagagatgtcctttttagatgctgggccttagactccagagtactgcatgggaatgtttcccaaggtaggtttcatggtgacccacaaaggaagagctgtgtattcatatgtatgggaaggtctggctgagcaagaatagggccagcagcagagcctttaataagtgaatacaggaaaggatgctgtaggtcagtgtttcacactggggacgatttttccccgacctccaagggacatttgacaatgtctagagacaaatctggttgttatagctgagggtgggtgggtgctactggcatctagtgggtagacagagatgctgccaaaacccaacagtgtacagagtagctctgcacaataaagaagaatctggcccaaagggttagtgtggtggggctgagtacacacactgcactcatacatattcattgagcatgagtgtcaatgaataataatgtggacacatcagttttattgagttgtcaagtgtgtcgggtattgttctatgtgcctcacatgtattaattgtttgaggtgtcatcacaatcctatgaggttggtagttgctcctattatcctgtaatacagatggggaaatcagaagcccagagactctgagctccttgcccattgtgacacaggtgctaagtgttggagttgggatttgaacccaagtacctcagactcactccatcactgtctcatgaagaacaaatggctcattctctttcttgtccctatatttgtgccattactcattagctcacacaaatgtttactaagtacctgttgggttctaggtgttggggatgcagcttcgaacaaggatgcccagtccttgccttcaggtggagaggggcaggtactcagttcatgcttgcctaatttggtctttattcacggctgtgggtagtgctatgaagctgaacacggtgctttagaggtgcatcattaggggacccaccagagagagtggctttgtctttgtatattcaaaggaaaatgccttttccttcagaatggaaggaactttcttagtttcagacgtgatgccttgtgtgtaactgcttgttccagccagggcctcttgcccgggaggactgggagaactgttggtggctgtgttctcatgattctccagagaaagagaaccaatagggggtgtgtgtatgtgtataaaacagcatcttttgttcaatgctgcatccccaacacctagaactcagcaggtacttagtaaacatttgcatgagctaatgattaatggcacatatacacagacaagaaagagaatgagccgttcgtttttttttttttttttgagacggagtcttgttctgttgcccaggctggagtgcagtggcgcgatctccgcacactgcaagctctgcctcctgggttcacgccattctctcgcctcagcctcccgagtatctgggactacaggcacctgccaccatgcccagctaatttttttgtattttttttagtagagacagggtttcaccatgttaaccagtatggtcttgatctcctgacctcgtgatctgtccgcctcagcctcccaaagtggtgggattacaggcgtgagccactgcacctggccaagccatttgtcctttatgaggcagtgatggagtgagtccgaggtacttggttcaaagcccaactccaacacttagcagctgtgtcacagtggacaagtagttgagtctctgggcctctgttttatatatatacatatacacacatacacacacggatatatatagaaagatatatgcattttttttgtgtgtgtatatatatatatctttatctaaaaacatatttattacaaggaacaggctcatgcaattatggacgctgagaagttccaagatctgccatctgcaagttggagaccaggaaagctggtggtgtagttccagtctgagtctgaaggcctgagatccaggagcaccaatggtagaagtcccattccaaaggcaggagaagactgatgtcccagctcaagtagtgagacagagagagatcaaattctcccattctccactgtttcgttctattcaggcccttgacggattggacgcggcccaccatcctggggagggccatctgctttactctgtctacctattcaaatcccattctcatccccaaaacactctcacaggcaccctgagaaatactgttatatttaaccaaatatttgggtaccctgtgatctagtcaagttgacctgtgaactcaaccatcagtggctttctctgctcatgccttgcctgggttggaacttccttgaaagtagaagttggcttttcagccctacctggcttcttggtctctttgctctggggctggtggctgtgctcacctcccattacaactcagggtctctgagcccccaattcccctctggcaaatggggatgtgtgccagtacttctgtgctgaagggcctgctctgaggagtaaatgaggcagtgtgtggagggacttcacatggggcctcctattgagtgagccttgggtcttgttggtcagctctgcttccttctgtgatttctaaattgccaagggctggggagggccagtcctagggcatcttcccttctgtagggtcccccagttcccctgtttctttctgtgtcctgattgaaaatcacagagtgctttgaccaccctgtgacccagccagctacaggtttttcccagcagacctgagcccaaacctgggccttaaacattctcaggcattgataaaggtatctaggtaggctgggcatggtggctcacgcctgtgatcccagcacttggggaggccaagacggatggatcacttgaggccagtagtttgagaccagcctggccaacatgatgaaaccctgtctctactaaaaatgcaaaaattagctgggcgtggtggtgtgtgcttgtaatcccagctacttgggaggctgaggcaggagaattgtttgaacctgggagacagaggttgcagtgagccaagattgtgccattgtactccagcctgggcgacagagcgggactctgtctgaaaaaaaaaaaaaaattaggtgtggtggtgtagtcctagctacttggatggcttaggagggagggtcacttgagcccagcaggcaaagtttgcaatgagttgagattgtaccactgcactccagcctggacaagagagtgagactccgtctccaaaaacaaaacaaaacaaaaaggtatctaggttatcacccaaaacaactgaaagaaaccagccttggccctgagccaaattccttaaaccctcatataaactccttaccctgacctcttcactttggaccaaacctaggtagacacctgtttttttttctcgcctccgcacctcgaggattgctttggccagatcgccctggcatttattgcttctttctttggaatcccaactggccccatcttaggacagtttggggcactcccttgtgggaactcttctgctgccacttctggggtgattccagcataggttcggagggacgaaaccccttctttcccttgggtggcagagaggatgtgcttgccctcttctgtttgtgttggagacctgggcacatgcccagtgactcaggctggaagactgattcttttgcacacacttagccatgtgtgtttattgtccccatgggagtggccatttcaggagaaactggtctcatgcaccttgtatctgaccatgtcacccaacttgaggggccctgaacatgccatgctcctgcatcctccctgcctttgctcatgccggggcctctgcctggagtgtctcctctccctctttctttgggcaccccttggttgatttgctccctccatgggcacctgtagcccttggcctcttgagagcagtcattttgctttatcaatagatatttctaatttggggaatgagtgaattcctcagtagtggatagtagttatatttttggggtacagcggaattttggaaatgagcaaatgttctcagaatgaagtctgtggatgaataggaattttcagggtaggtaaaaccatttctaactttaaaaatgggatgtgaatgggatgtgagtgcttttctgctgtggcctttaagctggcagaatagttcagacctgttctaagcaaggaatggcactgttattggaacaggagtatgggctccactgcaacttggaggtggccactgtattctccttgtttaaaaaagaaaaaatgtaggccgggcgtggtggctcatgcctgtaatcccagcactttgggagggtgaggcaggtggatcacctgaggtcaggagttcgagaccagcctggctaacatggtgaaaccccatctctactaaaaatacaaaaattagccaagcgtgatgcaggtgcctgtactcccagctacttgggaggctgaggcaggagaatcgcttgaacccaggaggcagaagttgcagcgaggcaagatcgcgccactgcactccagcctgggtgacagagcgagactctgtctcaaaaaaaaagaaaaaacatctcataaccttttaggctggtggccagtcaacttcttgctaacggaaatgaaaactcttttgatgttgatggaaaataatcatctttattcatttattcattctgcaagtatttcctgaggacctgctgtgtgctgggcccctgtggactcgcagacagtgagcatccgctctcctgagcttctctcacctctttctgctctggaatttcttctcaatgagaccacactatttctatactctctggtgtctggcttttttcacgcagcacgttttctttcttttttttttttttgagatggagttttgctcttgttgcccaggctggagtgcaatgacgtgatctcgactcactgcaacctctgcctcccaggttcaagcgattctcctgcctcagcctcccgagtagctgggattacaggcgcctgccccctcgcctggctaatttttctttttttttttttttttttgtatttttagtacagatggggtttcaccacgttggccaggctagtctcgaactcctgacctcaggtgatctgcctcccaaagtgccaggattataggcgtgagccaccgcacctggccttacgcagcacattttcaaggttatcccgcattgcgtgtatcagtgaagcggtgtcactcgtctggggtaaatacccaagattcattgtcttcacagccacggaagactaggacacggacatacagtgaggttcagagtggaagtataataggtgaaagaaagagaagagctctgtctgctgcagagagaggggttccagtgaaatgggttgctgtttctgcaatgaaatgcaaggggttttaaagatgagcctgaggagatggtgtctgatttacaaagggcacaaagattggtcagaccaggtgtttcatttgcataggatgcataaaactggttagggctaggtgtgccatttgcatgtggtgcgaaaagctggccagccccactccaatcttgtgttatgcagatgggttctctacctggccagtgccatgttgcctacttctttactgtcttgtggtaacaaaagggaagatagagcctctttgctgagtatatctggccccctggtagcccttttctattggcacagctgctggcattcactcctgtgagcttccagcttgcttatctatgtctgcagcttgatttttcaggctgctcttttttagaaaagaaatgatttgaggctgggtgcagtggctcacacctgtaatctcaacactttgggaggctgaggtgggtggatcaactgaggtcaagagtttgagactagcctggccaacatggtgaaaccccgtctctactaaaaatacaaaaaaattagccgggcatggtggtgggtgcctgtaattccagctacttgggaggctgagacaggagaattgcttgaatctgggaggtagagtttgcagtgagccaagatagtgccattgcactcctgcctgggcgacaagagtgaaactccgtctcaaaaaagaaaaagaaaaaagaaaaaaaagaaaagaaacgatttggggattttgttaaaagggaaattctgccgaggactgttttaccctcactatctgcctaaataatttctttctgtctcctgtatcatcagtagctcattcctttttaggctgtgtaatgttctcttgtgtggctgtatcacaatttgtatatctaccaaactgttgttagattggttgtttccatgttggggcgtgatgaataaggcctcagggaacattttggccaagtcttttgtgcccgtttgcactccttgctctttgatatatacctaagggtggacttgctgtcagagggtaggtgtgtgtttaactttgttagaaacctctaaacagatctccaaggtggctctcccaccagcagagtctgagggtctgagttctcgctgctccgttcttggggggctgtcctcacagagccccttgcccctcctctgctgtaacccaacattcatgtttctctctttctctgcctcttcaggtgctcttgagagtttgaggggaaatgcagatttggtgagtctccatgaaatttgggccagtagctcgggctctgggcccttccctccccacccctcaggtccttccctgcaggtgtgtcaggagcccagggaacccaaccctaggcagtgcagtgggggtctggtctcagcctccctgactccggcccagcgcctgctggggcagattgttcatctctgcgcttcctcatctgcaaagctgacagcagaagcagggcagacctgatgaggggcagtcatcgggatccagaccaagtcgccactctctcattcacaagtatttattgtgtggctcccatgctctgtgctggggccacctgggaaggagccatcagtcagttaggcgagagagaagttagacaaatgagtatataaatagaaatagtgataagtaccatcaacaaaagaacaggctgccttgagagaattacaaggggactgagcctggggagagggcagccttgggtgcctccaggtggcctgggcatggttctgctgacagagttctcaggtacaccccggcctaggtgacccgtgaggtcctttgggatgaatgctcatggctgttggatttccaggttaccagctcccttcccttaataccaagatgggggggtcaccttctagtgctagtcttccctgcagttgcttctcttttgccctggaatgccgggtggagaccctgctactccttgtgcgagagggcagaccccgttttcttcccgcctctccagactgtcctctagggagcgtggggagagcccgggtttacgtgggtccctgtgctggcaggcttacatcctgagcatggagccctgtggccactgcctcattatcaacaatgtgaacttctgccgtgagtccgggctccgcacccgcactggctccaacatcgactgtgagaagttgcggcgtcgcttctcctcgctgcatttcatggtggaggtgaagggcgacctgactgccaaggtacactcactatctgtggagggagacagggtggggggcagtgggtggggaagtatcttttgagggactccaaaagccagctgactccccaggcgagcccttacatctggaggaccatgggaggtaggacggcccagcggctacaggttcaagttcagacgcagaagtccgggtttgaggactggctctctcggccacctgctgtgtgacctcctgtgcctcagtttccttgtctggaaagcaggaatagtacctgcctccttgggttgttttgggggttagatgaacagtgcccaagcgtagcaccttctccccaaaaatggtggctattacgactgctgggactgtcagcacttcggtactggccctgggaaaccgagaaagtgctctgcccaggcgtttgggttgggccctttgttgttttattttttggggggggcgggggcacagagtcccactctgtcatccaggctggagtacagtggcgcgatctcggctcactgcaacctccacctcccaggttcaagcaattctcctgcctcagcctcctgagtagctgggattacaggtgtgtgccaccatgcctggctaaatttttttttttgtatttttagtagagacggggtttcaccatgttggccaggctggtctcgaactcgtgacctcaaatgatccacctgccttggcctcccaaagtgctgggattacaggcgtgaaccaccatgcctggccaggctgggcccttttattgttaggaacggtccagtctgcatctagacctatccgtgcttctggctcacctgcagccctctcttgtagaaaatggtgctggctttgctggagctggcgcagcaggaccacggtgctctggactgctgcgtggtggtcattctctctcacggctgtcaggtaggaagcctcccactgttccctgggcaggcattgggtactggccgtgccaagaggctgtgcaggggccatgtcccttcttgtgtccaaaacacccttggctttgtggaaaagggctgtggggccctgcccacctcctgttgttttcttgggagccatgtggtcctctgaggagttggctgcaccgtcctgggcaggtcggtgttcctgggagaagccctctgggagagggagggcagagaccaggtctgctcacgaagctcctgcacccagagtttgttcagaggcgggtacagcacacatgttgtctcagctcctgtctctgtcctgtgaggcactgccccaggccccttgctgctggtgggactcaggacaccaggcccactgggggcttggccccttacgtatttgtcactgtgattaagcccttaccccttactgggcctcagtttcctcatcttttaagttgaggagttggacagatcacagttataagctggggcctggagtccccctgtggtctgcacggtgttttgaaaactggcaaatttcacataaaaatcaggatttctagtttctcttgacaaaccgcaaaggtctggcctgacgaggccagcatcttcagccagtaaaactccagcctgtggctgggcagggctttccctttggtcctttctctcataatatggtccctagagctcatgaagaatgtggactcccaggccctaccctggacctcttcattccaagtccgcccagcaacaaggtttccaggtgatttccatgcccttgaggtctgagctgaactgatttaaagcagccactctcagcgttgagctgcctcagtcagaggggcctggaggaccatactgctgattaggaggtctgggtggggcccaggaatcacatttcttacaagttcccaagcgatattgatgccgctgctgcaggggccaaactttgagaaccactggtctagaggccgcagccagcactctccaggcacactggcccctagaggcacatgagtttgacatgcaaccccttgctgtcaaggtgtctttccagatgctgaccagggtctttccagaaccaacctgctctgtctcaatcagcctcgtgcccctggctttgaccttccaaatccttggctcccacaaaacctctgaacaggctgttggattcctactccaacttcttggttttgtaaccagggttcttggtcttctaggccagccacctgcagttcccaggggctgtctacggcacagatggatgccctgtgtcggtcgagaagattgtgaacatcttcaatgggaccagctgccccagcctgggagggaagcccaagctctttttcatccaggcctgtggtgggggtaagcagctcctcagcctccctctgggtgggtctggtggggagggagccgccacctgcttctttctccagcctgcccctcacagggcccatgaggtctctccaggcagtcagagggtaccacacatggtccctttttggcagcacctctgtctggctggagcaggccctgctctgtctgctttgtagaggtcagagtcttctgtttcatggcacagtggcatcatgggctcaagtaactttggcagcttcaattccaaagacttggcaaaaagaaagcagaagagagaggagaaacctctttttatttttcttgtcaccattctcctgacctccatcaactagaccccgtttccactatcccagagaaagggtggccacagctaaactgcatggagaaaccaaagaatttaaatattggaattttcaaaagtgtagttgtgggggttcgaggaacatttaaagattacttgggctgggtgcagtgtctcatgcccaacactttgggaggccgaggcaggaggattgcttgagccaggagttcgagaccagcctgggcaacacagcgagaccctgtctctatttttgttttgttttttaaatgtattacttggattctttgtagttttgctgtatgctctaattttaaacttaactcctattacagtgttatctgattttcttataaaaaaagagggaagagagacaaacatggggttcctagtttgtgggtcatgacaggaatatcagggagcgctagaaattctgtcccagggagtcccctctgccctaggctctccacggactggaacattcagaaggtatatcagttccttgcctccagcctgatctgccagagaagtgagcactgttataccatagcgctgtccagctcgtccagctgtgacatgggcacctgtggtctatttctcctgtgcacatccaactgccccatccctattccacgttggtggagttgggtggaggctacctaggagagcagtctctggtcacatcattcatccagtaagtgtttattgagcaccatctgtatataccaggctgtgcgttaggtgctggggataggggaaaaacagagtttcagtctcctggaatttataatttgacatgaactgtattaagtcactgtcatgacccatgcccataacttgaccacaagtgattgagaacacttgattaaccctggatgggctactgacctatctatcacacagccctgggccagttcatctctagacagctcagcaaatggggaaaataacagaacccactcccaagctcaggtgatcctcccacctcagcctcctgagtagctggggctacaggtgcacactaccatgcccagctaatttttctattttttttttgtagagacagggttttgccatgttgcccaggctggtcttgaactcctgggttcaagcaatctgctcacttcggcctcccaaagtgctgggattacaggcgtgagccactgtgcccaggcaactttaataatatttaatgcactaattggtgtgtgtacagtgattggttcattttaataactgaaaacccagcctgccccccgctcccaccccggaggacccagtgtcacataagagtcccccaccccgctgtcgccagcagagttccctcaggacaacagtaacaggaagtgaggaaggctgccactctcggggctgtagaaaccctgctctgcctcacctcctgtcttatccacagtgtgtggtccagcaatgctcttccttcggagcctccggtccctctttctcctatgaatcaaatgaaagacagaaagggcaggggaattaggaatgcaggctgagcaggcatacctactttctggacagttagtcagtcttgtgctcctcccatgccccatccagtctcagtctcaacagcagggagggcctttgtcacgtgaatatctgctgtcactcttaggactcagtagcagggcttccaaggcctttggtgacctggcccctgccacttcaccttccccagcctggcatgctccgagtccccagcacggcccagccttcccaggatgtccaggctcttgcttgctcttctacctgctcccctggctaactctttttttaaaattcatttttacttattttgttttagagatgggggtctcactatattgcccaggctagtcttgaactgttgggttcaagtgatactcccacctccgcctcccaaagtgctgggataacaggcatgagccaccgtgcctggcacctggctgactcttaatcatccatccttctggttacaatttattgtcacttccctaaacaccccctttcttggccaaagtcagggttagctggcctttgtgctcctgcagcctctgtccctcccctaccatagcactgtctcattgtattgagatgggcttatcccctggtcagctctgaggggagggccaggcctaccctgcagccaggcccccagcctggcacagagcccacagtctggttgcgtctcatgtggattctaatttgaatgtaaaggagaaccatacaaaagcatctgtggtggttcacgcctgtaatcccaacagtttgggaggccaaggtgggaggatctcttgagacgaggagtttgagaccagtctctatcataaaatttaaaacattagccaggcctggtggtgtgtgcctatggtcccagctacttgggatgtttaggcaggaagatcgcttgagccctggaggtcgaggctacagtgagccatgtttacactattgcactccggcctgagtgacagagccagtctgtcacctgtctctaaaaaaataaaaaataaaaaaaaaatatgagccaaatttggcataatgtagatttccatcattaaaacaaaactcacagaaaacagcaagatttcaaagccagcatgcagtgattaagatatccctttggagtcgggtccttgctttgcctccgcaggctgcgtgacctggtgcttaacgcagttaccacatggtggcgccacgtcagctgagagcagaaatagaaaggtccccgttcttcactagtgcctggcgaggggtctgtttacatgcatcagaacacctgtcctgggttttgaggactcttgtattgctattttataactcactataatactttaaaaatatttaatttaaaaatcatttaataattaatttaaatataataataaataatttaaaaatcatttttaaataataattttaaaaccctccaacatgtcatccacccattcattaggaggtaacagcaccagggctgaaaaatgtgcattaaagtcgataactttggtgtgcaacgtcagcgtgataggcaaccaagtagccacctctctgaggctgagccgtcaattttggggtgacccctctttgggatttgagagatcgggctgagaagacagaaagcaatgacaatatgctgcagtggtcgtggattttctgtgcggagggaacatctcctcctactgtatatttattcttgtggggaatgagtcctgccctacggggagttttgcattaatgaggctctctaagaaccgaggctctccaagaaccaagccatgcatacagtgcagaacaccctaggcaaggccttcacatcagatttgtgggctgaggctgacacgtgaacggagctgccttagcgccccgcctgaccccctctttcctttcccccacaccccctgctctgatctgctgtctcttctcagcctctctgctcaccctgtctcttctggccattcttaacggcatcccccacttaggcatccctccgcccccacaggctgccaggcagacccagcaccatcacattcacgcctcaggcctccttgctgtgctgtttcacgtcattcccagacacctggggcagattccggagtctctaccaagaaaacaaccagaagcaatgaaccacaaaatctggagaaaaacatggctgtcacagatcaaagaggcccccctttggaggctgggggcctccgtgagaagcagtgggatagttgagaggcaaaaaacatggggcagaattccgcgcccctcatatcagctgggagaatgccaatgaccagtggtttctgagctttagctgtgtggggtaagaggtcaatagattttggtgttactattatggggttgccagagccacctctgttcctgccagatgggcccccagctcctctgggtgaactgtgacttccctcagtcacatagatccagccatgcaaacctgcctgcgttgcggccacagcacttgctgtctctctcaccaggaccgttctccctgatggcatcagggcctggatcacagtcacattctccaggagtgtttttgcaggggaccctctggatcactcctactccaacttcagcctatttttaaaaaaatttctctttttttttctgcagtatgtatacatagttaaatatatatttatattttttaaccaaagctcttgttagatgccttctttcctgagtagccctctgtgctccgccttaccccacccaccatgagccctactgcagaagacctcatcccggaagacctccgtcagtgtctccacttcagtagctctgtagctgagccatgtggggcacaagtcctgccaggacctctctgttttccaagcttggcactgcctttggggagtctagattttaaaatggaaaagacaaaaaatatggcaacctaaaaaagaaaataattcagaatgttataagctaatacagccatctcatttttgcatcttccttttggattccagcccatgagcacagtctgcttttctcagctaacgttatcccttaagcagttccccagatctccatggccttcatcatcactagctcaaatggctttataatgggccattttcatgacatgcactaatttactaaaccattttcctaatgtcggccatttaggtgatatctaatttttggctcacacaaccacaggtgtcttcatatagaaagcttttgactgcatttgaattattttcttaggaaattactggattagaaggtgtaaacatctccatggatttcattatccatgacttggtgtctatttggtatttttctgatggcttctttgattctagaaaaggatttgccatagtgcaagaagtacaaatgataacactaggacaaaatagagagggaacacaaggagagaagaaaagtaaaagtttggattccaaaaatacatcctaggatgtcctgcagctttctacagttctctaatgtacaagtgaattaaaaatttaaggtatacaacgactgattttagagataaaatcactttgcagatgtaaagaaacatggaaaaatcccagccattggtaatagtagactcaaaaatgaggtaggtcaaagtcccagtcagcctctgtctggggggaaaccccttaacttatctcagtctcagttgcctaattacataaaatggaatactgatagctacttgctagaggtggcctgcgcattttttacgctttccagccgccattggaaataagatcattggccaggggcggtggctcacgcctgtcatcccagcactttgggaggctgaggcgggcagatcacgaggtcaggagatcaagaccatcctggctaacacagtgaagccccatctctacaaataattagccaggtgtggtggcacacgcctgtagtcccagctacttgggaggctgagacaggagaatcgcttgaacccaggaggcgaagcttgcagtgagccatcgcgccactgcattccagcctggatgacagagcgagactctgtctcaaaaaaaaaaaaaaaaaaaaaaaaagatcactttcaagatccatggaatctggtgttctatagttctatatctggtatttgcaagacagaagtcaggaatagagactccagacacatttcttcccttggttgtcttaaaggggacactgtgatcttgacagcctgagtaaagggtttgagtgagtgcctatgatatagtggacagtttcctcaactatatttctaaaaaaagacaagttttatgtctttttaaaaattgtggcaaaatacatataacataaaatttactatcttaaccatttttttggggtgattgcttgagctcaggagtttgaggctggagcgagttaagatcatgccacttcaatctgggcaacagagcaaaagtgtgtctcttaaaaaaaaaaatgcctgtaatcccagcactttgggaggccaaggcaggcagattgcttgagcccaggagtttgagaccagcccgggcaacatggcaagatcctgtctctacaaaaaatacaaaaattaactgggtgtggtggcacctgtagtcccagctacttgagaggctgaggtgggggatcacttgagcctggcaggtcaaggctgcagtgagctgtgattgcaccactgcactccagcctgggtgacagaatgagactctctcaaaaaacaaaaacaaaaacaaaaaacaatcccccaaaacaaaacaaaaaaccactgccctctccccactgaatggtcctgccacccttttcaaaattcatttgaccacgcatgtgagggtgtatgtctgggctctattcaatgacattgacctatgtctgtctttatgccagtaccatactgttttgattactgtagctttgtagtaagttttgaaatcaggaagtgtgagtcctccaattttgctctttttccagattgttttgtctatttggggtcccttgagattctcgtgtgaattttaggatagattttctatttctgcaaaaaacatcattggggttttgatagggattacatttaatctatggattgctttgggtagtattgagatctttaagttttctaatccatgaacataggatatatttccatttatttatatcttttttttttttttcttgagacagagtctcgctctgttgtcagactggaggactgtggcgccatctcggctcactgcaacctctgactccctggttcaagcaattctcctgcttcagcctcctgagtagctgggattacaggcacacgccaccacgcccagctaatttttatatttttagtagagacggggtttcaccatgttggctaggatggtctcaatctcctgacctagtgatccaccagcctcggtctcccaaagtgctgggattacaggcgtgagccactgtgcctggcctatgtcttctttatttttctttctttctttctttcttttttttttttttttttagatggagtcctgctctgttgcccaggctggagtgcaatggcacgatcttgactcactgcaacctccgcctcctggattcaagtgattttcctgcctcagcctcccaagtagctgggattacaggtgcccaccaccacgcctgggtaatttttgtattttttaatagagacggggttttaccatgttggccaggcttgtttcaaactcctgacctcaggtgatctgcctgccttggcctcccaaagtgctgggattacaggtgtgagccactgtgcccggctctttttcttttttgagactgggtcttgctttgtcacccaggctgaagtgcagtggcgcgatcactgcacactgcagcctcaactgcttggactcaagtggttctcccacctcagcctcacgagtagctgggaccacaggcacatgccaccacacctggctaaattttttattatgtgtagagatgaggttttgctggtctggaactcctgggctcaagggatcctcctgcctcagcctcccaaagtgttgagattacaggcgtgagccatggcatccagccttctttctttcagcaatgttttgtagttttcattttacaagtctttcatcttggttaagttaatttctaactattttattatttttgatgctattgtcaatggaaccatttttgtaatttctttttctgattgttcattgttagtgtatagaaatggaagtattttttgtggttggcttcgtatcctgctaatatgctaattttatttgttctaatagtgtttcatctttagggttttctgcatataaaatcataccatttgtgagtagagataattttactccttctttccaatttgaatgtcttttatttctttttcttgcctccttgctctattaacttctagtaatgtgttgaatagaagtggcaaaagcagaaattcttgccttcttcctgatcttatagaaaaaggtttcagtctttcaccattgagtataatgtttgctgtgggtttttcatatatggcttttactatgttgaggtagtttccttctattctgagtttgttgactgtttttatcatgaaagcttgttgaattttgtcatgtgcttttttctgcatcaattgagatgatgatgtagggtttttttcattctcttatgaaccccaaaaatctgagacaggtctcagtcaatttaagaagtttcttttgccaaagttaaggatgcacgcccaggagacaggtctatgcctttctctgaacatgaattttagggttccaaatttaaaggggaaagggcaggatattgagaagtacacagttttcaggtaagagcagggtagggggaaatagtcattcaagcatttgtctggctcagtgaatttgcatttttacgtaaggtaacatagggcaggggaaaatgcagggaacctgcatttttacgtaagataacaaagacaaatggggcaggggaataatcagatatgcatttgtgccaggtgggcagaggggtgatgcctctgtaaagataagctatccatttacattgccgtggtgaattttatcagacaactatcttggagctcaccaggaatttccttgtgggcaaaatatgggagaggtgtgtagcttttcatcttgtagccatcttatttaggaaccaaaacggggaggcaggtttgcgtgacccagttcccagcttgacttttccgtttggcttaatgagtttggggtcccaagatttattttcctttcacactgttaatgtagtatattgcaccgactttcatatgttgaaccatccttgtctgtgtatttcaatgacaagaggtgtttgtttctgcttcctgcagagcagaaagaccatgggtttgaggtggcctccacttcccctgaagacgagtcccctggcagtaaccccgagccagatgccaccccgttccaggaaggtttgaggaccttcgaccagctggacgccatatctagtttgcccacacccagtgacatctttgtgtcctactctactttcccaggtgagcacatcagaagggctcgtcctcgcagccagtgggtcttcccgtctgccctagaggcagctgtgtggtgagagaaaagaccagggtatgagtcctggttctgtcttttgcccctctgtgaccctgagcaagttacttctctctgagcctcggctcaggctgagcgggcaaggatgcgcgctgcaaggaggcctgcgcccttgggttcctatgcctcacttgcctctcctctgcctgaccctgcctctgccttcgcatctttagcaggggaataggaatcgtgcctcaggggtttccatgggaattaaacaaggtggctggcacgtcactgagcacagtgcggggcacgtagtagttgcagcaagcggtagtttccttccttcttttttttttttttttttttttttgagatggaatctcgctctgttgcccaggctggagtgcagtggcgcgatcttgggtcactgcaagctctgcatcccgggttcacaccattctcctgcctcagcctcccaagtagctgggactacaagcacctgccaccacgcctggctaattttttgtatttttagtagagatggggtttcaccgtgttagccacgatggtctcgatctcctgacctcgtgatccacctgcctcggcttcccaaagtgctgggattacaggcgtgagccaccgcgcccagcctttttttttttttttttgagacggagtcttgctttgtcgcccaggctggagttcagtagcatgatctcagctcactgcaacctccacctcccgggttgaagtaattctcctgccttagcctcctaagtagctgggattacaggcatgcatcaccacacccagctaatttttgtatttttagtagacacagggtttcaccatgttggccaggctggtcaagaattcctgacctcaagtgatttgcccacctcggccttccaaaatgctgggattacaggtgtgagccactgtgcctggcagtttccttcctttcttatgtcttggatgagtcacttgacttttccaagccttggtttccttgctgggaaaacaggaattatagccggaatcaggggatggtcatgagggtgaaataagatcatgattagggcagagcctcaggggccaggctgctcctgttggatgtatgtatgagtcaaggtctggagggcgcccgagccagcgtgcatggccagaggggtggtggggagccggcggaggggtggctctccagcagtgttcagccctcctccctccaaaggttttgtttcctggagggaccccaagagtggctcctggtacgttgagaccctggacgacatctttgagcagtgggctcactctgaagacctgcagtccctcctgcttagggtgagtgctgccttcctctgcaaaggagaggggaggctgctgaggggcagcgtgtcctcctggggctggggatttggggtgagcagggcaggcccaaaccaagggtaaaaggtagtagactcctgcctctgagccttggagtcggcacttttgtgtctctttatgagaggcatcctgcctgtggtgacgtttgccctttattcaaagagttgccttccctgtctcctccaaggtccccaggttgacacctcccgctcctccactgatggagctggtcctcagtgccagcgcaggatggctctgtccagaccctgaaggcgggtcatgggcccctccctatatcctgtgggcatcatgtagtcttctactcttgaccctcaagaattgtgaacccctccttgtacatcgccttctcaggaggccccagtgaggaaacagatagggaagggtggcctgataggcccagtcctactccatagaaacccgactcagagcagttgcttcctctgagggtcctgtggccttgtggctgccttgggaggcagcatgtatgggccccagctgctctgctcaggtattcatgccacgagaaggggctgcgaggctggggccactcctggctccttgcaaatatttcagtctgatttgaactttatgaatttggaaattttgaattttgagttttttaaaggtaaagttgaggtgcgtattctttaagccctcctgctcaaagaggctgcagtttgagctgtttttaaggtgcgggttgagtggacattccccccagcccctcttgaattcttccttcagtccagagaactgaactcacagagctctccatggtcatgtcttacaggtcgctaatgctgtttcggtgaaagggatttataaacagatgcctggttgctttaatttcctccggaaaaaacttttctttaaaacatcataaggccagggcccctcaccctgccttatcttgcaccccaaagctttcctgccccaggcctgaaagaggctgaggcctggactttcctgca

SEQ ID NO: 15499 - DNA, 31827 bp, Homo sapiens
agcggatcggcggctcctgcggcggtgccggctgcggctggtggaagagctgcaggtggaccagctctgggacgccctgctgagccgcgagctgttcaggccccatatgatcgaggacatccaggtgcgcccccggccccctgtccccgcgctgcacggccgggtccccacgcccctcgaggaggcgttgtgcgggagcctagccttccctgtggcttcaaacccctcagcggagccaaagaatcccaaacacctcttagtcgggtgttcgctaaagcgattccatgccatactcagtcagcgtacactgttagtgcttgtgtttcttgtgtaaaggaaaaatgtgagacacatcttgagaactttgaataagaaacaattcatgaattggagaacatcagactgaaagagctttagtgttgcaatgacaaaacgtcagaggcaagtatttattgggaaaatgtggaagcaaaataaagaaattatttgattggtttgcagttacaaaattgccttttttttttaaggtctgttaattgactgcttttggctggtcttaagttttatttctctctaacataagcatttatcagatatgacccaagttaaattttgcttatgtttgcagtttaagcaagatttaggtcacttaggatacctgattggttttgtctgctcaggaattcttcatggttggtctccattttaatttacgttaatacttgcgaggaaggaggcgtgtgcgtttttacttttctagcatagaggtttcgggaacccactttggcatcaggctgcctggcagcgtgttcttgggccagtcacttaccctctttgagccacagtttctgggctgtgaaatgggaataagaataatactgtcataaggactaaatgaaataacggatgtgaaactgtagtgctaggcacagagcgggggatcagcgtaccctgccctctttggccagccccttctgtgttcagtttatgttttgttaagaggttttggaaatgaggggacctgatgcagaatggagaataatgaagtcaaacatttgaggttttgtttaaaagcactttcccatctttgtctcatttgaccctcatcacaggcctgtgaggatgcaggagatatttcctaccatgaggtgcagtaggtgtgagtggctggctggatatccctggccagtgccctggcccagggaaagagtctttaaataattgagtatcatatgagtaattattcattaataataaaataagttttgtgccttctgtgtggcccctactggggaacagtaatggtttgaggccacagtccttgccttcaggaatgttcacggggatcacaaactcaaatgcccatggaggaccaatggatgggcgtcatagtggatagcctttgcactgccctccgtctccagctgagtatggccatatcaacaaatggcccagtattgccacatcttacacttattttgaggcagggtctcactcttgcccagcctggagtgcagggatgagatcatggctcactgcgaccttgacctcctgggcttaagtggtcttcctgcctcagcctttagagcagctgggactttaggcacatgccaccatgcctggctaattaaaaaaaattttttttttgtacagataggagtcttgctatgttgcctagatgagtctcaaactcttggcctcaagtgattctcctgcctcagtgttgggattacaggtgtgagccactgtacccggcccagctttcacatcttaaaaaagaagctgaaaatcttgattcctctgtcaaattccctggcttaaaatgttagcaacaaattcagaaattttttaagaaccttgtgggaaccacaggttgccattttgccattcagtatggctgaaaaacaggcaggttttggaaccagttggatctgggctctcatcctggccttgttacatattagcaagttgtaaaaaaccacaaccaatgagccaaacaaacagaaaaaccctatgactcagtttccctgaaattttttaccctaaaaagttgggaagttctaatttaactctataaagttattgagggagaaaaagatgaaacaatgcatttaacacagtgttgacctcctggagtgttcagcaaatgtggagagaaacctaaacaccaccatctatttgcatgtagccaactgttctgctagtgagacttaccttctcagtggcactgtaggtctgtgctgttcccaacagtagccattagccacatgtcgttaaaggtaaatttgaagtaattaaaattaaataaaactaaaaattggtagggtcaagccttacagggcctgtgggtttttctcctcgtgtgcggagatgagagatcgtagaaataaagacacaggagaaagagatagaaaaaaagacagctgggcccgggggaccactaccacctagacgtggagacagggtagtggccccgaatgcctggctgcgctgttattggatataaggcaaggggacagggtaaggagggtgaatcttctaagtgattgataaggtgaagcaagtcacgtgatcataggacagggggcccttcccttttaggtagctgaagcagagagagaaggcagcatatgtcagcgttttcttctatgcacttataagaaagatcaaagactttaagactttcactatttcttctaccgctatctatgaacttcaaacaggaaccaggagtacgggaggaacatgaaagtgggcaaggagcgtgaccatggaagcacagcaccacagggaggggtttaggtctccggatgactgcgggcaggcatggataatatccagcctcccacaagaagctggtggagcagagtgctccctgacgcctccaaggaaaggagactccctttcttttttttttttttttgaggtggtgtcccactttttcgcccaggctggagtgcaatggtacgatctcagctcactgcaacctccaccttccgggttcaagctattttccttttttttttttttttttttgagacggagtctcgctctgtcgcccaggctggagtgcagtgccgcaatctcggctcactgcaagctccgcctcccgggttcatgccattctcctccctcagcctcccgagtagctgggtctacaggcacccgccaccacgcccggctaattttttgtatttttagtagagatggggtttcaccgtgttagccaggatggtctcgatctcctgacctcgtgatctgcccaccttggcctcccaaagtgctgggattacaggcttgagccaccgcgcccagccagggttcaagctgttctgcctcagcctcctgagtagctggaattacaggtgcgcactaccacgcccagctaatttttttgtatttttagtagagacgggtttcaccgtgttggtcaggctggtcttgaactcctaaccttgtgatctgcctgccttggcctcccaaagtgctgggattacaggcgtgagccaccgcgcctggcaggagactccccttcgcggtctgctaagtaatgggtgtctccccagacactggcattaccgcttgaccaaggagccctcaagcggcccttatgcgggcctgacagagggctcacctcttgccttctaggtcacttctcacaatgtcccttcagcacctgaccctatacccgccggttattcctaagttatattagcaatgcaacaaagagtaatattaaaagctaatgattaataatgtttataataatgattgataattgtccatgatcatctctatacctaatttgtattatgactattcttattctaactattttctttattatactgaaacagtttgtggcttcagtctcttgcctcggcacctgggtaatctttcgcccacaaaaattcagttcctcagttgtactacccaagtgcttaatggtcatgtgatatatggttactaaataggacaatacagaccaagaatatttccatcatcacggaaggttctcatagacagtgctgctgtaggatagttgaggacacggtgccatcttatccctgtggatcctgagaacctgtccagtgctgggtatctgaggacaggtggcagataaccagactcttccttcttagtgactgaccccaccatcctgacacctctcaatttttttttttgagacagggtcttgctctgtcacccaggctgaagtgcagtggtgctatcacagctcactgcagccttatctcctgggctcgagccatcctcttgggagcctcagcctcctgagtagctgggactacaggtgcgtgacaccatacctggctttttttttgttattttttgtagagacagggtctcactgtgttgtccaggctggtctcgaactgggctcaagctatcctcccacttcagcctcccaaagtgctggaattgcaagcatgagccactgtgcctggcctgcctgtcaaccttgacccttgctctgtcttcacagtccccccagtcagtgcccatgtcctatggaccctctctctttgtatctctgctttgtcctttcacttctctctattctagctgcaccatctttgctgcctcctgatctggctatggctcactcctttccatttttcaccctgacccctggatgactttttgaaaggccatatctgtctctgtcactccattcttaaaactctttggtggccgggcatggtagctcacgcctgtaatcctagcactttgagaggctgaggttggtggatcgcttgaggtcaggagttttgagaccagcctggccaacatggtgaaaccctgtcttaaccaaaaaatacaaacattagccaggcatggtggtgggtgcctgtagtcccagctacctgggaggctgatgtgggagaatcatttgtacccaaaaggtggaggttgcagtgagctgagatggtgccactgcattccagcctgggtgacagagcaagactcctcaaaaaacaaacaaaaaaacaaccgatggctggccacggtggctcatgcctataatcccagcactttgggaggccaaggctggaggatcacttgaggtcagttcaagaccagcctgggcaacatggtgaaaccctgtttctactaaaaataaaaaaaaaattagtcaggtatggtggtgtgtgcctgtaaccccaactactccggaggctgaggcaggataatcgcttgaaccttggagttggaggttgcagtgagctgagattgcaccagtacactctagcctgggtgacagagtgagactccgtctcaagaaaaaaaaaaaaaaacaaaaacaaaaccaaaaaactctttggtggcacctgacaggtctcaggatgaatttcttggcctggccacacaaaggccttgtcccttgccactatctacctcccacctcataagactctgaattcgctattcacttcatgatatcctcagccccatgtgcttccctctgggcacttgtctcttgttgtgtcattgctgatttgtctgattgcattccccattagaaatttgctccttaaggactgagactgtccatggcagcattttcagcacttagcatagtgctgggcatcttttgccctgcaaaataatgaacagatcagcaaaggctggtaaatggcacacagtgcacctgcagctccattgctgcccacgtgcctgattgtttagacttacagtagctgggaaatggggagacaaggtgagagccatataaaagtacgtggataattagtatcctgcctttctttccaaacagcgggcaggctctggatctcggcgggatcaggccaggcagctgatcatagatctggagactcgagggagtcaggctcttcctttgttcatctcctgcttagaggacacaggccaggacatgctggcttcgtttctgcgaactaacaggcaagcagcaaagttgtcgaagccaaccctagaaaaccttaccccagtggtgctcagaccagagattcgcaaaccagaggttctcagaccggaaacacccagaccagtggacattggttctggaggatttggtgatgtcggtaagtagcaagagagtgattggtgggtgggcatgacacgtagtcatttgggactcactatgagtacagctgggtgggctgagattcagaatttaattttagcattgtctttctgaatgttcatagggatggcaaaattctgggaggttttcaggaggttgaatcttggcagcccctcctctgaaaagcatgtgttgaggtctgttttggatgtcccaggttttttgtttttgtttttgttttttttcctgcctttgagatagcaggccccaggttttgatcaatgtttccagagccatctattgttttggatttgcctttcagtctgggtgggtagcctggactacctcatgtctgggggcaggagacaggcctcagttgtatctgccccatacaaacagacatctgcaaagtatttacccttaccttcttcgtttatagcaaccttgcaaggcaggtatcattagacccatccttgttgatggagaaactgactgaagctcacggaaattaaacactttgccaaaggtcacacggctacatccaacaaaatgcataaatcccaagagtaagctgggtgatttttacctatgcatacccacaggtaactaacacccatatcatcaagatgaaaacattccggggtcctgtaagaccgttgactctctttccatttcttcccactttccctttcccaaggtaatcaccgttctcatctctatcgccagagatcccttttgcttgtccttaaacttcaatataaatcctatatagtcttatatgctcttgagcctggcttctttcattcatcattgtatctttgaaattcattcatattgttgtacatatcggtagttcattctttttaatttctacatggcattctgaataatccacagtttatttaaccattttcctactgatggacatgtgggttgttttcagttggggctttgttcccatggcagcgtgtggagctctagcacttcctgtttcatgggtgtctggtggaccattgcatggtatcaaagttaataatcataatagtaatggtgaacattattgagtaattgctatttgccaggcaccgttcggagtgcttacataaatgatctaatttaatctctccatctctcttgtaaggcaggtgctttgctgttagaaaaagtgagccacagattgggagatgacttgtgccaaatcacacagctagtgaggagtggagacagggctgcagcccgggcttacctgttctgtctgctctgcagggtagccccatgtgtgctttgtgggacacacctcattgatccgactcatgctggtggacattgtgttgtttctgcagttagccttgcatgtgcgtctagttctgactgcaggatatttctagaaatggaattgtgtgttaaagggtacttgttcctgtccgatagatgctaccaacttatacttcaaaaatatgtcattttagccaggtgtggtggtgtgagcctgtaggacaagctacttgagaggctgaggcaggaggactacatgagcctaggaattcacagccagcctgggtaacttagtgagatcctatctctaagaaaaaagaaattgaaaaattgtgtcttttttttttttttaattgaggcaaggtcttctgtggcccaggctggagtgcagtggcatgatcacggctcactgcatccttgaactcccaggctcaagcgatcctcccactcagcctcccaggtagctgtgtgcgccaccaggcctggctaatttttttgtattttttgtagagacagggtctcaccatgtggcccaggctggtcttgatctcctgggctcaagcaatcctcccatctcggcctcctggatagctgtgcatgttatccctggccattttttttttttttttttaagagggagtctcgctctgtcacccaggctggagtgcagtggcgcaatctcagctcactgcaacctccacctcctgggttcaagcaattatcctgcctcagcctcctgagtagctgggactacaggcagccgccaccatgcctggctaatttttgtatttttagtagagatggggtttcaccatgttgcctaggctgatcttgaactcctggcctcaagtgatccacctgcctcagcctcccaaagtgctgggattaaaggtgtgagccaccactcccagcccatgcctggccaattttaaaattttttgtagagatagggtcttaccgtgttgcccaggctgccctcaaactcctgtgctccagtagtctgcccacctcggcctcccaaagtgctggaattacaggtgtgagccactgcactcggcccaaattgtgtcattttataatctcaccaactgcgagtgaaggtgaccactttcccacattcttgccaacagtgaatattgacattttttcctgtgtgatgggtaaaaagtgctgttttctttcaacaaaaattcaccaaaactcattcatattgttgtgcatatcagtagttcattctttttaatttctagatggcagcagttcctgttctgaataatccacaatttatttaaccattttcctattgatggacatgtgggttgttttcagttggggctttgttcccatggcagcgtgtggagctctagcacttcctgtttcatgggtgcctggtggaccattgcatggtatcagagttaatattcataatagtaatggtgaacattattgagtacttgctgcataatggtgatttttgggcaatccactaaagcagagaaacagacaaacatgataagggtaggaagctgcatttgcttgaagtgtaaggaagaagactggttctggaattggccatgtgcattaccatcctgtaaaggaggcaggcagaatacaaagctcatctgttgttatttggttctgggaaatgtcaacgtgagtcatttaggaccaacagtcagaatttgaaacttcctgtttttttggaaggtgttttatttcctgtttcttgtgaatatttattcctagtaggagcttaattctgaagggtaaataacaacagcaatagtaagatcacttaattttttttactttattattattattttttgagatagggtcttactctgtcacccagggtggagtgcggtggtgtgttttcggctcactgcaacctctgcctcccaggttcaaacaattctctcacctcagcctcccaagtagctgggactacaggtgcaccaccatgcctggctagtttttgtattttttgatagagacaaggtttccccatgttggccaggctggtcttgaactcctgacctcaagtgataaacccgcctcagcctcccaaagtgctgggattataggtatgagccagcacggctggcccaagatcactttaaataatgtgaatatcactttgtagtatacacagtgttttttcaggtcatcaaaaccaccctgtgccgtggtagacatggcaagcccgtctgtcattatatgctacttacaggggaggaaactgggttctgagagcaacagtcacaaagtgagttccagtacagagctaggacttgggcctaggtcttctggcttaatagagcgactgtcccattttccatgagctgctgagagatgtcctttttagatgctgggccttagactccagagtactgcatgggaatgtttcccaaggtaggtttcatggtgacccacaaaggaagagctgtgtattcatatgtatgggaaggtctggctgagcaagaatagggccagcagcagagcctttaataagtgaatacaggaaaggatgctgtaggtcagtgtttcacactggggacgatttttccccgacctccaagggacatttgacaatgtctagagacaaatctggttgttatagctgagggtgggtgggtgctactggcatctagtgggtagacagagatgctgccaaaacccaacagtgtacagagtagctctgcacaataaagaagaatctggcccaaagggttagtgtggtggggctgagtacacacactgcactcatacatattcattgagcatgagtgtcaatgaataataatgtggacacatcagttttattgagttgtcaagtgtgtcgggtattgttctatgtgcctcacatgtattaattgtttgaggtgtcatcacaatcctatgaggttggtagttgctcctattatcctgtaatacagatggggaaatcagaagcccagagactctgagctccttgcccattgtgacacaggtgctaagtgttggagttgggatttgaacccaagtacctcagactcactccatcactgtctcatgaagaacaaatggctcattctctttcttgtccctatatttgtgccattactcattagctcacacaaatgtttactaagtacctgttgggttctaggtgttggggatgcagcttcgaacaaggatgcccagtccttgccttcaggtggagaggggcaggtactcagttcatgcttgcctaatttggtctttattcacggctgtgggtagtgctatgaagctgaacacggtgctttagaggtgcatcattaggggacccaccagagagagtggctttgtctttgtatattcaaaggaaaatgccttttccttcagaatggaaggaactttcttagtttcagacgtgatgccttgtgtgtaactgcttgttccagccagggcctcttgcccgggaggactgggagaactgttggtggctgtgttctcatgattctccagagaaagagaaccaatagggggtgtgtgtatgtgtataaaacagcatcttttgttcaatgctgcatccccaacacctagaactcagcaggtacttagtaaacatttgcatgagctaatgattaatggcacatatacacagacaagaaagagaatgagccgttcgtttttttttttttttttgagacggagtcttgttctgttgcccaggctggagtgcagtggcgcgatctccgcacactgcaagctctgcctcctgggttcacgccattctctcgcctcagcctcccgagtatctgggactacaggcacctgccaccatgcccagctaatttttttgtattttttttagtagagacagggtttcaccatgttaaccagtatggtcttgatctcctgacctcgtgatctgtccgcctcagcctcccaaagtggtgggattacaggcgtgagccactgcacctggccaagccatttgtcctttatgaggcagtgatggagtgagtccgaggtacttggttcaaagcccaactccaacacttagcagctgtgtcacagtggacaagtagttgagtctctgggcctctgttttatatatatacatatacacacatacacacacggatatatatagaaagatatatgcattttttttgtgtgtgtatatatatatatctttatctaaaaacatatttattacaaggaacaggctcatgcaattatggacgctgagaagttccaagatctgccatctgcaagttggagaccaggaaagctggtggtgtagttccagtctgagtctgaaggcctgagatccaggagcaccaatggtagaagtcccattccaaaggcaggagaagactgatgtcccagctcaagtagtgagacagagagagatcaaattctcccattctccactgtttcgttctattcaggcccttgacggattggacgcggcccaccatcctggggagggccatctgctttactctgtctacctattcaaatcccattctcatccccaaaacactctcacaggcaccctgagaaatactgttatatttaaccaaatatttgggtaccctgtgatctagtcaagttgacctgtgaactcaaccatcagtggctttctctgctcatgccttgcctgggttggaacttccttgaaagtagaagttggcttttcagccctacctggcttcttggtctctttgctctggggctggtggctgtgctcacctcccattacaactcagggtctctgagcccccaattcccctctggcaaatggggatgtgtgccagtacttctgtgctgaagggcctgctctgaggagtaaatgaggcagtgtgtggagggacttcacatggggcctcctattgagtgagccttgggtcttgttggtcagctctgcttccttctgtgatttctaaattgccaagggctggggagggccagtcctagggcatcttcccttctgtagggtcccccagttcccctgtttctttctgtgtcctgattgaaaatcacagagtgctttgaccaccctgtgacccagccagctacaggtttttcccagcagacctgagcccaaacctgggccttaaacattctcaggcattgataaaggtatctaggtaggctgggcatggtggctcacgcctgtgatcccagcacttggggaggccaagacggatggatcacttgaggccagtagtttgagaccagcctggccaacatgatgaaaccctgtctctactaaaaatgcaaaaattagctgggcgtggtggtgtgtgcttgtaatcccagctacttgggaggctgaggcaggagaattgtttgaacctgggagacagaggttgcagtgagccaagattgtgccattgtactccagcctgggcgacagagcgggactctgtctgaaaaaaaaaaaaaaattaggtgtggtggtgtagtcctagctacttggatggcttaggagggagggtcacttgagcccagcaggcaaagtttgcaatgagttgagattgtaccactgcactccagcctggacaagagagtgagactccgtctccaaaaacaaaacaaaacaaaaaggtatctaggttatcacccaaaacaactgaaagaaaccagccttggccctgagccaaattccttaaaccctcatataaactccttaccctgacctcttcactttggaccaaacctaggtagacacctgtttttttttctcgcctccgcacctcgaggattgctttggccagatcgccctggcatttattgcttctttctttggaatcccaactggccccatcttaggacagtttggggcactcccttgtgggaactcttctgctgccacttctggggtgattccagcataggttcggagggacgaaaccccttctttcccttgggtggcagagaggatgtgcttgccctcttctgtttgtgttggagacctgggcacatgcccagtgactcaggctggaagactgattcttttgcacacacttagccatgtgtgtttattgtccccatgggagtggccatttcaggagaaactggtctcatgcaccttgtatctgaccatgtcacccaacttgaggggccctgaacatgccatgctcctgcatcctccctgcctttgctcatgccggggcctctgcctggagtgtctcctctccctctttctttgggcaccccttggttgatttgctccctccatgggcacctgtagcccttggcctcttgagagcagtcattttgctttatcaatagatatttctaatttggggaatgagtgaattcctcagtagtggatagtagttatatttttggggtacagcggaattttggaaatgagcaaatgttctcagaatgaagtctgtggatgaataggaattttcagggtaggtaaaaccatttctaactttaaaaatgggatgtgaatgggatgtgagtgcttttctgctgtggcctttaagctggcagaatagttcagacctgttctaagcaaggaatggcactgttattggaacaggagtatgggctccactgcaacttggaggtggccactgtattctccttgtttaaaaaagaaaaaatgtaggccgggcgtggtggctcatgcctgtaatcccagcactttgggagggtgaggcaggtggatcacctgaggtcaggagttcgagaccagcctggctaacatggtgaaaccccatctctactaaaaatacaaaaattagccaagcgtgatgcaggtgcctgtactcccagctacttgggaggctgaggcaggagaatcgcttgaacccaggaggcagaagttgcagcgaggcaagatcgcgccactgcactccagcctgggtgacagagcgagactctgtctcaaaaaaaaagaaaaaacatctcataaccttttaggctggtggccagtcaacttcttgctaacggaaatgaaaactcttttgatgttgatggaaaataatcatctttattcatttattcattctgcaagtatttcctgaggacctgctgtgtgctgggcccctgtggactcgcagacagtgagcatccgctctcctgagcttctctcacctctttctgctctggaatttcttctcaatgagaccacactatttctatactctctggtgtctggcttttttcacgcagcacgttttctttcttttttttttttttgagatggagttttgctcttgttgcccaggctggagtgcaatgacgtgatctcgactcactgcaacctctgcctcccaggttcaagcgattctcctgcctcagcctcccgagtagctgggattacaggcgcctgccccctcgcctggctaatttttctttttttttttttttttttgtatttttagtacagatggggtttcaccacgttggccaggctagtctcgaactcctgacctcaggtgatctgcctcccaaagtgccaggattataggcgtgagccaccgcacctggccttacgcagcacattttcaaggttatcccgcattgcgtgtatcagtgaagcggtgtcactcgtctggggtaaatacccaagattcattgtcttcacagccacggaagactaggacacggacatacagtgaggttcagagtggaagtataataggtgaaagaaagagaagagctctgtctgctgcagagagaggggttccagtgaaatgggttgctgtttctgcaatgaaatgcaaggggttttaaagatgagcctgaggagatggtgtctgatttacaaagggcacaaagattggtcagaccaggtgtttcatttgcataggatgcataaaactggttagggctaggtgtgccatttgcatgtggtgcgaaaagctggccagccccactccaatcttgtgttatgcagatgggttctctacctggccagtgccatgttgcctacttctttactgtcttgtggtaacaaaagggaagatagagcctctttgctgagtatatctggccccctggtagcccttttctattggcacagctgctggcattcactcctgtgagcttccagcttgcttatctatgtctgcagcttgatttttcaggctgctcttttttagaaaagaaatgatttgaggctgggtgcagtggctcacacctgtaatctcaacactttgggaggctgaggtgggtggatcaactgaggtcaagagtttgagactagcctggccaacatggtgaaaccccgtctctactaaaaatacaaaaaaattagccgggcatggtggtgggtgcctgtaattccagctacttgggaggctgagacaggagaattgcttgaatctgggaggtagagtttgcagtgagccaagatagtgccattgcactcctgcctgggcgacaagagtgaaactccgtctcaaaaaagaaaaagaaaaaagaaaaaaaagaaaagaaacgatttggggattttgttaaaagggaaattctgccgaggactgttttaccctcactatctgcctaaataatttctttctgtctcctgtatcatcagtagctcattcctttttaggctgtgtaatgttctcttgtgtggctgtatcacaatttgtatatctaccaaactgttgttagattggttgtttccatgttggggcgtgatgaataaggcctcagggaacattttggccaagtcttttgtgcccgtttgcactccttgctctttgatatatacctaagggtggacttgctgtcagagggtaggtgtgtgtttaactttgttagaaacctctaaacagatctccaaggtggctctcccaccagcagagtctgagggtctgagttctcgctgctccgttcttggggggctgtcctcacagagccccttgcccctcctctgctgtaacccaacattcatgtttctctctttctctgcctcttcaggtgctcttgagagtttgaggggaaatgcagatttggtgagtctccatgaaatttgggccagtagctcgggctctgggcccttccctccccacccctcaggtccttccctgcaggtgtgtcaggagcccagggaacccaaccctaggcagtgcagtgggggtctggtctcagcctccctgactccggcccagcgcctgctggggcagattgttcatctctgcgcttcctcatctgcaaagctgacagcagaagcagggcagacctgatgaggggcagtcatcgggatccagaccaagtcgccactctctcattcacaagtatttattgtgtggctcccatgctctgtgctggggccacctgggaaggagccatcagtcagttaggcgagagagaagttagacaaatgagtatataaatagaaatagtgataagtaccatcaacaaaagaacaggctgccttgagagaattacaaggggactgagcctggggagagggcagccttgggtgcctccaggtggcctgggcatggttctgctgacagagttctcaggtacaccccggcctaggtgacccgtgaggtcctttgggatgaatgctcatggctgttggatttccaggttaccagctcccttcccttaataccaagatgggggggtcaccttctagtgctagtcttccctgcagttgcttctcttttgccctggaatgccgggtggagaccctgctactccttgtgcgagagggcagaccccgttttcttcccgcctctccagactgtcctctagggagcgtggggagagcccgggtttacgtgggtccctgtgctggcaggcttacatcctgagcatggagccctgtggccactgcctcattatcaacaatgtgaacttctgccgtgagtccgggctccgcacccgcactggctccaacatcgactgtgagaagttgcggcgtcgcttctcctcgctgcatttcatggtggaggtgaagggcgacctgactgccaaggtacactcactatctgtggagggagacagggtggggggcagtgggtggggaagtatcttttgagggactccaaaagccagctgactccccaggcgagcccttacatctggaggaccatgggaggtaggacggcccagcggctacaggttcaagttcagacgcagaagtccgggtttgaggactggctctctcggccacctgctgtgtgacctcctgtgcctcagtttccttgtctggaaagcaggaatagtacctgcctccttgggttgttttgggggttagatgaacagtgcccaagcgtagcaccttctccccaaaaatggtggctattacgactgctgggactgtcagcacttcggtactggccctgggaaaccgagaaagtgctctgcccaggcgtttgggttgggccctttgttgttttattttttggggggggcgggggcacagagtcccactctgtcatccaggctggagtacagtggcgcgatctcggctcactgcaacctccacctcccaggttcaagcaattctcctgcctcagcctcctgagtagctgggattacaggtgtgtgccaccatgcctggctaaatttttttttttgtatttttagtagagacggggtttcaccatgttggccaggctggtctcgaactcgtgacctcaaatgatccacctgccttggcctcccaaagtgctgggattacaggcgtgaaccaccatgcctggccaggctgggcccttttattgttaggaacggtccagtctgcatctagacctatccgtgcttctggctcacctgcagccctctcttgtagaaaatggtgctggctttgctggagctggcgcagcaggaccacggtgctctggactgctgcgtggtggtcattctctctcacggctgtcaggtaggaagcctcccactgttccctgggcaggcattgggtactggccgtgccaagaggctgtgcaggggccatgtcccttcttgtgtccaaaacacccttggctttgtggaaaagggctgtggggccctgcccacctcctgttgttttcttgggagccatgtggtcctctgaggagttggctgcaccgtcctgggcaggtcggtgttcctgggagaagccctctgggagagggagggcagagaccaggtctgctcacgaagctcctgcacccagagtttgttcagaggcgggtacagcacacatgttgtctcagctcctgtctctgtcctgtgaggcactgccccaggccccttgctgctggtgggactcaggacaccaggcccactgggggcttggccccttacgtatttgtcactgtgattaagcccttaccccttactgggcctcagtttcctcatcttttaagttgaggagttggacagatcacagttataagctggggcctggagtccccctgtggtctgcacggtgttttgaaaactggcaaatttcacataaaaatcaggatttctagtttctcttgacaaaccgcaaaggtctggcctgacgaggccagcatcttcagccagtaaaactccagcctgtggctgggcagggctttccctttggtcctttctctcataatatggtccctagagctcatgaagaatgtggactcccaggccctaccctggacctcttcattccaagtccgcccagcaacaaggtttccaggtgatttccatgcccttgaggtctgagctgaactgatttaaagcagccactctcagcgttgagctgcctcagtcagaggggcctggaggaccatactgctgattaggaggtctgggtggggcccaggaatcacatttcttacaagttcccaagcgatattgatgccgctgctgcaggggccaaactttgagaaccactggtctagaggccgcagccagcactctccaggcacactggcccctagaggcacatgagtttgacatgcaaccccttgctgtcaaggtgtctttccagatgctgaccagggtctttccagaaccaacctgctctgtctcaatcagcctcgtgcccctggctttgaccttccaaatccttggctcccacaaaacctctgaacaggctgttggattcctactccaacttcttggttttgtaaccagggttcttggtcttctaggccagccacctgcagttcccaggggctgtctacggcacagatggatgccctgtgtcggtcgagaagattgtgaacatcttcaatgggaccagctgccccagcctgggagggaagcccaagctctttttcatccaggcctgtggtgggggtaagcagctcctcagcctccctctgggtgggtctggtggggagggagccgccacctgcttctttctccagcctgcccctcacagggcccatgaggtctctccaggcagtcagagggtaccacacatggtccctttttggcagcacctctgtctggctggagcaggccctgctctgtctgctttgtagaggtcagagtcttctgtttcatggcacagtggcatcatgggctcaagtaactttggcagcttcaattccaaagacttggcaaaaagaaagcagaagagagaggagaaacctctttttatttttcttgtcaccattctcctgacctccatcaactagaccccgtttccactatcccagagaaagggtggccacagctaaactgcatggagaaaccaaagaatttaaatattggaattttcaaaagtgtagttgtgggggttcgaggaacatttaaagattacttgggctgggtgcagtgtctcatgcccaacactttgggaggccgaggcaggaggattgcttgagccaggagttcgagaccagcctgggcaacacagcgagaccctgtctctatttttgttttgttttttaaatgtattacttggattctttgtagttttgctgtatgctctaattttaaacttaactcctattacagtgttatctgattttcttataaaaaaagagggaagagagacaaacatggggttcctagtttgtgggtcatgacaggaatatcagggagcgctagaaattctgtcccagggagtcccctctgccctaggctctccacggactggaacattcagaaggtatatcagttccttgcctccagcctgatctgccagagaagtgagcactgttataccatagcgctgtccagctcgtccagctgtgacatgggcacctgtggtctatttctcctgtgcacatccaactgccccatccctattccacgttggtggagttgggtggaggctacctaggagagcagtctctggtcacatcattcatccagtaagtgtttattgagcaccatctgtatataccaggctgtgcgttaggtgctggggataggggaaaaacagagtttcagtctcctggaatttataatttgacatgaactgtattaagtcactgtcatgacccatgcccataacttgaccacaagtgattgagaacacttgattaaccctggatgggctactgacctatctatcacacagccctgggccagttcatctctagacagctcagcaaatggggaaaataacagaacccactcccaagctcaggtgatcctcccacctcagcctcctgagtagctggggctacaggtgcacactaccatgcccagctaatttttctattttttttttgtagagacagggttttgccatgttgcccaggctggtcttgaactcctgggttcaagcaatctgctcacttcggcctcccaaagtgctgggattacaggcgtgagccactgtgcccaggcaactttaataatatttaatgcactaattggtgtgtgtacagtgattggttcattttaataactgaaaacccagcctgccccccgctcccaccccggaggacccagtgtcacataagagtcccccaccccgctgtcgccagcagagttccctcaggacaacagtaacaggaagtgaggaaggctgccactctcggggctgtagaaaccctgctctgcctcacctcctgtcttatccacagtgtgtggtccagcaatgctcttccttcggagcctccggtccctctttctcctatgaatcaaatgaaagacagaaagggcaggggaattaggaatgcaggctgagcaggcatacctactttctggacagttagtcagtcttgtgctcctcccatgccccatccagtctcagtctcaacagcagggagggcctttgtcacgtgaatatctgctgtcactcttaggactcagtagcagggcttccaaggcctttggtgacctggcccctgccacttcaccttccccagcctggcatgctccgagtccccagcacggcccagccttcccaggatgtccaggctcttgcttgctcttctacctgctcccctggctaactctttttttaaaattcatttttacttattttgttttagagatgggggtctcactatattgcccaggctagtcttgaactgttgggttcaagtgatactcccacctccgcctcccaaagtgctgggataacaggcatgagccaccgtgcctggcacctggctgactcttaatcatccatccttctggttacaatttattgtcacttccctaaacaccccctttcttggccaaagtcagggttagctggcctttgtgctcctgcagcctctgtccctcccctaccatagcactgtctcattgtattgagatgggcttatcccctggtcagctctgaggggagggccaggcctaccctgcagccaggcccccagcctggcacagagcccacagtctggttgcgtctcatgtggattctaatttgaatgtaaaggagaaccatacaaaagcatctgtggtggttcacgcctgtaatcccaacagtttgggaggccaaggtgggaggatctcttgagacgaggagtttgagaccagtctctatcataaaatttaaaacattagccaggcctggtggtgtgtgcctatggtcccagctacttgggatgtttaggcaggaagatcgcttgagccctggaggtcgaggctacagtgagccatgtttacactattgcactccggcctgagtgacagagccagtctgtcacctgtctctaaaaaaataaaaaataaaaaaaaaatatgagccaaatttggcataatgtagatttccatcattaaaacaaaactcacagaaaacagcaagatttcaaagccagcatgcagtgattaagatatccctttggagtcgggtccttgctttgcctccgcaggctgcgtgacctggtgcttaacgcagttaccacatggtggcgccacgtcagctgagagcagaaatagaaaggtccccgttcttcactagtgcctggcgaggggtctgtttacatgcatcagaacacctgtcctgggttttgaggactcttgtattgctattttataactcactataatactttaaaaatatttaatttaaaaatcatttaataattaatttaaatataataataaataatttaaaaatcatttttaaataataattttaaaaccctccaacatgtcatccacccattcattaggaggtaacagcaccagggctgaaaaatgtgcattaaagtcgataactttggtgtgcaacgtcagcgtgataggcaaccaagtagccacctctctgaggctgagccgtcaattttggggtgacccctctttgggatttgagagatcgggctgagaagacagaaagcaatgacaatatgctgcagtggtcgtggattttctgtgcggagggaacatctcctcctactgtatatttattcttgtggggaatgagtcctgccctacggggagttttgcattaatgaggctctctaagaaccgaggctctccaagaaccaagccatgcatacagtgcagaacaccctaggcaaggccttcacatcagatttgtgggctgaggctgacacgtgaacggagctgccttagcgccccgcctgaccccctctttcctttcccccacaccccctgctctgatctgctgtctcttctcagcctctctgctcaccctgtctcttctggccattcttaacggcatcccccacttaggcatccctccgcccccacaggctgccaggcagacccagcaccatcacattcacgcctcaggcctccttgctgtgctgtttcacgtcattcccagacacctggggcagattccggagtctctaccaagaaaacaaccagaagcaatgaaccacaaaatctggagaaaaacatggctgtcacagatcaaagaggcccccctttggaggctgggggcctccgtgagaagcagtgggatagttgagaggcaaaaaacatggggcagaattccgcgcccctcatatcagctgggagaatgccaatgaccagtggtttctgagctttagctgtgtggggtaagaggtcaatagattttggtgttactattatggggttgccagagccacctctgttcctgccagatgggcccccagctcctctgggtgaactgtgacttccctcagtcacatagatccagccatgcaaacctgcctgcgttgcggccacagcacttgctgtctctctcaccaggaccgttctccctgatggcatcagggcctggatcacagtcacattctccaggagtgtttttgcaggggaccctctggatcactcctactccaacttcagcctatttttaaaaaaatttctctttttttttctgcagtatgtatacatagttaaatatatatttatattttttaaccaaagctcttgttagatgccttctttcctgagtagccctctgtgctccgccttaccccacccaccatgagccctactgcagaagacctcatcccggaagacctccgtcagtgtctccacttcagtagctctgtagctgagccatgtggggcacaagtcctgccaggacctctctgttttccaagcttggcactgcctttggggagtctagattttaaaatggaaaagacaaaaaatatggcaacctaaaaaagaaaataattcagaatgttataagctaatacagccatctcatttttgcatcttccttttggattccagcccatgagcacagtctgcttttctcagctaacgttatcccttaagcagttccccagatctccatggccttcatcatcactagctcaaatggctttataatgggccattttcatgacatgcactaatttactaaaccattttcctaatgtcggccatttaggtgatatctaatttttggctcacacaaccacaggtgtcttcatatagaaagcttttgactgcatttgaattattttcttaggaaattactggattagaaggtgtaaacatctccatggatttcattatccatgacttggtgtctatttggtatttttctgatggcttctttgattctagaaaaggatttgccatagtgcaagaagtacaaatgataacactaggacaaaatagagagggaacacaaggagagaagaaaagtaaaagtttggattccaaaaatacatcctaggatgtcctgcagctttctacagttctctaatgtacaagtgaattaaaaatttaaggtatacaacgactgattttagagataaaatcactttgcagatgtaaagaaacatggaaaaatcccagccattggtaatagtagactcaaaaatgaggtaggtcaaagtcccagtcagcctctgtctggggggaaaccccttaacttatctcagtctcagttgcctaattacataaaatggaatactgatagctacttgctagaggtggcctgcgcattttttacgctttccagccgccattggaaataagatcattggccaggggcggtggctcacgcctgtcatcccagcactttgggaggctgaggcgggcagatcacgaggtcaggagatcaagaccatcctggctaacacagtgaagccccatctctacaaataattagccaggtgtggtggcacacgcctgtagtcccagctacttgggaggctgagacaggagaatcgcttgaacccaggaggcgaagcttgcagtgagccatcgcgccactgcattccagcctggatgacagagcgagactctgtctcaaaaaaaaaaaaaaaaaaaaaaaaagatcactttcaagatccatggaatctggtgttctatagttctatatctggtatttgcaagacagaagtcaggaatagagactccagacacatttcttcccttggttgtcttaaaggggacactgtgatcttgacagcctgagtaaagggtttgagtgagtgcctatgatatagtggacagtttcctcaactatatttctaaaaaaagacaagttttatgtctttttaaaaattgtggcaaaatacatataacataaaatttactatcttaaccatttttttggggtgattgcttgagctcaggagtttgaggctggagcgagttaagatcatgccacttcaatctgggcaacagagcaaaagtgtgtctcttaaaaaaaaaaatgcctgtaatcccagcactttgggaggccaaggcaggcagattgcttgagcccaggagtttgagaccagcccgggcaacatggcaagatcctgtctctacaaaaaatacaaaaattaactgggtgtggtggcacctgtagtcccagctacttgagaggctgaggtgggggatcacttgagcctggcaggtcaaggctgcagtgagctgtgattgcaccactgcactccagcctgggtgacagaatgagactctctcaaaaaacaaaaacaaaaacaaaaaacaatcccccaaaacaaaacaaaaaaccactgccctctccccactgaatggtcctgccacccttttcaaaattcatttgaccacgcatgtgagggtgtatgtctgggctctattcaatgacattgacctatgtctgtctttatgccagtaccatactgttttgattactgtagctttgtagtaagttttgaaatcaggaagtgtgagtcctccaattttgctctttttccagattgttttgtctatttggggtcccttgagattctcgtgtgaattttaggatagattttctatttctgcaaaaaacatcattggggttttgatagggattacatttaatctatggattgctttgggtagtattgagatctttaagttttctaatccatgaacataggatatatttccatttatttatatcttttttttttttttcttgagacagagtctcgctctgttgtcagactggaggactgtggcgccatctcggctcactgcaacctctgactccctggttcaagcaattctcctgcttcagcctcctgagtagctgggattacaggcacacgccaccacgcccagctaatttttatatttttagtagagacggggtttcaccatgttggctaggatggtctcaatctcctgacctagtgatccaccagcctcggtctcccaaagtgctgggattacaggcgtgagccactgtgcctggcctatgtcttctttatttttctttctttctttctttcttttttttttttttttttagatggagtcctgctctgttgcccaggctggagtgcaatggcacgatcttgactcactgcaacctccgcctcctggattcaagtgattttcctgcctcagcctcccaagtagctgggattacaggtgcccaccaccacgcctgggtaatttttgtattttttaatagagacggggttttaccatgttggccaggcttgtttcaaactcctgacctcaggtgatctgcctgccttggcctcccaaagtgctgggattacaggtgtgagccactgtgcccggctctttttcttttttgagactgggtcttgctttgtcacccaggctgaagtgcagtggcgcgatcactgcacactgcagcctcaactgcttggactcaagtggttctcccacctcagcctcacgagtagctgggaccacaggcacatgccaccacacctggctaaattttttattatgtgtagagatgaggttttgctggtctggaactcctgggctcaagggatcctcctgcctcagcctcccaaagtgttgagattacaggcgtgagccatggcatccagccttctttctttcagcaatgttttgtagttttcattttacaagtctttcatcttggttaagttaatttctaactattttattatttttgatgctattgtcaatggaaccatttttgtaatttctttttctgattgttcattgttagtgtatagaaatggaagtattttttgtggttggcttcgtatcctgctaatatgctaattttatttgttctaatagtgtttcatctttagggttttctgcatataaaatcataccatttgtgagtagagataattttactccttctttccaatttgaatgtcttttatttctttttcttgcctccttgctctattaacttctagtaatgtgttgaatagaagtggcaaaagcagaaattcttgccttcttcctgatcttatagaaaaaggtttcagtctttcaccattgagtataatgtttgctgtgggtttttcatatatggcttttactatgttgaggtagtttccttctattctgagtttgttgactgtttttatcatgaaagcttgttgaattttgtcatgtgcttttttctgcatcaattgagatgatgatgtagggtttttttcattctcttatgaaccccaaaaatctgagacaggtctcagtcaatttaagaagtttcttttgccaaagttaaggatgcacgcccaggagacaggtctatgcctttctctgaacatgaattttagggttccaaatttaaaggggaaagggcaggatattgagaagtacacagttttcaggtaagagcagggtagggggaaatagtcattcaagcatttgtctggctcagtgaatttgcatttttacgtaaggtaacatagggcaggggaaaatgcagggaacctgcatttttacgtaagataacaaagacaaatggggcaggggaataatcagatatgcatttgtgccaggtgggcagaggggtgatgcctctgtaaagataagctatccatttacattgccgtggtgaattttatcagacaactatcttggagctcaccaggaatttccttgtgggcaaaatatgggagaggtgtgtagcttttcatcttgtagccatcttatttaggaaccaaaacggggaggcaggtttgcgtgacccagttcccagcttgacttttccgtttggcttaatgagtttggggtcccaagatttattttcctttcacactgttaatgtagtatattgcaccgactttcatatgttgaaccatccttgtctgtgtatttcaatgacaagaggtgtttgtttctgcttcctgcagagcagaaagaccatgggtttgaggtggcctccacttcccctgaagacgagtcccctggcagtaaccccgagccagatgccaccccgttccaggaaggtttgaggaccttcgaccagctggacgccatatctagtttgcccacacccagtgacatctttgtgtcctactctactttcccaggtgagcacatcagaagggctcgtcctcgcagccagtgggtcttcccgtctgccctagaggcagctgtgtggtgagagaaaagaccagggtatgagtcctggttctgtcttttgcccctctgtgaccctgagcaagttacttctctctgagcctcggctcaggctgagcgggcaaggatgcgcgctgcaaggaggcctgcgcccttgggttcctatgcctcacttgcctctcctctgcctgaccctgcctctgccttcgcatctttagcaggggaataggaatcgtgcctcaggggtttccatgggaattaaacaaggtggctggcacgtcactgagcacagtgcggggcacgtagtagttgcagcaagcggtagtttccttccttcttttttttttttttttttttttttgagatggaatctcgctctgttgcccaggctggagtgcagtggcgcgatcttgggtcactgcaagctctgcatcccgggttcacaccattctcctgcctcagcctcccaagtagctgggactacaagcacctgccaccacgcctggctaattttttgtatttttagtagagatggggtttcaccgtgttagccacgatggtctcgatctcctgacctcgtgatccacctgcctcggcttcccaaagtgctgggattacaggcgtgagccaccgcgcccagcctttttttttttttttttgagacggagtcttgctttgtcgcccaggctggagttcagtagcatgatctcagctcactgcaacctccacctcccgggttgaagtaattctcctgccttagcctcctaagtagctgggattacaggcatgcatcaccacacccagctaatttttgtatttttagtagacacagggtttcaccatgttggccaggctggtcaagaattcctgacctcaagtgatttgcccacctcggccttccaaaatgctgggattacaggtgtgagccactgtgcctggcagtttccttcctttcttatgtcttggatgagtcacttgacttttccaagccttggtttccttgctgggaaaacaggaattatagccggaatcaggggatggtcatgagggtgaaataagatcatgattagggcagagcctcaggggccaggctgctcctgttggatgtatgtatgagtcaaggtctggagggcgcccgagccagcgtgcatggccagaggggtggtggggagccggcggaggggtggctctccagcagtgttcagccctcctccctccaaaggttttgtttcctggagggaccccaagagtggctcctggtacgttgagaccctggacgacatctttgagcagtgggctcactctgaagacctgcagtccctcctgcttagggtgagtgctgccttcctctgcaaaggagaggggaggctgctgaggggcagcgtgtcctcctggggctggggatttggggtgagcagggcaggcccaaaccaagggtaaaaggtagtagactcctgcctctgagccttggagtcggcacttttgtgtctctttatgagaggcatcctgcctgtggtgacgtttgccctttattcaaagagttgccttccctgtctcctccaaggtccccaggttgacacctcccgctcctccactgatggagctggtcctcagtgccagcgcaggatggctctgtccagaccctgaaggcgggtcatgggcccctccctatatcctgtgggcatcatgtagtcttctactcttgaccctcaagaattgtgaacccctccttgtacatcgccttctcaggaggccccagtgaggaaacagatagggaagggtggcctgataggcccagtcctactccatagaaacccgactcagagcagttgcttcctctgagggtcctgtggccttgtggctgccttgggaggcagcatgtatgggccccagctgctctgctcaggtattcatgccacgagaaggggctgcgaggctggggccactcctggctccttgcaaatatttcagtctgatttgaactttatgaatttggaaattttgaattttgagttttttaaaggtaaagttgaggtgcgtattctttaagccctcctgctcaaagaggctgcagtttgagctgtttttaaggtgcgggttgagtggacattccccccagcccctcttgaattcttccttcagtccagagaactgaactcacagagctctccatggtcatgtcttacaggtcgctaatgctgtttcggtgaaagggatttataaacagatgcctggttgctttaatttcctccggaaaaaacttttctttaaaacatcataaggccagggcccctcaccctgccttatcttgcaccccaaagctttcctgccccaggcctgaaagaggctgaggcctggactttcctgcaactcaaggactttgcagccggcacagggtctgctctttctctgccagtgacagacaggctcttagcagcttccagattgacgacaagtgctgaacagtggaggaagagggacagatgaatgccgtggattgcacgtggcctcttgagcagtggctggtccagggctagtgacttgtgtcccatgatccctgtgttgtctctagagcagggattaacctctgcactactgacatgtggggccaggtcaccctttgctgtgaggctgtcctgtacattgtgggatgttcagcactgtcccttgcctcaatgccagtaacgcgtcttcctgagtggtgccaaacaaaaaggttctcaggtgttgccaaatatgtcctggggtataaaactttcctcgcctgacaaccactggtctgtagggatttttggctacacacaaaccagtatcgctcatagatcagcaaaccggggcctactagagtctgaacagct

SEQ ID NO: 15500 - DNA, 31258 bp, Homo sapiens
atggacgaagcggatcggcggctcctgcggcggtgccggctgcggctggtggaagagctgcaggtggaccagctctgggacgccctgctgagccgcgagctgttcaggccccatatgatcgaggacatccaggtgcgcccccggccccctgtccccgcgctgcacggccgggtccccacgcccctcgaggaggcgttgtgcgggagcctagccttccctgtggcttcaaacccctcagcggagccaaagaatcccaaacacctcttagtcgggtgttcgctaaagcgattccatgccatactcagtcagcgtacactgttagtgcttgtgtttcttgtgtaaaggaaaaatgtgagacacatcttgagaactttgaataagaaacaattcatgaattggagaacatcagactgaaagagctttagtgttgcaatgacaaaacgtcagaggcaagtatttattgggaaaatgtggaagcaaaataaagaaattatttgattggtttgcagttacaaaattgccttttttttttaaggtctgttaattgactgcttttggctggtcttaagttttatttctctctaacataagcatttatcagatatgacccaagttaaattttgcttatgtttgcagtttaagcaagatttaggtcacttaggatacctgattggttttgtctgctcaggaattcttcatggttggtctccattttaatttacgttaatacttgcgaggaaggaggcgtgtgcgtttttacttttctagcatagaggtttcgggaacccactttggcatcaggctgcctggcagcgtgttcttgggccagtcacttaccctctttgagccacagtttctgggctgtgaaatgggaataagaataatactgtcataaggactaaatgaaataacggatgtgaaactgtagtgctaggcacagagcgggggatcagcgtaccctgccctctttggccagccccttctgtgttcagtttatgttttgttaagaggttttggaaatgaggggacctgatgcagaatggagaataatgaagtcaaacatttgaggttttgtttaaaagcactttcccatctttgtctcatttgaccctcatcacaggcctgtgaggatgcaggagatatttcctaccatgaggtgcagtaggtgtgagtggctggctggatatccctggccagtgccctggcccagggaaagagtctttaaataattgagtatcatatgagtaattattcattaataataaaataagttttgtgccttctgtgtggcccctactggggaacagtaatggtttgaggccacagtccttgccttcaggaatgttcacggggatcacaaactcaaatgcccatggaggaccaatggatgggcgtcatagtggatagcctttgcactgccctccgtctccagctgagtatggccatatcaacaaatggcccagtattgccacatcttacacttattttgaggcagggtctcactcttgcccagcctggagtgcagggatgagatcatggctcactgcgaccttgacctcctgggcttaagtggtcttcctgcctcagcctttagagcagctgggactttaggcacatgccaccatgcctggctaattaaaaaaaattttttttttgtacagataggagtcttgctatgttgcctagatgagtctcaaactcttggcctcaagtgattctcctgcctcagtgttgggattacaggtgtgagccactgtacccggcccagctttcacatcttaaaaaagaagctgaaaatcttgattcctctgtcaaattccctggcttaaaatgttagcaacaaattcagaaattttttaagaaccttgtgggaaccacaggttgccattttgccattcagtatggctgaaaaacaggcaggttttggaaccagttggatctgggctctcatcctggccttgttacatattagcaagttgtaaaaaaccacaaccaatgagccaaacaaacagaaaaaccctatgactcagtttccctgaaattttttaccctaaaaagttgggaagttctaatttaactctataaagttattgagggagaaaaagatgaaacaatgcatttaacacagtgttgacctcctggagtgttcagcaaatgtggagagaaacctaaacaccaccatctatttgcatgtagccaactgttctgctagtgagacttaccttctcagtggcactgtaggtctgtgctgttcccaacagtagccattagccacatgtcgttaaaggtaaatttgaagtaattaaaattaaataaaactaaaaattggtagggtcaagccttacagggcctgtgggtttttctcctcgtgtgcggagatgagagatcgtagaaataaagacacaggagaaagagatagaaaaaaagacagctgggcccgggggaccactaccacctagacgtggagacagggtagtggccccgaatgcctggctgcgctgttattggatataaggcaaggggacagggtaaggagggtgaatcttctaagtgattgataaggtgaagcaagtcacgtgatcataggacagggggcccttcccttttaggtagctgaagcagagagagaaggcagcatatgtcagcgttttcttctatgcacttataagaaagatcaaagactttaagactttcactatttcttctaccgctatctatgaacttcaaacaggaaccaggagtacgggaggaacatgaaagtgggcaaggagcgtgaccatggaagcacagcaccacagggaggggtttaggtctccggatgactgcgggcaggcatggataatatccagcctcccacaagaagctggtggagcagagtgctccctgacgcctccaaggaaaggagactccctttcttttttttttttttttgaggtggtgtcccactttttcgcccaggctggagtgcaatggtacgatctcagctcactgcaacctccaccttccgggttcaagctattttccttttttttttttttttttttgagacggagtctcgctctgtcgcccaggctggagtgcagtgccgcaatctcggctcactgcaagctccgcctcccgggttcatgccattctcctccctcagcctcccgagtagctgggtctacaggcacccgccaccacgcccggctaattttttgtatttttagtagagatggggtttcaccgtgttagccaggatggtctcgatctcctgacctcgtgatctgcccaccttggcctcccaaagtgctgggattacaggcttgagccaccgcgcccagccagggttcaagctgttctgcctcagcctcctgagtagctggaattacaggtgcgcactaccacgcccagctaatttttttgtatttttagtagagacgggtttcaccgtgttggtcaggctggtcttgaactcctaaccttgtgatctgcctgccttggcctcccaaagtgctgggattacaggcgtgagccaccgcgcctggcaggagactccccttcgcggtctgctaagtaatgggtgtctccccagacactggcattaccgcttgaccaaggagccctcaagcggcccttatgcgggcctgacagagggctcacctcttgccttctaggtcacttctcacaatgtcccttcagcacctgaccctatacccgccggttattcctaagttatattagcaatgcaacaaagagtaatattaaaagctaatgattaataatgtttataataatgattgataattgtccatgatcatctctatacctaatttgtattatgactattcttattctaactattttctttattatactgaaacagtttgtggcttcagtctcttgcctcggcacctgggtaatctttcgcccacaaaaattcagttcctcagttgtactacccaagtgcttaatggtcatgtgatatatggttactaaataggacaatacagaccaagaatatttccatcatcacggaaggttctcatagacagtgctgctgtaggatagttgaggacacggtgccatcttatccctgtggatcctgagaacctgtccagtgctgggtatctgaggacaggtggcagataaccagactcttccttcttagtgactgaccccaccatcctgacacctctcaatttttttttttgagacagggtcttgctctgtcacccaggctgaagtgcagtggtgctatcacagctcactgcagccttatctcctgggctcgagccatcctcttgggagcctcagcctcctgagtagctgggactacaggtgcgtgacaccatacctggctttttttttgttattttttgtagagacagggtctcactgtgttgtccaggctggtctcgaactgggctcaagctatcctcccacttcagcctcccaaagtgctggaattgcaagcatgagccactgtgcctggcctgcctgtcaaccttgacccttgctctgtcttcacagtccccccagtcagtgcccatgtcctatggaccctctctctttgtatctctgctttgtcctttcacttctctctattctagctgcaccatctttgctgcctcctgatctggctatggctcactcctttccatttttcaccctgacccctggatgactttttgaaaggccatatctgtctctgtcactccattcttaaaactctttggtggccgggcatggtagctcacgcctgtaatcctagcactttgagaggctgaggttggtggatcgcttgaggtcaggagttttgagaccagcctggccaacatggtgaaaccctgtcttaaccaaaaaatacaaacattagccaggcatggtggtgggtgcctgtagtcccagctacctgggaggctgatgtgggagaatcatttgtacccaaaaggtggaggttgcagtgagctgagatggtgccactgcattccagcctgggtgacagagcaagactcctcaaaaaacaaacaaaaaaacaaccgatggctggccacggtggctcatgcctataatcccagcactttgggaggccaaggctggaggatcacttgaggtcagttcaagaccagcctgggcaacatggtgaaaccctgtttctactaaaaataaaaaaaaaattagtcaggtatggtggtgtgtgcctgtaaccccaactactccggaggctgaggcaggataatcgcttgaaccttggagttggaggttgcagtgagctgagattgcaccagtacactctagcctgggtgacagagtgagactccgtctcaagaaaaaaaaaaaaaaacaaaaacaaaaccaaaaaactctttggtggcacctgacaggtctcaggatgaatttcttggcctggccacacaaaggccttgtcccttgccactatctacctcccacctcataagactctgaattcgctattcacttcatgatatcctcagccccatgtgcttccctctgggcacttgtctcttgttgtgtcattgctgatttgtctgattgcattccccattagaaatttgctccttaaggactgagactgtccatggcagcattttcagcacttagcatagtgctgggcatcttttgccctgcaaaataatgaacagatcagcaaaggctggtaaatggcacacagtgcacctgcagctccattgctgcccacgtgcctgattgtttagacttacagtagctgggaaatggggagacaaggtgagagccatataaaagtacgtggataattagtatcctgcctttctttccaaacagcgggcaggctctggatctcggcgggatcaggccaggcagctgatcatagatctggagactcgagggagtcaggctcttcctttgttcatctcctgcttagaggacacaggccaggacatgctggcttcgtttctgcgaactaacaggcaagcagcaaagttgtcgaagccaaccctagaaaaccttaccccagtggtgctcagaccagagattcgcaaaccagaggttctcagaccggaaacacccagaccagtggacattggttctggaggatttggtgatgtcggtaagtagcaagagagtgattggtgggtgggcatgacacgtagtcatttgggactcactatgagtacagctgggtgggctgagattcagaatttaattttagcattgtctttctgaatgttcatagggatggcaaaattctgggaggttttcaggaggttgaatcttggcagcccctcctctgaaaagcatgtgttgaggtctgttttggatgtcccaggttttttgtttttgtttttgttttttttcctgcctttgagatagcaggccccaggttttgatcaatgtttccagagccatctattgttttggatttgcctttcagtctgggtgggtagcctggactacctcatgtctgggggcaggagacaggcctcagttgtatctgccccatacaaacagacatctgcaaagtatttacccttaccttcttcgtttatagcaaccttgcaaggcaggtatcattagacccatccttgttgatggagaaactgactgaagctcacggaaattaaacactttgccaaaggtcacacggctacatccaacaaaatgcataaatcccaagagtaagctgggtgatttttacctatgcatacccacaggtaactaacacccatatcatcaagatgaaaacattccggggtcctgtaagaccgttgactctctttccatttcttcccactttccctttcccaaggtaatcaccgttctcatctctatcgccagagatcccttttgcttgtccttaaacttcaatataaatcctatatagtcttatatgctcttgagcctggcttctttcattcatcattgtatctttgaaattcattcatattgttgtacatatcggtagttcattctttttaatttctacatggcattctgaataatccacagtttatttaaccattttcctactgatggacatgtgggttgttttcagttggggctttgttcccatggcagcgtgtggagctctagcacttcctgtttcatgggtgtctggtggaccattgcatggtatcaaagttaataatcataatagtaatggtgaacattattgagtaattgctatttgccaggcaccgttcggagtgcttacataaatgatctaatttaatctctccatctctcttgtaaggcaggtgctttgctgttagaaaaagtgagccacagattgggagatgacttgtgccaaatcacacagctagtgaggagtggagacagggctgcagcccgggcttacctgttctgtctgctctgcagggtagccccatgtgtgctttgtgggacacacctcattgatccgactcatgctggtggacattgtgttgtttctgcagttagccttgcatgtgcgtctagttctgactgcaggatatttctagaaatggaattgtgtgttaaagggtacttgttcctgtccgatagatgctaccaacttatacttcaaaaatatgtcattttagccaggtgtggtggtgtgagcctgtaggacaagctacttgagaggctgaggcaggaggactacatgagcctaggaattcacagccagcctgggtaacttagtgagatcctatctctaagaaaaaagaaattgaaaaattgtgtcttttttttttttttaattgaggcaaggtcttctgtggcccaggctggagtgcagtggcatgatcacggctcactgcatccttgaactcccaggctcaagcgatcctcccactcagcctcccaggtagctgtgtgcgccaccaggcctggctaatttttttgtattttttgtagagacagggtctcaccatgtggcccaggctggtcttgatctcctgggctcaagcaatcctcccatctcggcctcctggatagctgtgcatgttatccctggccattttttttttttttttttaagagggagtctcgctctgtcacccaggctggagtgcagtggcgcaatctcagctcactgcaacctccacctcctgggttcaagcaattatcctgcctcagcctcctgagtagctgggactacaggcagccgccaccatgcctggctaatttttgtatttttagtagagatggggtttcaccatgttgcctaggctgatcttgaactcctggcctcaagtgatccacctgcctcagcctcccaaagtgctgggattaaaggtgtgagccaccactcccagcccatgcctggccaattttaaaattttttgtagagatagggtcttaccgtgttgcccaggctgccctcaaactcctgtgctccagtagtctgcccacctcggcctcccaaagtgctggaattacaggtgtgagccactgcactcggcccaaattgtgtcattttataatctcaccaactgcgagtgaaggtgaccactttcccacattcttgccaacagtgaatattgacattttttcctgtgtgatgggtaaaaagtgctgttttctttcaacaaaaattcaccaaaactcattcatattgttgtgcatatcagtagttcattctttttaatttctagatggcagcagttcctgttctgaataatccacaatttatttaaccattttcctattgatggacatgtgggttgttttcagttggggctttgttcccatggcagcgtgtggagctctagcacttcctgtttcatgggtgcctggtggaccattgcatggtatcagagttaatattcataatagtaatggtgaacattattgagtacttgctgcataatggtgatttttgggcaatccactaaagcagagaaacagacaaacatgataagggtaggaagctgcatttgcttgaagtgtaaggaagaagactggttctggaattggccatgtgcattaccatcctgtaaaggaggcaggcagaatacaaagctcatctgttgttatttggttctgggaaatgtcaacgtgagtcatttaggaccaacagtcagaatttgaaacttcctgtttttttggaaggtgttttatttcctgtttcttgtgaatatttattcctagtaggagcttaattctgaagggtaaataacaacagcaatagtaagatcacttaattttttttactttattattattattttttgagatagggtcttactctgtcacccagggtggagtgcggtggtgtgttttcggctcactgcaacctctgcctcccaggttcaaacaattctctcacctcagcctcccaagtagctgggactacaggtgcaccaccatgcctggctagtttttgtattttttgatagagacaaggtttccccatgttggccaggctggtcttgaactcctgacctcaagtgataaacccgcctcagcctcccaaagtgctgggattataggtatgagccagcacggctggcccaagatcactttaaataatgtgaatatcactttgtagtatacacagtgttttttcaggtcatcaaaaccaccctgtgccgtggtagacatggcaagcccgtctgtcattatatgctacttacaggggaggaaactgggttctgagagcaacagtcacaaagtgagttccagtacagagctaggacttgggcctaggtcttctggcttaatagagcgactgtcccattttccatgagctgctgagagatgtcctttttagatgctgggccttagactccagagtactgcatgggaatgtttcccaaggtaggtttcatggtgacccacaaaggaagagctgtgtattcatatgtatgggaaggtctggctgagcaagaatagggccagcagcagagcctttaataagtgaatacaggaaaggatgctgtaggtcagtgtttcacactggggacgatttttccccgacctccaagggacatttgacaatgtctagagacaaatctggttgttatagctgagggtgggtgggtgctactggcatctagtgggtagacagagatgctgccaaaacccaacagtgtacagagtagctctgcacaataaagaagaatctggcccaaagggttagtgtggtggggctgagtacacacactgcactcatacatattcattgagcatgagtgtcaatgaataataatgtggacacatcagttttattgagttgtcaagtgtgtcgggtattgttctatgtgcctcacatgtattaattgtttgaggtgtcatcacaatcctatgaggttggtagttgctcctattatcctgtaatacagatggggaaatcagaagcccagagactctgagctccttgcccattgtgacacaggtgctaagtgttggagttgggatttgaacccaagtacctcagactcactccatcactgtctcatgaagaacaaatggctcattctctttcttgtccctatatttgtgccattactcattagctcacacaaatgtttactaagtacctgttgggttctaggtgttggggatgcagcttcgaacaaggatgcccagtccttgccttcaggtggagaggggcaggtactcagttcatgcttgcctaatttggtctttattcacggctgtgggtagtgctatgaagctgaacacggtgctttagaggtgcatcattaggggacccaccagagagagtggctttgtctttgtatattcaaaggaaaatgccttttccttcagaatggaaggaactttcttagtttcagacgtgatgccttgtgtgtaactgcttgttccagccagggcctcttgcccgggaggactgggagaactgttggtggctgtgttctcatgattctccagagaaagagaaccaatagggggtgtgtgtatgtgtataaaacagcatcttttgttcaatgctgcatccccaacacctagaactcagcaggtacttagtaaacatttgcatgagctaatgattaatggcacatatacacagacaagaaagagaatgagccgttcgtttttttttttttttttgagacggagtcttgttctgttgcccaggctggagtgcagtggcgcgatctccgcacactgcaagctctgcctcctgggttcacgccattctctcgcctcagcctcccgagtatctgggactacaggcacctgccaccatgcccagctaatttttttgtattttttttagtagagacagggtttcaccatgttaaccagtatggtcttgatctcctgacctcgtgatctgtccgcctcagcctcccaaagtggtgggattacaggcgtgagccactgcacctggccaagccatttgtcctttatgaggcagtgatggagtgagtccgaggtacttggttcaaagcccaactccaacacttagcagctgtgtcacagtggacaagtagttgagtctctgggcctctgttttatatatatacatatacacacatacacacacggatatatatagaaagatatatgcattttttttgtgtgtgtatatatatatatctttatctaaaaacatatttattacaaggaacaggctcatgcaattatggacgctgagaagttccaagatctgccatctgcaagttggagaccaggaaagctggtggtgtagttccagtctgagtctgaaggcctgagatccaggagcaccaatggtagaagtcccattccaaaggcaggagaagactgatgtcccagctcaagtagtgagacagagagagatcaaattctcccattctccactgtttcgttctattcaggcccttgacggattggacgcggcccaccatcctggggagggccatctgctttactctgtctacctattcaaatcccattctcatccccaaaacactctcacaggcaccctgagaaatactgttatatttaaccaaatatttgggtaccctgtgatctagtcaagttgacctgtgaactcaaccatcagtggctttctctgctcatgccttgcctgggttggaacttccttgaaagtagaagttggcttttcagccctacctggcttcttggtctctttgctctggggctggtggctgtgctcacctcccattacaactcagggtctctgagcccccaattcccctctggcaaatggggatgtgtgccagtacttctgtgctgaagggcctgctctgaggagtaaatgaggcagtgtgtggagggacttcacatggggcctcctattgagtgagccttgggtcttgttggtcagctctgcttccttctgtgatttctaaattgccaagggctggggagggccagtcctagggcatcttcccttctgtagggtcccccagttcccctgtttctttctgtgtcctgattgaaaatcacagagtgctttgaccaccctgtgacccagccagctacaggtttttcccagcagacctgagcccaaacctgggccttaaacattctcaggcattgataaaggtatctaggtaggctgggcatggtggctcacgcctgtgatcccagcacttggggaggccaagacggatggatcacttgaggccagtagtttgagaccagcctggccaacatgatgaaaccctgtctctactaaaaatgcaaaaattagctgggcgtggtggtgtgtgcttgtaatcccagctacttgggaggctgaggcaggagaattgtttgaacctgggagacagaggttgcagtgagccaagattgtgccattgtactccagcctgggcgacagagcgggactctgtctgaaaaaaaaaaaaaaattaggtgtggtggtgtagtcctagctacttggatggcttaggagggagggtcacttgagcccagcaggcaaagtttgcaatgagttgagattgtaccactgcactccagcctggacaagagagtgagactccgtctccaaaaacaaaacaaaacaaaaaggtatctaggttatcacccaaaacaactgaaagaaaccagccttggccctgagccaaattccttaaaccctcatataaactccttaccctgacctcttcactttggaccaaacctaggtagacacctgtttttttttctcgcctccgcacctcgaggattgctttggccagatcgccctggcatttattgcttctttctttggaatcccaactggccccatcttaggacagtttggggcactcccttgtgggaactcttctgctgccacttctggggtgattccagcataggttcggagggacgaaaccccttctttcccttgggtggcagagaggatgtgcttgccctcttctgtttgtgttggagacctgggcacatgcccagtgactcaggctggaagactgattcttttgcacacacttagccatgtgtgtttattgtccccatgggagtggccatttcaggagaaactggtctcatgcaccttgtatctgaccatgtcacccaacttgaggggccctgaacatgccatgctcctgcatcctccctgcctttgctcatgccggggcctctgcctggagtgtctcctctccctctttctttgggcaccccttggttgatttgctccctccatgggcacctgtagcccttggcctcttgagagcagtcattttgctttatcaatagatatttctaatttggggaatgagtgaattcctcagtagtggatagtagttatatttttggggtacagcggaattttggaaatgagcaaatgttctcagaatgaagtctgtggatgaataggaattttcagggtaggtaaaaccatttctaactttaaaaatgggatgtgaatgggatgtgagtgcttttctgctgtggcctttaagctggcagaatagttcagacctgttctaagcaaggaatggcactgttattggaacaggagtatgggctccactgcaacttggaggtggccactgtattctccttgtttaaaaaagaaaaaatgtaggccgggcgtggtggctcatgcctgtaatcccagcactttgggagggtgaggcaggtggatcacctgaggtcaggagttcgagaccagcctggctaacatggtgaaaccccatctctactaaaaatacaaaaattagccaagcgtgatgcaggtgcctgtactcccagctacttgggaggctgaggcaggagaatcgcttgaacccaggaggcagaagttgcagcgaggcaagatcgcgccactgcactccagcctgggtgacagagcgagactctgtctcaaaaaaaaagaaaaaacatctcataaccttttaggctggtggccagtcaacttcttgctaacggaaatgaaaactcttttgatgttgatggaaaataatcatctttattcatttattcattctgcaagtatttcctgaggacctgctgtgtgctgggcccctgtggactcgcagacagtgagcatccgctctcctgagcttctctcacctctttctgctctggaatttcttctcaatgagaccacactatttctatactctctggtgtctggcttttttcacgcagcacgttttctttcttttttttttttttgagatggagttttgctcttgttgcccaggctggagtgcaatgacgtgatctcgactcactgcaacctctgcctcccaggttcaagcgattctcctgcctcagcctcccgagtagctgggattacaggcgcctgccccctcgcctggctaatttttctttttttttttttttttttgtatttttagtacagatggggtttcaccacgttggccaggctagtctcgaactcctgacctcaggtgatctgcctcccaaagtgccaggattataggcgtgagccaccgcacctggccttacgcagcacattttcaaggttatcccgcattgcgtgtatcagtgaagcggtgtcactcgtctggggtaaatacccaagattcattgtcttcacagccacggaagactaggacacggacatacagtgaggttcagagtggaagtataataggtgaaagaaagagaagagctctgtctgctgcagagagaggggttccagtgaaatgggttgctgtttctgcaatgaaatgcaaggggttttaaagatgagcctgaggagatggtgtctgatttacaaagggcacaaagattggtcagaccaggtgtttcatttgcataggatgcataaaactggttagggctaggtgtgccatttgcatgtggtgcgaaaagctggccagccccactccaatcttgtgttatgcagatgggttctctacctggccagtgccatgttgcctacttctttactgtcttgtggtaacaaaagggaagatagagcctctttgctgagtatatctggccccctggtagcccttttctattggcacagctgctggcattcactcctgtgagcttccagcttgcttatctatgtctgcagcttgatttttcaggctgctcttttttagaaaagaaatgatttgaggctgggtgcagtggctcacacctgtaatctcaacactttgggaggctgaggtgggtggatcaactgaggtcaagagtttgagactagcctggccaacatggtgaaaccccgtctctactaaaaatacaaaaaaattagccgggcatggtggtgggtgcctgtaattccagctacttgggaggctgagacaggagaattgcttgaatctgggaggtagagtttgcagtgagccaagatagtgccattgcactcctgcctgggcgacaagagtgaaactccgtctcaaaaaagaaaaagaaaaaagaaaaaaaagaaaagaaacgatttggggattttgttaaaagggaaattctgccgaggactgttttaccctcactatctgcctaaataatttctttctgtctcctgtatcatcagtagctcattcctttttaggctgtgtaatgttctcttgtgtggctgtatcacaatttgtatatctaccaaactgttgttagattggttgtttccatgttggggcgtgatgaataaggcctcagggaacattttggccaagtcttttgtgcccgtttgcactccttgctctttgatatatacctaagggtggacttgctgtcagagggtaggtgtgtgtttaactttgttagaaacctctaaacagatctccaaggtggctctcccaccagcagagtctgagggtctgagttctcgctgctccgttcttggggggctgtcctcacagagccccttgcccctcctctgctgtaacccaacattcatgtttctctctttctctgcctcttcaggtgctcttgagagtttgaggggaaatgcagatttggtgagtctccatgaaatttgggccagtagctcgggctctgggcccttccctccccacccctcaggtccttccctgcaggtgtgtcaggagcccagggaacccaaccctaggcagtgcagtgggggtctggtctcagcctccctgactccggcccagcgcctgctggggcagattgttcatctctgcgcttcctcatctgcaaagctgacagcagaagcagggcagacctgatgaggggcagtcatcgggatccagaccaagtcgccactctctcattcacaagtatttattgtgtggctcccatgctctgtgctggggccacctgggaaggagccatcagtcagttaggcgagagagaagttagacaaatgagtatataaatagaaatagtgataagtaccatcaacaaaagaacaggctgccttgagagaattacaaggggactgagcctggggagagggcagccttgggtgcctccaggtggcctgggcatggttctgctgacagagttctcaggtacaccccggcctaggtgacccgtgaggtcctttgggatgaatgctcatggctgttggatttccaggttaccagctcccttcccttaataccaagatgggggggtcaccttctagtgctagtcttccctgcagttgcttctcttttgccctggaatgccgggtggagaccctgctactccttgtgcgagagggcagaccccgttttcttcccgcctctccagactgtcctctagggagcgtggggagagcccgggtttacgtgggtccctgtgctggcaggcttacatcctgagcatggagccctgtggccactgcctcattatcaacaatgtgaacttctgccgtgagtccgggctccgcacccgcactggctccaacatcgactgtgagaagttgcggcgtcgcttctcctcgctgcatttcatggtggaggtgaagggcgacctgactgccaaggtacactcactatctgtggagggagacagggtggggggcagtgggtggggaagtatcttttgagggactccaaaagccagctgactccccaggcgagcccttacatctggaggaccatgggaggtaggacggcccagcggctacaggttcaagttcagacgcagaagtccgggtttgaggactggctctctcggccacctgctgtgtgacctcctgtgcctcagtttccttgtctggaaagcaggaatagtacctgcctccttgggttgttttgggggttagatgaacagtgcccaagcgtagcaccttctccccaaaaatggtggctattacgactgctgggactgtcagcacttcggtactggccctgggaaaccgagaaagtgctctgcccaggcgtttgggttgggccctttgttgttttattttttggggggggcgggggcacagagtcccactctgtcatccaggctggagtacagtggcgcgatctcggctcactgcaacctccacctcccaggttcaagcaattctcctgcctcagcctcctgagtagctgggattacaggtgtgtgccaccatgcctggctaaatttttttttttgtatttttagtagagacggggtttcaccatgttggccaggctggtctcgaactcgtgacctcaaatgatccacctgccttggcctcccaaagtgctgggattacaggcgtgaaccaccatgcctggccaggctgggcccttttattgttaggaacggtccagtctgcatctagacctatccgtgcttctggctcacctgcagccctctcttgtagaaaatggtgctggctttgctggagctggcgcagcaggaccacggtgctctggactgctgcgtggtggtcattctctctcacggctgtcaggtaggaagcctcccactgttccctgggcaggcattgggtactggccgtgccaagaggctgtgcaggggccatgtcccttcttgtgtccaaaacacccttggctttgtggaaaagggctgtggggccctgcccacctcctgttgttttcttgggagccatgtggtcctctgaggagttggctgcaccgtcctgggcaggtcggtgttcctgggagaagccctctgggagagggagggcagagaccaggtctgctcacgaagctcctgcacccagagtttgttcagaggcgggtacagcacacatgttgtctcagctcctgtctctgtcctgtgaggcactgccccaggccccttgctgctggtgggactcaggacaccaggcccactgggggcttggccccttacgtatttgtcactgtgattaagcccttaccccttactgggcctcagtttcctcatcttttaagttgaggagttggacagatcacagttataagctggggcctggagtccccctgtggtctgcacggtgttttgaaaactggcaaatttcacataaaaatcaggatttctagtttctcttgacaaaccgcaaaggtctggcctgacgaggccagcatcttcagccagtaaaactccagcctgtggctgggcagggctttccctttggtcctttctctcataatatggtccctagagctcatgaagaatgtggactcccaggccctaccctggacctcttcattccaagtccgcccagcaacaaggtttccaggtgatttccatgcccttgaggtctgagctgaactgatttaaagcagccactctcagcgttgagctgcctcagtcagaggggcctggaggaccatactgctgattaggaggtctgggtggggcccaggaatcacatttcttacaagttcccaagcgatattgatgccgctgctgcaggggccaaactttgagaaccactggtctagaggccgcagccagcactctccaggcacactggcccctagaggcacatgagtttgacatgcaaccccttgctgtcaaggtgtctttccagatgctgaccagggtctttccagaaccaacctgctctgtctcaatcagcctcgtgcccctggctttgaccttccaaatccttggctcccacaaaacctctgaacaggctgttggattcctactccaacttcttggttttgtaaccagggttcttggtcttctaggccagccacctgcagttcccaggggctgtctacggcacagatggatgccctgtgtcggtcgagaagattgtgaacatcttcaatgggaccagctgccccagcctgggagggaagcccaagctctttttcatccaggcctgtggtgggggtaagcagctcctcagcctccctctgggtgggtctggtggggagggagccgccacctgcttctttctccagcctgcccctcacagggcccatgaggtctctccaggcagtcagagggtaccacacatggtccctttttggcagcacctctgtctggctggagcaggccctgctctgtctgctttgtagaggtcagagtcttctgtttcatggcacagtggcatcatgggctcaagtaactttggcagcttcaattccaaagacttggcaaaaagaaagcagaagagagaggagaaacctctttttatttttcttgtcaccattctcctgacctccatcaactagaccccgtttccactatcccagagaaagggtggccacagctaaactgcatggagaaaccaaagaatttaaatattggaattttcaaaagtgtagttgtgggggttcgaggaacatttaaagattacttgggctgggtgcagtgtctcatgcccaacactttgggaggccgaggcaggaggattgcttgagccaggagttcgagaccagcctgggcaacacagcgagaccctgtctctatttttgttttgttttttaaatgtattacttggattctttgtagttttgctgtatgctctaattttaaacttaactcctattacagtgttatctgattttcttataaaaaaagagggaagagagacaaacatggggttcctagtttgtgggtcatgacaggaatatcagggagcgctagaaattctgtcccagggagtcccctctgccctaggctctccacggactggaacattcagaaggtatatcagttccttgcctccagcctgatctgccagagaagtgagcactgttataccatagcgctgtccagctcgtccagctgtgacatgggcacctgtggtctatttctcctgtgcacatccaactgccccatccctattccacgttggtggagttgggtggaggctacctaggagagcagtctctggtcacatcattcatccagtaagtgtttattgagcaccatctgtatataccaggctgtgcgttaggtgctggggataggggaaaaacagagtttcagtctcctggaatttataatttgacatgaactgtattaagtcactgtcatgacccatgcccataacttgaccacaagtgattgagaacacttgattaaccctggatgggctactgacctatctatcacacagccctgggccagttcatctctagacagctcagcaaatggggaaaataacagaacccactcccaagctcaggtgatcctcccacctcagcctcctgagtagctggggctacaggtgcacactaccatgcccagctaatttttctattttttttttgtagagacagggttttgccatgttgcccaggctggtcttgaactcctgggttcaagcaatctgctcacttcggcctcccaaagtgctgggattacaggcgtgagccactgtgcccaggcaactttaataatatttaatgcactaattggtgtgtgtacagtgattggttcattttaataactgaaaacccagcctgccccccgctcccaccccggaggacccagtgtcacataagagtcccccaccccgctgtcgccagcagagttccctcaggacaacagtaacaggaagtgaggaaggctgccactctcggggctgtagaaaccctgctctgcctcacctcctgtcttatccacagtgtgtggtccagcaatgctcttccttcggagcctccggtccctctttctcctatgaatcaaatgaaagacagaaagggcaggggaattaggaatgcaggctgagcaggcatacctactttctggacagttagtcagtcttgtgctcctcccatgccccatccagtctcagtctcaacagcagggagggcctttgtcacgtgaatatctgctgtcactcttaggactcagtagcagggcttccaaggcctttggtgacctggcccctgccacttcaccttccccagcctggcatgctccgagtccccagcacggcccagccttcccaggatgtccaggctcttgcttgctcttctacctgctcccctggctaactctttttttaaaattcatttttacttattttgttttagagatgggggtctcactatattgcccaggctagtcttgaactgttgggttcaagtgatactcccacctccgcctcccaaagtgctgggataacaggcatgagccaccgtgcctggcacctggctgactcttaatcatccatccttctggttacaatttattgtcacttccctaaacaccccctttcttggccaaagtcagggttagctggcctttgtgctcctgcagcctctgtccctcccctaccatagcactgtctcattgtattgagatgggcttatcccctggtcagctctgaggggagggccaggcctaccctgcagccaggcccccagcctggcacagagcccacagtctggttgcgtctcatgtggattctaatttgaatgtaaaggagaaccatacaaaagcatctgtggtggttcacgcctgtaatcccaacagtttgggaggccaaggtgggaggatctcttgagacgaggagtttgagaccagtctctatcataaaatttaaaacattagccaggcctggtggtgtgtgcctatggtcccagctacttgggatgtttaggcaggaagatcgcttgagccctggaggtcgaggctacagtgagccatgtttacactattgcactccggcctgagtgacagagccagtctgtcacctgtctctaaaaaaataaaaaataaaaaaaaaatatgagccaaatttggcataatgtagatttccatcattaaaacaaaactcacagaaaacagcaagatttcaaagccagcatgcagtgattaagatatccctttggagtcgggtccttgctttgcctccgcaggctgcgtgacctggtgcttaacgcagttaccacatggtggcgccacgtcagctgagagcagaaatagaaaggtccccgttcttcactagtgcctggcgaggggtctgtttacatgcatcagaacacctgtcctgggttttgaggactcttgtattgctattttataactcactataatactttaaaaatatttaatttaaaaatcatttaataattaatttaaatataataataaataatttaaaaatcatttttaaataataattttaaaaccctccaacatgtcatccacccattcattaggaggtaacagcaccagggctgaaaaatgtgcattaaagtcgataactttggtgtgcaacgtcagcgtgataggcaaccaagtagccacctctctgaggctgagccgtcaattttggggtgacccctctttgggatttgagagatcgggctgagaagacagaaagcaatgacaatatgctgcagtggtcgtggattttctgtgcggagggaacatctcctcctactgtatatttattcttgtggggaatgagtcctgccctacggggagttttgcattaatgaggctctctaagaaccgaggctctccaagaaccaagccatgcatacagtgcagaacaccctaggcaaggccttcacatcagatttgtgggctgaggctgacacgtgaacggagctgccttagcgccccgcctgaccccctctttcctttcccccacaccccctgctctgatctgctgtctcttctcagcctctctgctcaccctgtctcttctggccattcttaacggcatcccccacttaggcatccctccgcccccacaggctgccaggcagacccagcaccatcacattcacgcctcaggcctccttgctgtgctgtttcacgtcattcccagacacctggggcagattccggagtctctaccaagaaaacaaccagaagcaatgaaccacaaaatctggagaaaaacatggctgtcacagatcaaagaggcccccctttggaggctgggggcctccgtgagaagcagtgggatagttgagaggcaaaaaacatggggcagaattccgcgcccctcatatcagctgggagaatgccaatgaccagtggtttctgagctttagctgtgtggggtaagaggtcaatagattttggtgttactattatggggttgccagagccacctctgttcctgccagatgggcccccagctcctctgggtgaactgtgacttccctcagtcacatagatccagccatgcaaacctgcctgcgttgcggccacagcacttgctgtctctctcaccaggaccgttctccctgatggcatcagggcctggatcacagtcacattctccaggagtgtttttgcaggggaccctctggatcactcctactccaacttcagcctatttttaaaaaaatttctctttttttttctgcagtatgtatacatagttaaatatatatttatattttttaaccaaagctcttgttagatgccttctttcctgagtagccctctgtgctccgccttaccccacccaccatgagccctactgcagaagacctcatcccggaagacctccgtcagtgtctccacttcagtagctctgtagctgagccatgtggggcacaagtcctgccaggacctctctgttttccaagcttggcactgcctttggggagtctagattttaaaatggaaaagacaaaaaatatggcaacctaaaaaagaaaataattcagaatgttataagctaatacagccatctcatttttgcatcttccttttggattccagcccatgagcacagtctgcttttctcagctaacgttatcccttaagcagttccccagatctccatggccttcatcatcactagctcaaatggctttataatgggccattttcatgacatgcactaatttactaaaccattttcctaatgtcggccatttaggtgatatctaatttttggctcacacaaccacaggtgtcttcatatagaaagcttttgactgcatttgaattattttcttaggaaattactggattagaaggtgtaaacatctccatggatttcattatccatgacttggtgtctatttggtatttttctgatggcttctttgattctagaaaaggatttgccatagtgcaagaagtacaaatgataacactaggacaaaatagagagggaacacaaggagagaagaaaagtaaaagtttggattccaaaaatacatcctaggatgtcctgcagctttctacagttctctaatgtacaagtgaattaaaaatttaaggtatacaacgactgattttagagataaaatcactttgcagatgtaaagaaacatggaaaaatcccagccattggtaatagtagactcaaaaatgaggtaggtcaaagtcccagtcagcctctgtctggggggaaaccccttaacttatctcagtctcagttgcctaattacataaaatggaatactgatagctacttgctagaggtggcctgcgcattttttacgctttccagccgccattggaaataagatcattggccaggggcggtggctcacgcctgtcatcccagcactttgggaggctgaggcgggcagatcacgaggtcaggagatcaagaccatcctggctaacacagtgaagccccatctctacaaataattagccaggtgtggtggcacacgcctgtagtcccagctacttgggaggctgagacaggagaatcgcttgaacccaggaggcgaagcttgcagtgagccatcgcgccactgcattccagcctggatgacagagcgagactctgtctcaaaaaaaaaaaaaaaaaaaaaaaaagatcactttcaagatccatggaatctggtgttctatagttctatatctggtatttgcaagacagaagtcaggaatagagactccagacacatttcttcccttggttgtcttaaaggggacactgtgatcttgacagcctgagtaaagggtttgagtgagtgcctatgatatagtggacagtttcctcaactatatttctaaaaaaagacaagttttatgtctttttaaaaattgtggcaaaatacatataacataaaatttactatcttaaccatttttttggggtgattgcttgagctcaggagtttgaggctggagcgagttaagatcatgccacttcaatctgggcaacagagcaaaagtgtgtctcttaaaaaaaaaaatgcctgtaatcccagcactttgggaggccaaggcaggcagattgcttgagcccaggagtttgagaccagcccgggcaacatggcaagatcctgtctctacaaaaaatacaaaaattaactgggtgtggtggcacctgtagtcccagctacttgagaggctgaggtgggggatcacttgagcctggcaggtcaaggctgcagtgagctgtgattgcaccactgcactccagcctgggtgacagaatgagactctctcaaaaaacaaaaacaaaaacaaaaaacaatcccccaaaacaaaacaaaaaaccactgccctctccccactgaatggtcctgccacccttttcaaaattcatttgaccacgcatgtgagggtgtatgtctgggctctattcaatgacattgacctatgtctgtctttatgccagtaccatactgttttgattactgtagctttgtagtaagttttgaaatcaggaagtgtgagtcctccaattttgctctttttccagattgttttgtctatttggggtcccttgagattctcgtgtgaattttaggatagattttctatttctgcaaaaaacatcattggggttttgatagggattacatttaatctatggattgctttgggtagtattgagatctttaagttttctaatccatgaacataggatatatttccatttatttatatcttttttttttttttcttgagacagagtctcgctctgttgtcagactggaggactgtggcgccatctcggctcactgcaacctctgactccctggttcaagcaattctcctgcttcagcctcctgagtagctgggattacaggcacacgccaccacgcccagctaatttttatatttttagtagagacggggtttcaccatgttggctaggatggtctcaatctcctgacctagtgatccaccagcctcggtctcccaaagtgctgggattacaggcgtgagccactgtgcctggcctatgtcttctttatttttctttctttctttctttcttttttttttttttttttagatggagtcctgctctgttgcccaggctggagtgcaatggcacgatcttgactcactgcaacctccgcctcctggattcaagtgattttcctgcctcagcctcccaagtagctgggattacaggtgcccaccaccacgcctgggtaatttttgtattttttaatagagacggggttttaccatgttggccaggcttgtttcaaactcctgacctcaggtgatctgcctgccttggcctcccaaagtgctgggattacaggtgtgagccactgtgcccggctctttttcttttttgagactgggtcttgctttgtcacccaggctgaagtgcagtggcgcgatcactgcacactgcagcctcaactgcttggactcaagtggttctcccacctcagcctcacgagtagctgggaccacaggcacatgccaccacacctggctaaattttttattatgtgtagagatgaggttttgctggtctggaactcctgggctcaagggatcctcctgcctcagcctcccaaagtgttgagattacaggcgtgagccatggcatccagccttctttctttcagcaatgttttgtagttttcattttacaagtctttcatcttggttaagttaatttctaactattttattatttttgatgctattgtcaatggaaccatttttgtaatttctttttctgattgttcattgttagtgtatagaaatggaagtattttttgtggttggcttcgtatcctgctaatatgctaattttatttgttctaatagtgtttcatctttagggttttctgcatataaaatcataccatttgtgagtagagataattttactccttctttccaatttgaatgtcttttatttctttttcttgcctccttgctctattaacttctagtaatgtgttgaatagaagtggcaaaagcagaaattcttgccttcttcctgatcttatagaaaaaggtttcagtctttcaccattgagtataatgtttgctgtgggtttttcatatatggcttttactatgttgaggtagtttccttctattctgagtttgttgactgtttttatcatgaaagcttgttgaattttgtcatgtgcttttttctgcatcaattgagatgatgatgtagggtttttttcattctcttatgaaccccaaaaatctgagacaggtctcagtcaatttaagaagtttcttttgccaaagttaaggatgcacgcccaggagacaggtctatgcctttctctgaacatgaattttagggttccaaatttaaaggggaaagggcaggatattgagaagtacacagttttcaggtaagagcagggtagggggaaatagtcattcaagcatttgtctggctcagtgaatttgcatttttacgtaaggtaacatagggcaggggaaaatgcagggaacctgcatttttacgtaagataacaaagacaaatggggcaggggaataatcagatatgcatttgtgccaggtgggcagaggggtgatgcctctgtaaagataagctatccatttacattgccgtggtgaattttatcagacaactatcttggagctcaccaggaatttccttgtgggcaaaatatgggagaggtgtgtagcttttcatcttgtagccatcttatttaggaaccaaaacggggaggcaggtttgcgtgacccagttcccagcttgacttttccgtttggcttaatgagtttggggtcccaagatttattttcctttcacactgttaatgtagtatattgcaccgactttcatatgttgaaccatccttgtctgtgtatttcaatgacaagaggtgtttgtttctgcttcctgcagagcagaaagaccatgggtttgaggtggcctccacttcccctgaagacgagtcccctggcagtaaccccgagccagatgccaccccgttccaggaaggtttgaggaccttcgaccagctggacgccatatctagtttgcccacacccagtgacatctttgtgtcctactctactttcccaggtgagcacatcagaagggctcgtcctcgcagccagtgggtcttcccgtctgccctagaggcagctgtgtggtgagagaaaagaccagggtatgagtcctggttctgtcttttgcccctctgtgaccctgagcaagttacttctctctgagcctcggctcaggctgagcgggcaaggatgcgcgctgcaaggaggcctgcgcccttgggttcctatgcctcacttgcctctcctctgcctgaccctgcctctgccttcgcatctttagcaggggaataggaatcgtgcctcaggggtttccatgggaattaaacaaggtggctggcacgtcactgagcacagtgcggggcacgtagtagttgcagcaagcggtagtttccttccttcttttttttttttttttttttttttgagatggaatctcgctctgttgcccaggctggagtgcagtggcgcgatcttgggtcactgcaagctctgcatcccgggttcacaccattctcctgcctcagcctcccaagtagctgggactacaagcacctgccaccacgcctggctaattttttgtatttttagtagagatggggtttcaccgtgttagccacgatggtctcgatctcctgacctcgtgatccacctgcctcggcttcccaaagtgctgggattacaggcgtgagccaccgcgcccagcctttttttttttttttttgagacggagtcttgctttgtcgcccaggctggagttcagtagcatgatctcagctcactgcaacctccacctcccgggttgaagtaattctcctgccttagcctcctaagtagctgggattacaggcatgcatcaccacacccagctaatttttgtatttttagtagacacagggtttcaccatgttggccaggctggtcaagaattcctgacctcaagtgatttgcccacctcggccttccaaaatgctgggattacaggtgtgagccactgtgcctggcagtttccttcctttcttatgtcttggatgagtcacttgacttttccaagccttggtttccttgctgggaaaacaggaattatagccggaatcaggggatggtcatgagggtgaaataagatcatgattagggcagagcctcaggggccaggctgctcctgttggatgtatgtatgagtcaaggtctggagggcgcccgagccagcgtgcatggccagaggggtggtggggagccggcggaggggtggctctccagcagtgttcagccctcctccctccaaaggttttgtttcctggagggaccccaagagtggctcctggtacgttgagaccctggacgacatctttgagcagtgggctcactctgaagacctgcagtccctcctgcttagggtgagtgctgccttcctctgcaaaggagaggggaggctgctgaggggcagcgtgtcctcctggggctggggatttggggtgagcagggcaggcccaaaccaagggtaaaaggtagtagactcctgcctctgagccttggagtcggcacttttgtgtctctttatgagaggcatcctgcctgtggtgacgtttgccctttattcaaagagttgccttccctgtctcctccaaggtccccaggttgacacctcccgctcctccactgatggagctggtcctcagtgccagcgcaggatggctctgtccagaccctgaaggcgggtcatgggcccctccctatatcctgtgggcatcatgtagtcttctactcttgaccctcaagaattgtgaacccctccttgtacatcgccttctcaggaggccccagtgaggaaacagatagggaagggtggcctgataggcccagtcctactccatagaaacccgactcagagcagttgcttcctctgagggtcctgtggccttgtggctgccttgggaggcagcatgtatgggccccagctgctctgctcaggtattcatgccacgagaaggggctgcgaggctggggccactcctggctccttgcaaatatttcagtctgatttgaactttatgaatttggaaattttgaattttgagttttttaaaggtaaagttgaggtgcgtattctttaagccctcctgctcaaagaggctgcagtttgagctgtttttaaggtgcgggttgagtggacattccccccagcccctcttgaattcttccttcagtccagagaactgaactcacagagctctccatggtcatgtcttacaggtcgctaatgctgtttcggtgaaagggatttataaacagatgcctggttgctttaatttcctccggaaaaaacttttctttaaaacatcataa

SEQ ID NO: 15501 - DNA, 33614 bp, Homo sapiens
ttggccctgggggcggggcgaggcgcagaggtgcgtcctgagggcggggcggtgacgcaagagcgactcctgggggcggggcgaggccttggagatgcgtccggaggcggtggggagcgaagactgacccggggccgtgacgcgggggcaggccctggggcgggggcgggtcctggggactggggcgggcggccgaggcccggaagcggactgaggcggcctggagtcttagttggctactcgccatggacgaagcggatcggcggctcctgcggcggtgccggctgcggctggtggaagagctgcaggtggaccagctctgggacgccctgctgagccgcgagctgttcaggccccatatgatcgaggacatccaggtgcgcccccggccccctgtccccgcgctgcacggccgggtccccacgcccctcgaggaggcgttgtgcgggagcctagccttccctgtggcttcaaacccctcagcggagccaaagaatcccaaacacctcttagtcgggtgttcgctaaagcgattccatgccatactcagtcagcgtacactgttagtgcttgtgtttcttgtgtaaaggaaaaatgtgagacacatcttgagaactttgaataagaaacaattcatgaattggagaacatcagactgaaagagctttagtgttgcaatgacaaaacgtcagaggcaagtatttattgggaaaatgtggaagcaaaataaagaaattatttgattggtttgcagttacaaaattgccttttttttttaaggtctgttaattgactgcttttggctggtcttaagttttatttctctctaacataagcatttatcagatatgacccaagttaaattttgcttatgtttgcagtttaagcaagatttaggtcacttaggatacctgattggttttgtctgctcaggaattcttcatggttggtctccattttaatttacgttaatacttgcgaggaaggaggcgtgtgcgtttttacttttctagcatagaggtttcgggaacccactttggcatcaggctgcctggcagcgtgttcttgggccagtcacttaccctctttgagccacagtttctgggctgtgaaatgggaataagaataatactgtcataaggactaaatgaaataacggatgtgaaactgtagtgctaggcacagagcgggggatcagcgtaccctgccctctttggccagccccttctgtgttcagtttatgttttgttaagaggttttggaaatgaggggacctgatgcagaatggagaataatgaagtcaaacatttgaggttttgtttaaaagcactttcccatctttgtctcatttgaccctcatcacaggcctgtgaggatgcaggagatatttcctaccatgaggtgcagtaggtgtgagtggctggctggatatccctggccagtgccctggcccagggaaagagtctttaaataattgagtatcatatgagtaattattcattaataataaaataagttttgtgccttctgtgtggcccctactggggaacagtaatggtttgaggccacagtccttgccttcaggaatgttcacggggatcacaaactcaaatgcccatggaggaccaatggatgggcgtcatagtggatagcctttgcactgccctccgtctccagctgagtatggccatatcaacaaatggcccagtattgccacatcttacacttattttgaggcagggtctcactcttgcccagcctggagtgcagggatgagatcatggctcactgcgaccttgacctcctgggcttaagtggtcttcctgcctcagcctttagagcagctgggactttaggcacatgccaccatgcctggctaattaaaaaaaattttttttttgtacagataggagtcttgctatgttgcctagatgagtctcaaactcttggcctcaagtgattctcctgcctcagtgttgggattacaggtgtgagccactgtacccggcccagctttcacatcttaaaaaagaagctgaaaatcttgattcctctgtcaaattccctggcttaaaatgttagcaacaaattcagaaattttttaagaaccttgtgggaaccacaggttgccattttgccattcagtatggctgaaaaacaggcaggttttggaaccagttggatctgggctctcatcctggccttgttacatattagcaagttgtaaaaaaccacaaccaatgagccaaacaaacagaaaaaccctatgactcagtttccctgaaattttttaccctaaaaagttgggaagttctaatttaactctataaagttattgagggagaaaaagatgaaacaatgcatttaacacagtgttgacctcctggagtgttcagcaaatgtggagagaaacctaaacaccaccatctatttgcatgtagccaactgttctgctagtgagacttaccttctcagtggcactgtaggtctgtgctgttcccaacagtagccattagccacatgtcgttaaaggtaaatttgaagtaattaaaattaaataaaactaaaaattggtagggtcaagccttacagggcctgtgggtttttctcctcgtgtgcggagatgagagatcgtagaaataaagacacaggagaaagagatagaaaaaaagacagctgggcccgggggaccactaccacctagacgtggagacagggtagtggccccgaatgcctggctgcgctgttattggatataaggcaaggggacagggtaaggagggtgaatcttctaagtgattgataaggtgaagcaagtcacgtgatcataggacagggggcccttcccttttaggtagctgaagcagagagagaaggcagcatatgtcagcgttttcttctatgcacttataagaaagatcaaagactttaagactttcactatttcttctaccgctatctatgaacttcaaacaggaaccaggagtacgggaggaacatgaaagtgggcaaggagcgtgaccatggaagcacagcaccacagggaggggtttaggtctccggatgactgcgggcaggcatggataatatccagcctcccacaagaagctggtggagcagagtgctccctgacgcctccaaggaaaggagactccctttcttttttttttttttttgaggtggtgtcccactttttcgcccaggctggagtgcaatggtacgatctcagctcactgcaacctccaccttccgggttcaagctattttccttttttttttttttttttttgagacggagtctcgctctgtcgcccaggctggagtgcagtgccgcaatctcggctcactgcaagctccgcctcccgggttcatgccattctcctccctcagcctcccgagtagctgggtctacaggcacccgccaccacgcccggctaattttttgtatttttagtagagatggggtttcaccgtgttagccaggatggtctcgatctcctgacctcgtgatctgcccaccttggcctcccaaagtgctgggattacaggcttgagccaccgcgcccagccagggttcaagctgttctgcctcagcctcctgagtagctggaattacaggtgcgcactaccacgcccagctaatttttttgtatttttagtagagacgggtttcaccgtgttggtcaggctggtcttgaactcctaaccttgtgatctgcctgccttggcctcccaaagtgctgggattacaggcgtgagccaccgcgcctggcaggagactccccttcgcggtctgctaagtaatgggtgtctccccagacactggcattaccgcttgaccaaggagccctcaagcggcccttatgcgggcctgacagagggctcacctcttgccttctaggtcacttctcacaatgtcccttcagcacctgaccctatacccgccggttattcctaagttatattagcaatgcaacaaagagtaatattaaaagctaatgattaataatgtttataataatgattgataattgtccatgatcatctctatacctaatttgtattatgactattcttattctaactattttctttattatactgaaacagtttgtggcttcagtctcttgcctcggcacctgggtaatctttcgcccacaaaaattcagttcctcagttgtactacccaagtgcttaatggtcatgtgatatatggttactaaataggacaatacagaccaagaatatttccatcatcacggaaggttctcatagacagtgctgctgtaggatagttgaggacacggtgccatcttatccctgtggatcctgagaacctgtccagtgctgggtatctgaggacaggtggcagataaccagactcttccttcttagtgactgaccccaccatcctgacacctctcaatttttttttttgagacagggtcttgctctgtcacccaggctgaagtgcagtggtgctatcacagctcactgcagccttatctcctgggctcgagccatcctcttgggagcctcagcctcctgagtagctgggactacaggtgcgtgacaccatacctggctttttttttgttattttttgtagagacagggtctcactgtgttgtccaggctggtctcgaactgggctcaagctatcctcccacttcagcctcccaaagtgctggaattgcaagcatgagccactgtgcctggcctgcctgtcaaccttgacccttgctctgtcttcacagtccccccagtcagtgcccatgtcctatggaccctctctctttgtatctctgctttgtcctttcacttctctctattctagctgcaccatctttgctgcctcctgatctggctatggctcactcctttccatttttcaccctgacccctggatgactttttgaaaggccatatctgtctctgtcactccattcttaaaactctttggtggccgggcatggtagctcacgcctgtaatcctagcactttgagaggctgaggttggtggatcgcttgaggtcaggagttttgagaccagcctggccaacatggtgaaaccctgtcttaaccaaaaaatacaaacattagccaggcatggtggtgggtgcctgtagtcccagctacctgggaggctgatgtgggagaatcatttgtacccaaaaggtggaggttgcagtgagctgagatggtgccactgcattccagcctgggtgacagagcaagactcctcaaaaaacaaacaaaaaaacaaccgatggctggccacggtggctcatgcctataatcccagcactttgggaggccaaggctggaggatcacttgaggtcagttcaagaccagcctgggcaacatggtgaaaccctgtttctactaaaaataaaaaaaaaattagtcaggtatggtggtgtgtgcctgtaaccccaactactccggaggctgaggcaggataatcgcttgaaccttggagttggaggttgcagtgagctgagattgcaccagtacactctagcctgggtgacagagtgagactccgtctcaagaaaaaaaaaaaaaaacaaaaacaaaaccaaaaaactctttggtggcacctgacaggtctcaggatgaatttcttggcctggccacacaaaggccttgtcccttgccactatctacctcccacctcataagactctgaattcgctattcacttcatgatatcctcagccccatgtgcttccctctgggcacttgtctcttgttgtgtcattgctgatttgtctgattgcattccccattagaaatttgctccttaaggactgagactgtccatggcagcattttcagcacttagcatagtgctgggcatcttttgccctgcaaaataatgaacagatcagcaaaggctggtaaatggcacacagtgcacctgcagctccattgctgcccacgtgcctgattgtttagacttacagtagctgggaaatggggagacaaggtgagagccatataaaagtacgtggataattagtatcctgcctttctttccaaacagcgggcaggctctggatctcggcgggatcaggccaggcagctgatcatagatctggagactcgagggagtcaggctcttcctttgttcatctcctgcttagaggacacaggccaggacatgctggcttcgtttctgcgaactaacaggcaagcagcaaagttgtcgaagccaaccctagaaaaccttaccccagtggtgctcagaccagagattcgcaaaccagaggttctcagaccggaaacacccagaccagtggacattggttctggaggatttggtgatgtcggtaagtagcaagagagtgattggtgggtgggcatgacacgtagtcatttgggactcactatgagtacagctgggtgggctgagattcagaatttaattttagcattgtctttctgaatgttcatagggatggcaaaattctgggaggttttcaggaggttgaatcttggcagcccctcctctgaaaagcatgtgttgaggtctgttttggatgtcccaggttttttgtttttgtttttgttttttttcctgcctttgagatagcaggccccaggttttgatcaatgtttccagagccatctattgttttggatttgcctttcagtctgggtgggtagcctggactacctcatgtctgggggcaggagacaggcctcagttgtatctgccccatacaaacagacatctgcaaagtatttacccttaccttcttcgtttatagcaaccttgcaaggcaggtatcattagacccatccttgttgatggagaaactgactgaagctcacggaaattaaacactttgccaaaggtcacacggctacatccaacaaaatgcataaatcccaagagtaagctgggtgatttttacctatgcatacccacaggtaactaacacccatatcatcaagatgaaaacattccggggtcctgtaagaccgttgactctctttccatttcttcccactttccctttcccaaggtaatcaccgttctcatctctatcgccagagatcccttttgcttgtccttaaacttcaatataaatcctatatagtcttatatgctcttgagcctggcttctttcattcatcattgtatctttgaaattcattcatattgttgtacatatcggtagttcattctttttaatttctacatggcattctgaataatccacagtttatttaaccattttcctactgatggacatgtgggttgttttcagttggggctttgttcccatggcagcgtgtggagctctagcacttcctgtttcatgggtgtctggtggaccattgcatggtatcaaagttaataatcataatagtaatggtgaacattattgagtaattgctatttgccaggcaccgttcggagtgcttacataaatgatctaatttaatctctccatctctcttgtaaggcaggtgctttgctgttagaaaaagtgagccacagattgggagatgacttgtgccaaatcacacagctagtgaggagtggagacagggctgcagcccgggcttacctgttctgtctgctctgcagggtagccccatgtgtgctttgtgggacacacctcattgatccgactcatgctggtggacattgtgttgtttctgcagttagccttgcatgtgcgtctagttctgactgcaggatatttctagaaatggaattgtgtgttaaagggtacttgttcctgtccgatagatgctaccaacttatacttcaaaaatatgtcattttagccaggtgtggtggtgtgagcctgtaggacaagctacttgagaggctgaggcaggaggactacatgagcctaggaattcacagccagcctgggtaacttagtgagatcctatctctaagaaaaaagaaattgaaaaattgtgtcttttttttttttttaattgaggcaaggtcttctgtggcccaggctggagtgcagtggcatgatcacggctcactgcatccttgaactcccaggctcaagcgatcctcccactcagcctcccaggtagctgtgtgcgccaccaggcctggctaatttttttgtattttttgtagagacagggtctcaccatgtggcccaggctggtcttgatctcctgggctcaagcaatcctcccatctcggcctcctggatagctgtgcatgttatccctggccattttttttttttttttttaagagggagtctcgctctgtcacccaggctggagtgcagtggcgcaatctcagctcactgcaacctccacctcctgggttcaagcaattatcctgcctcagcctcctgagtagctgggactacaggcagccgccaccatgcctggctaatttttgtatttttagtagagatggggtttcaccatgttgcctaggctgatcttgaactcctggcctcaagtgatccacctgcctcagcctcccaaagtgctgggattaaaggtgtgagccaccactcccagcccatgcctggccaattttaaaattttttgtagagatagggtcttaccgtgttgcccaggctgccctcaaactcctgtgctccagtagtctgcccacctcggcctcccaaagtgctggaattacaggtgtgagccactgcactcggcccaaattgtgtcattttataatctcaccaactgcgagtgaaggtgaccactttcccacattcttgccaacagtgaatattgacattttttcctgtgtgatgggtaaaaagtgctgttttctttcaacaaaaattcaccaaaactcattcatattgttgtgcatatcagtagttcattctttttaatttctagatggcagcagttcctgttctgaataatccacaatttatttaaccattttcctattgatggacatgtgggttgttttcagttggggctttgttcccatggcagcgtgtggagctctagcacttcctgtttcatgggtgcctggtggaccattgcatggtatcagagttaatattcataatagtaatggtgaacattattgagtacttgctgcataatggtgatttttgggcaatccactaaagcagagaaacagacaaacatgataagggtaggaagctgcatttgcttgaagtgtaaggaagaagactggttctggaattggccatgtgcattaccatcctgtaaaggaggcaggcagaatacaaagctcatctgttgttatttggttctgggaaatgtcaacgtgagtcatttaggaccaacagtcagaatttgaaacttcctgtttttttggaaggtgttttatttcctgtttcttgtgaatatttattcctagtaggagcttaattctgaagggtaaataacaacagcaatagtaagatcacttaattttttttactttattattattattttttgagatagggtcttactctgtcacccagggtggagtgcggtggtgtgttttcggctcactgcaacctctgcctcccaggttcaaacaattctctcacctcagcctcccaagtagctgggactacaggtgcaccaccatgcctggctagtttttgtattttttgatagagacaaggtttccccatgttggccaggctggtcttgaactcctgacctcaagtgataaacccgcctcagcctcccaaagtgctgggattataggtatgagccagcacggctggcccaagatcactttaaataatgtgaatatcactttgtagtatacacagtgttttttcaggtcatcaaaaccaccctgtgccgtggtagacatggcaagcccgtctgtcattatatgctacttacaggggaggaaactgggttctgagagcaacagtcacaaagtgagttccagtacagagctaggacttgggcctaggtcttctggcttaatagagcgactgtcccattttccatgagctgctgagagatgtcctttttagatgctgggccttagactccagagtactgcatgggaatgtttcccaaggtaggtttcatggtgacccacaaaggaagagctgtgtattcatatgtatgggaaggtctggctgagcaagaatagggccagcagcagagcctttaataagtgaatacaggaaaggatgctgtaggtcagtgtttcacactggggacgatttttccccgacctccaagggacatttgacaatgtctagagacaaatctggttgttatagctgagggtgggtgggtgctactggcatctagtgggtagacagagatgctgccaaaacccaacagtgtacagagtagctctgcacaataaagaagaatctggcccaaagggttagtgtggtggggctgagtacacacactgcactcatacatattcattgagcatgagtgtcaatgaataataatgtggacacatcagttttattgagttgtcaagtgtgtcgggtattgttctatgtgcctcacatgtattaattgtttgaggtgtcatcacaatcctatgaggttggtagttgctcctattatcctgtaatacagatggggaaatcagaagcccagagactctgagctccttgcccattgtgacacaggtgctaagtgttggagttgggatttgaacccaagtacctcagactcactccatcactgtctcatgaagaacaaatggctcattctctttcttgtccctatatttgtgccattactcattagctcacacaaatgtttactaagtacctgttgggttctaggtgttggggatgcagcttcgaacaaggatgcccagtccttgccttcaggtggagaggggcaggtactcagttcatgcttgcctaatttggtctttattcacggctgtgggtagtgctatgaagctgaacacggtgctttagaggtgcatcattaggggacccaccagagagagtggctttgtctttgtatattcaaaggaaaatgccttttccttcagaatggaaggaactttcttagtttcagacgtgatgccttgtgtgtaactgcttgttccagccagggcctcttgcccgggaggactgggagaactgttggtggctgtgttctcatgattctccagagaaagagaaccaatagggggtgtgtgtatgtgtataaaacagcatcttttgttcaatgctgcatccccaacacctagaactcagcaggtacttagtaaacatttgcatgagctaatgattaatggcacatatacacagacaagaaagagaatgagccgttcgtttttttttttttttttgagacggagtcttgttctgttgcccaggctggagtgcagtggcgcgatctccgcacactgcaagctctgcctcctgggttcacgccattctctcgcctcagcctcccgagtatctgggactacaggcacctgccaccatgcccagctaatttttttgtattttttttagtagagacagggtttcaccatgttaaccagtatggtcttgatctcctgacctcgtgatctgtccgcctcagcctcccaaagtggtgggattacaggcgtgagccactgcacctggccaagccatttgtcctttatgaggcagtgatggagtgagtccgaggtacttggttcaaagcccaactccaacacttagcagctgtgtcacagtggacaagtagttgagtctctgggcctctgttttatatatatacatatacacacatacacacacggatatatatagaaagatatatgcattttttttgtgtgtgtatatatatatatctttatctaaaaacatatttattacaaggaacaggctcatgcaattatggacgctgagaagttccaagatctgccatctgcaagttggagaccaggaaagctggtggtgtagttccagtctgagtctgaaggcctgagatccaggagcaccaatggtagaagtcccattccaaaggcaggagaagactgatgtcccagctcaagtagtgagacagagagagatcaaattctcccattctccactgtttcgttctattcaggcccttgacggattggacgcggcccaccatcctggggagggccatctgctttactctgtctacctattcaaatcccattctcatccccaaaacactctcacaggcaccctgagaaatactgttatatttaaccaaatatttgggtaccctgtgatctagtcaagttgacctgtgaactcaaccatcagtggctttctctgctcatgccttgcctgggttggaacttccttgaaagtagaagttggcttttcagccctacctggcttcttggtctctttgctctggggctggtggctgtgctcacctcccattacaactcagggtctctgagcccccaattcccctctggcaaatggggatgtgtgccagtacttctgtgctgaagggcctgctctgaggagtaaatgaggcagtgtgtggagggacttcacatggggcctcctattgagtgagccttgggtcttgttggtcagctctgcttccttctgtgatttctaaattgccaagggctggggagggccagtcctagggcatcttcccttctgtagggtcccccagttcccctgtttctttctgtgtcctgattgaaaatcacagagtgctttgaccaccctgtgacccagccagctacaggtttttcccagcagacctgagcccaaacctgggccttaaacattctcaggcattgataaaggtatctaggtaggctgggcatggtggctcacgcctgtgatcccagcacttggggaggccaagacggatggatcacttgaggccagtagtttgagaccagcctggccaacatgatgaaaccctgtctctactaaaaatgcaaaaattagctgggcgtggtggtgtgtgcttgtaatcccagctacttgggaggctgaggcaggagaattgtttgaacctgggagacagaggttgcagtgagccaagattgtgccattgtactccagcctgggcgacagagcgggactctgtctgaaaaaaaaaaaaaaattaggtgtggtggtgtagtcctagctacttggatggcttaggagggagggtcacttgagcccagcaggcaaagtttgcaatgagttgagattgtaccactgcactccagcctggacaagagagtgagactccgtctccaaaaacaaaacaaaacaaaaaggtatctaggttatcacccaaaacaactgaaagaaaccagccttggccctgagccaaattccttaaaccctcatataaactccttaccctgacctcttcactttggaccaaacctaggtagacacctgtttttttttctcgcctccgcacctcgaggattgctttggccagatcgccctggcatttattgcttctttctttggaatcccaactggccccatcttaggacagtttggggcactcccttgtgggaactcttctgctgccacttctggggtgattccagcataggttcggagggacgaaaccccttctttcccttgggtggcagagaggatgtgcttgccctcttctgtttgtgttggagacctgggcacatgcccagtgactcaggctggaagactgattcttttgcacacacttagccatgtgtgtttattgtccccatgggagtggccatttcaggagaaactggtctcatgcaccttgtatctgaccatgtcacccaacttgaggggccctgaacatgccatgctcctgcatcctccctgcctttgctcatgccggggcctctgcctggagtgtctcctctccctctttctttgggcaccccttggttgatttgctccctccatgggcacctgtagcccttggcctcttgagagcagtcattttgctttatcaatagatatttctaatttggggaatgagtgaattcctcagtagtggatagtagttatatttttggggtacagcggaattttggaaatgagcaaatgttctcagaatgaagtctgtggatgaataggaattttcagggtaggtaaaaccatttctaactttaaaaatgggatgtgaatgggatgtgagtgcttttctgctgtggcctttaagctggcagaatagttcagacctgttctaagcaaggaatggcactgttattggaacaggagtatgggctccactgcaacttggaggtggccactgtattctccttgtttaaaaaagaaaaaatgtaggccgggcgtggtggctcatgcctgtaatcccagcactttgggagggtgaggcaggtggatcacctgaggtcaggagttcgagaccagcctggctaacatggtgaaaccccatctctactaaaaatacaaaaattagccaagcgtgatgcaggtgcctgtactcccagctacttgggaggctgaggcaggagaatcgcttgaacccaggaggcagaagttgcagcgaggcaagatcgcgccactgcactccagcctgggtgacagagcgagactctgtctcaaaaaaaaagaaaaaacatctcataaccttttaggctggtggccagtcaacttcttgctaacggaaatgaaaactcttttgatgttgatggaaaataatcatctttattcatttattcattctgcaagtatttcctgaggacctgctgtgtgctgggcccctgtggactcgcagacagtgagcatccgctctcctgagcttctctcacctctttctgctctggaatttcttctcaatgagaccacactatttctatactctctggtgtctggcttttttcacgcagcacgttttctttcttttttttttttttgagatggagttttgctcttgttgcccaggctggagtgcaatgacgtgatctcgactcactgcaacctctgcctcccaggttcaagcgattctcctgcctcagcctcccgagtagctgggattacaggcgcctgccccctcgcctggctaatttttctttttttttttttttttttgtatttttagtacagatggggtttcaccacgttggccaggctagtctcgaactcctgacctcaggtgatctgcctcccaaagtgccaggattataggcgtgagccaccgcacctggccttacgcagcacattttcaaggttatcccgcattgcgtgtatcagtgaagcggtgtcactcgtctggggtaaatacccaagattcattgtcttcacagccacggaagactaggacacggacatacagtgaggttcagagtggaagtataataggtgaaagaaagagaagagctctgtctgctgcagagagaggggttccagtgaaatgggttgctgtttctgcaatgaaatgcaaggggttttaaagatgagcctgaggagatggtgtctgatttacaaagggcacaaagattggtcagaccaggtgtttcatttgcataggatgcataaaactggttagggctaggtgtgccatttgcatgtggtgcgaaaagctggccagccccactccaatcttgtgttatgcagatgggttctctacctggccagtgccatgttgcctacttctttactgtcttgtggtaacaaaagggaagatagagcctctttgctgagtatatctggccccctggtagcccttttctattggcacagctgctggcattcactcctgtgagcttccagcttgcttatctatgtctgcagcttgatttttcaggctgctcttttttagaaaagaaatgatttgaggctgggtgcagtggctcacacctgtaatctcaacactttgggaggctgaggtgggtggatcaactgaggtcaagagtttgagactagcctggccaacatggtgaaaccccgtctctactaaaaatacaaaaaaattagccgggcatggtggtgggtgcctgtaattccagctacttgggaggctgagacaggagaattgcttgaatctgggaggtagagtttgcagtgagccaagatagtgccattgcactcctgcctgggcgacaagagtgaaactccgtctcaaaaaagaaaaagaaaaaagaaaaaaaagaaaagaaacgatttggggattttgttaaaagggaaattctgccgaggactgttttaccctcactatctgcctaaataatttctttctgtctcctgtatcatcagtagctcattcctttttaggctgtgtaatgttctcttgtgtggctgtatcacaatttgtatatctaccaaactgttgttagattggttgtttccatgttggggcgtgatgaataaggcctcagggaacattttggccaagtcttttgtgcccgtttgcactccttgctctttgatatatacctaagggtggacttgctgtcagagggtaggtgtgtgtttaactttgttagaaacctctaaacagatctccaaggtggctctcccaccagcagagtctgagggtctgagttctcgctgctccgttcttggggggctgtcctcacagagccccttgcccctcctctgctgtaacccaacattcatgtttctctctttctctgcctcttcaggtgctcttgagagtttgaggggaaatgcagatttggtgagtctccatgaaatttgggccagtagctcgggctctgggcccttccctccccacccctcaggtccttccctgcaggtgtgtcaggagcccagggaacccaaccctaggcagtgcagtgggggtctggtctcagcctccctgactccggcccagcgcctgctggggcagattgttcatctctgcgcttcctcatctgcaaagctgacagcagaagcagggcagacctgatgaggggcagtcatcgggatccagaccaagtcgccactctctcattcacaagtatttattgtgtggctcccatgctctgtgctggggccacctgggaaggagccatcagtcagttaggcgagagagaagttagacaaatgagtatataaatagaaatagtgataagtaccatcaacaaaagaacaggctgccttgagagaattacaaggggactgagcctggggagagggcagccttgggtgcctccaggtggcctgggcatggttctgctgacagagttctcaggtacaccccggcctaggtgacccgtgaggtcctttgggatgaatgctcatggctgttggatttccaggttaccagctcccttcccttaataccaagatgggggggtcaccttctagtgctagtcttccctgcagttgcttctcttttgccctggaatgccgggtggagaccctgctactccttgtgcgagagggcagaccccgttttcttcccgcctctccagactgtcctctagggagcgtggggagagcccgggtttacgtgggtccctgtgctggcaggcttacatcctgagcatggagccctgtggccactgcctcattatcaacaatgtgaacttctgccgtgagtccgggctccgcacccgcactggctccaacatcgactgtgagaagttgcggcgtcgcttctcctcgctgcatttcatggtggaggtgaagggcgacctgactgccaaggtacactcactatctgtggagggagacagggtggggggcagtgggtggggaagtatcttttgagggactccaaaagccagctgactccccaggcgagcccttacatctggaggaccatgggaggtaggacggcccagcggctacaggttcaagttcagacgcagaagtccgggtttgaggactggctctctcggccacctgctgtgtgacctcctgtgcctcagtttccttgtctggaaagcaggaatagtacctgcctccttgggttgttttgggggttagatgaacagtgcccaagcgtagcaccttctccccaaaaatggtggctattacgactgctgggactgtcagcacttcggtactggccctgggaaaccgagaaagtgctctgcccaggcgtttgggttgggccctttgttgttttattttttggggggggcgggggcacagagtcccactctgtcatccaggctggagtacagtggcgcgatctcggctcactgcaacctccacctcccaggttcaagcaattctcctgcctcagcctcctgagtagctgggattacaggtgtgtgccaccatgcctggctaaatttttttttttgtatttttagtagagacggggtttcaccatgttggccaggctggtctcgaactcgtgacctcaaatgatccacctgccttggcctcccaaagtgctgggattacaggcgtgaaccaccatgcctggccaggctgggcccttttattgttaggaacggtccagtctgcatctagacctatccgtgcttctggctcacctgcagccctctcttgtagaaaatggtgctggctttgctggagctggcgcagcaggaccacggtgctctggactgctgcgtggtggtcattctctctcacggctgtcaggtaggaagcctcccactgttccctgggcaggcattgggtactggccgtgccaagaggctgtgcaggggccatgtcccttcttgtgtccaaaacacccttggctttgtggaaaagggctgtggggccctgcccacctcctgttgttttcttgggagccatgtggtcctctgaggagttggctgcaccgtcctgggcaggtcggtgttcctgggagaagccctctgggagagggagggcagagaccaggtctgctcacgaagctcctgcacccagagtttgttcagaggcgggtacagcacacatgttgtctcagctcctgtctctgtcctgtgaggcactgccccaggccccttgctgctggtgggactcaggacaccaggcccactgggggcttggccccttacgtatttgtcactgtgattaagcccttaccccttactgggcctcagtttcctcatcttttaagttgaggagttggacagatcacagttataagctggggcctggagtccccctgtggtctgcacggtgttttgaaaactggcaaatttcacataaaaatcaggatttctagtttctcttgacaaaccgcaaaggtctggcctgacgaggccagcatcttcagccagtaaaactccagcctgtggctgggcagggctttccctttggtcctttctctcataatatggtccctagagctcatgaagaatgtggactcccaggccctaccctggacctcttcattccaagtccgcccagcaacaaggtttccaggtgatttccatgcccttgaggtctgagctgaactgatttaaagcagccactctcagcgttgagctgcctcagtcagaggggcctggaggaccatactgctgattaggaggtctgggtggggcccaggaatcacatttcttacaagttcccaagcgatattgatgccgctgctgcaggggccaaactttgagaaccactggtctagaggccgcagccagcactctccaggcacactggcccctagaggcacatgagtttgacatgcaaccccttgctgtcaaggtgtctttccagatgctgaccagggtctttccagaaccaacctgctctgtctcaatcagcctcgtgcccctggctttgaccttccaaatccttggctcccacaaaacctctgaacaggctgttggattcctactccaacttcttggttttgtaaccagggttcttggtcttctaggccagccacctgcagttcccaggggctgtctacggcacagatggatgccctgtgtcggtcgagaagattgtgaacatcttcaatgggaccagctgccccagcctgggagggaagcccaagctctttttcatccaggcctgtggtgggggtaagcagctcctcagcctccctctgggtgggtctggtggggagggagccgccacctgcttctttctccagcctgcccctcacagggcccatgaggtctctccaggcagtcagagggtaccacacatggtccctttttggcagcacctctgtctggctggagcaggccctgctctgtctgctttgtagaggtcagagtcttctgtttcatggcacagtggcatcatgggctcaagtaactttggcagcttcaattccaaagacttggcaaaaagaaagcagaagagagaggagaaacctctttttatttttcttgtcaccattctcctgacctccatcaactagaccccgtttccactatcccagagaaagggtggccacagctaaactgcatggagaaaccaaagaatttaaatattggaattttcaaaagtgtagttgtgggggttcgaggaacatttaaagattacttgggctgggtgcagtgtctcatgcccaacactttgggaggccgaggcaggaggattgcttgagccaggagttcgagaccagcctgggcaacacagcgagaccctgtctctatttttgttttgttttttaaatgtattacttggattctttgtagttttgctgtatgctctaattttaaacttaactcctattacagtgttatctgattttcttataaaaaaagagggaagagagacaaacatggggttcctagtttgtgggtcatgacaggaatatcagggagcgctagaaattctgtcccagggagtcccctctgccctaggctctccacggactggaacattcagaaggtatatcagttccttgcctccagcctgatctgccagagaagtgagcactgttataccatagcgctgtccagctcgtccagctgtgacatgggcacctgtggtctatttctcctgtgcacatccaactgccccatccctattccacgttggtggagttgggtggaggctacctaggagagcagtctctggtcacatcattcatccagtaagtgtttattgagcaccatctgtatataccaggctgtgcgttaggtgctggggataggggaaaaacagagtttcagtctcctggaatttataatttgacatgaactgtattaagtcactgtcatgacccatgcccataacttgaccacaagtgattgagaacacttgattaaccctggatgggctactgacctatctatcacacagccctgggccagttcatctctagacagctcagcaaatggggaaaataacagaacccactcccaagctcaggtgatcctcccacctcagcctcctgagtagctggggctacaggtgcacactaccatgcccagctaatttttctattttttttttgtagagacagggttttgccatgttgcccaggctggtcttgaactcctgggttcaagcaatctgctcacttcggcctcccaaagtgctgggattacaggcgtgagccactgtgcccaggcaactttaataatatttaatgcactaattggtgtgtgtacagtgattggttcattttaataactgaaaacccagcctgccccccgctcccaccccggaggacccagtgtcacataagagtcccccaccccgctgtcgccagcagagttccctcaggacaacagtaacaggaagtgaggaaggctgccactctcggggctgtagaaaccctgctctgcctcacctcctgtcttatccacagtgtgtggtccagcaatgctcttccttcggagcctccggtccctctttctcctatgaatcaaatgaaagacagaaagggcaggggaattaggaatgcaggctgagcaggcatacctactttctggacagttagtcagtcttgtgctcctcccatgccccatccagtctcagtctcaacagcagggagggcctttgtcacgtgaatatctgctgtcactcttaggactcagtagcagggcttccaaggcctttggtgacctggcccctgccacttcaccttccccagcctggcatgctccgagtccccagcacggcccagccttcccaggatgtccaggctcttgcttgctcttctacctgctcccctggctaactctttttttaaaattcatttttacttattttgttttagagatgggggtctcactatattgcccaggctagtcttgaactgttgggttcaagtgatactcccacctccgcctcccaaagtgctgggataacaggcatgagccaccgtgcctggcacctggctgactcttaatcatccatccttctggttacaatttattgtcacttccctaaacaccccctttcttggccaaagtcagggttagctggcctttgtgctcctgcagcctctgtccctcccctaccatagcactgtctcattgtattgagatgggcttatcccctggtcagctctgaggggagggccaggcctaccctgcagccaggcccccagcctggcacagagcccacagtctggttgcgtctcatgtggattctaatttgaatgtaaaggagaaccatacaaaagcatctgtggtggttcacgcctgtaatcccaacagtttgggaggccaaggtgggaggatctcttgagacgaggagtttgagaccagtctctatcataaaatttaaaacattagccaggcctggtggtgtgtgcctatggtcccagctacttgggatgtttaggcaggaagatcgcttgagccctggaggtcgaggctacagtgagccatgtttacactattgcactccggcctgagtgacagagccagtctgtcacctgtctctaaaaaaataaaaaataaaaaaaaaatatgagccaaatttggcataatgtagatttccatcattaaaacaaaactcacagaaaacagcaagatttcaaagccagcatgcagtgattaagatatccctttggagtcgggtccttgctttgcctccgcaggctgcgtgacctggtgcttaacgcagttaccacatggtggcgccacgtcagctgagagcagaaatagaaaggtccccgttcttcactagtgcctggcgaggggtctgtttacatgcatcagaacacctgtcctgggttttgaggactcttgtattgctattttataactcactataatactttaaaaatatttaatttaaaaatcatttaataattaatttaaatataataataaataatttaaaaatcatttttaaataataattttaaaaccctccaacatgtcatccacccattcattaggaggtaacagcaccagggctgaaaaatgtgcattaaagtcgataactttggtgtgcaacgtcagcgtgataggcaaccaagtagccacctctctgaggctgagccgtcaattttggggtgacccctctttgggatttgagagatcgggctgagaagacagaaagcaatgacaatatgctgcagtggtcgtggattttctgtgcggagggaacatctcctcctactgtatatttattcttgtggggaatgagtcctgccctacggggagttttgcattaatgaggctctctaagaaccgaggctctccaagaaccaagccatgcatacagtgcagaacaccctaggcaaggccttcacatcagatttgtgggctgaggctgacacgtgaacggagctgccttagcgccccgcctgaccccctctttcctttcccccacaccccctgctctgatctgctgtctcttctcagcctctctgctcaccctgtctcttctggccattcttaacggcatcccccacttaggcatccctccgcccccacaggctgccaggcagacccagcaccatcacattcacgcctcaggcctccttgctgtgctgtttcacgtcattcccagacacctggggcagattccggagtctctaccaagaaaacaaccagaagcaatgaaccacaaaatctggagaaaaacatggctgtcacagatcaaagaggcccccctttggaggctgggggcctccgtgagaagcagtgggatagttgagaggcaaaaaacatggggcagaattccgcgcccctcatatcagctgggagaatgccaatgaccagtggtttctgagctttagctgtgtggggtaagaggtcaatagattttggtgttactattatggggttgccagagccacctctgttcctgccagatgggcccccagctcctctgggtgaactgtgacttccctcagtcacatagatccagccatgcaaacctgcctgcgttgcggccacagcacttgctgtctctctcaccaggaccgttctccctgatggcatcagggcctggatcacagtcacattctccaggagtgtttttgcaggggaccctctggatcactcctactccaacttcagcctatttttaaaaaaatttctctttttttttctgcagtatgtatacatagttaaatatatatttatattttttaaccaaagctcttgttagatgccttctttcctgagtagccctctgtgctccgccttaccccacccaccatgagccctactgcagaagacctcatcccggaagacctccgtcagtgtctccacttcagtagctctgtagctgagccatgtggggcacaagtcctgccaggacctctctgttttccaagcttggcactgcctttggggagtctagattttaaaatggaaaagacaaaaaatatggcaacctaaaaaagaaaataattcagaatgttataagctaatacagccatctcatttttgcatcttccttttggattccagcccatgagcacagtctgcttttctcagctaacgttatcccttaagcagttccccagatctccatggccttcatcatcactagctcaaatggctttataatgggccattttcatgacatgcactaatttactaaaccattttcctaatgtcggccatttaggtgatatctaatttttggctcacacaaccacaggtgtcttcatatagaaagcttttgactgcatttgaattattttcttaggaaattactggattagaaggtgtaaacatctccatggatttcattatccatgacttggtgtctatttggtatttttctgatggcttctttgattctagaaaaggatttgccatagtgcaagaagtacaaatgataacactaggacaaaatagagagggaacacaaggagagaagaaaagtaaaagtttggattccaaaaatacatcctaggatgtcctgcagctttctacagttctctaatgtacaagtgaattaaaaatttaaggtatacaacgactgattttagagataaaatcactttgcagatgtaaagaaacatggaaaaatcccagccattggtaatagtagactcaaaaatgaggtaggtcaaagtcccagtcagcctctgtctggggggaaaccccttaacttatctcagtctcagttgcctaattacataaaatggaatactgatagctacttgctagaggtggcctgcgcattttttacgctttccagccgccattggaaataagatcattggccaggggcggtggctcacgcctgtcatcccagcactttgggaggctgaggcgggcagatcacgaggtcaggagatcaagaccatcctggctaacacagtgaagccccatctctacaaataattagccaggtgtggtggcacacgcctgtagtcccagctacttgggaggctgagacaggagaatcgcttgaacccaggaggcgaagcttgcagtgagccatcgcgccactgcattccagcctggatgacagagcgagactctgtctcaaaaaaaaaaaaaaaaaaaaaaaaagatcactttcaagatccatggaatctggtgttctatagttctatatctggtatttgcaagacagaagtcaggaatagagactccagacacatttcttcccttggttgtcttaaaggggacactgtgatcttgacagcctgagtaaagggtttgagtgagtgcctatgatatagtggacagtttcctcaactatatttctaaaaaaagacaagttttatgtctttttaaaaattgtggcaaaatacatataacataaaatttactatcttaaccatttttttggggtgattgcttgagctcaggagtttgaggctggagcgagttaagatcatgccacttcaatctgggcaacagagcaaaagtgtgtctcttaaaaaaaaaaatgcctgtaatcccagcactttgggaggccaaggcaggcagattgcttgagcccaggagtttgagaccagcccgggcaacatggcaagatcctgtctctacaaaaaatacaaaaattaactgggtgtggtggcacctgtagtcccagctacttgagaggctgaggtgggggatcacttgagcctggcaggtcaaggctgcagtgagctgtgattgcaccactgcactccagcctgggtgacagaatgagactctctcaaaaaacaaaaacaaaaacaaaaaacaatcccccaaaacaaaacaaaaaaccactgccctctccccactgaatggtcctgccacccttttcaaaattcatttgaccacgcatgtgagggtgtatgtctgggctctattcaatgacattgacctatgtctgtctttatgccagtaccatactgttttgattactgtagctttgtagtaagttttgaaatcaggaagtgtgagtcctccaattttgctctttttccagattgttttgtctatttggggtcccttgagattctcgtgtgaattttaggatagattttctatttctgcaaaaaacatcattggggttttgatagggattacatttaatctatggattgctttgggtagtattgagatctttaagttttctaatccatgaacataggatatatttccatttatttatatcttttttttttttttcttgagacagagtctcgctctgttgtcagactggaggactgtggcgccatctcggctcactgcaacctctgactccctggttcaagcaattctcctgcttcagcctcctgagtagctgggattacaggcacacgccaccacgcccagctaatttttatatttttagtagagacggggtttcaccatgttggctaggatggtctcaatctcctgacctagtgatccaccagcctcggtctcccaaagtgctgggattacaggcgtgagccactgtgcctggcctatgtcttctttatttttctttctttctttctttcttttttttttttttttttagatggagtcctgctctgttgcccaggctggagtgcaatggcacgatcttgactcactgcaacctccgcctcctggattcaagtgattttcctgcctcagcctcccaagtagctgggattacaggtgcccaccaccacgcctgggtaatttttgtattttttaatagagacggggttttaccatgttggccaggcttgtttcaaactcctgacctcaggtgatctgcctgccttggcctcccaaagtgctgggattacaggtgtgagccactgtgcccggctctttttcttttttgagactgggtcttgctttgtcacccaggctgaagtgcagtggcgcgatcactgcacactgcagcctcaactgcttggactcaagtggttctcccacctcagcctcacgagtagctgggaccacaggcacatgccaccacacctggctaaattttttattatgtgtagagatgaggttttgctggtctggaactcctgggctcaagggatcctcctgcctcagcctcccaaagtgttgagattacaggcgtgagccatggcatccagccttctttctttcagcaatgttttgtagttttcattttacaagtctttcatcttggttaagttaatttctaactattttattatttttgatgctattgtcaatggaaccatttttgtaatttctttttctgattgttcattgttagtgtatagaaatggaagtattttttgtggttggcttcgtatcctgctaatatgctaattttatttgttctaatagtgtttcatctttagggttttctgcatataaaatcataccatttgtgagtagagataattttactccttctttccaatttgaatgtcttttatttctttttcttgcctccttgctctattaacttctagtaatgtgttgaatagaagtggcaaaagcagaaattcttgccttcttcctgatcttatagaaaaaggtttcagtctttcaccattgagtataatgtttgctgtgggtttttcatatatggcttttactatgttgaggtagtttccttctattctgagtttgttgactgtttttatcatgaaagcttgttgaattttgtcatgtgcttttttctgcatcaattgagatgatgatgtagggtttttttcattctcttatgaaccccaaaaatctgagacaggtctcagtcaatttaagaagtttcttttgccaaagttaaggatgcacgcccaggagacaggtctatgcctttctctgaacatgaattttagggttccaaatttaaaggggaaagggcaggatattgagaagtacacagttttcaggtaagagcagggtagggggaaatagtcattcaagcatttgtctggctcagtgaatttgcatttttacgtaaggtaacatagggcaggggaaaatgcagggaacctgcatttttacgtaagataacaaagacaaatggggcaggggaataatcagatatgcatttgtgccaggtgggcagaggggtgatgcctctgtaaagataagctatccatttacattgccgtggtgaattttatcagacaactatcttggagctcaccaggaatttccttgtgggcaaaatatgggagaggtgtgtagcttttcatcttgtagccatcttatttaggaaccaaaacggggaggcaggtttgcgtgacccagttcccagcttgacttttccgtttggcttaatgagtttggggtcccaagatttattttcctttcacactgttaatgtagtatattgcaccgactttcatatgttgaaccatccttgtctgtgtatttcaatgacaagaggtgtttgtttctgcttcctgcagagcagaaagaccatgggtttgaggtggcctccacttcccctgaagacgagtcccctggcagtaaccccgagccagatgccaccccgttccaggaaggtttgaggaccttcgaccagctggacgccatatctagtttgcccacacccagtgacatctttgtgtcctactctactttcccaggtgagcacatcagaagggctcgtcctcgcagccagtgggtcttcccgtctgccctagaggcagctgtgtggtgagagaaaagaccagggtatgagtcctggttctgtcttttgcccctctgtgaccctgagcaagttacttctctctgagcctcggctcaggctgagcgggcaaggatgcgcgctgcaaggaggcctgcgcccttgggttcctatgcctcacttgcctctcctctgcctgaccctgcctctgccttcgcatctttagcaggggaataggaatcgtgcctcaggggtttccatgggaattaaacaaggtggctggcacgtcactgagcacagtgcggggcacgtagtagttgcagcaagcggtagtttccttccttcttttttttttttttttttttttttgagatggaatctcgctctgttgcccaggctggagtgcagtggcgcgatcttgggtcactgcaagctctgcatcccgggttcacaccattctcctgcctcagcctcccaagtagctgggactacaagcacctgccaccacgcctggctaattttttgtatttttagtagagatggggtttcaccgtgttagccacgatggtctcgatctcctgacctcgtgatccacctgcctcggcttcccaaagtgctgggattacaggcgtgagccaccgcgcccagcctttttttttttttttttgagacggagtcttgctttgtcgcccaggctggagttcagtagcatgatctcagctcactgcaacctccacctcccgggttgaagtaattctcctgccttagcctcctaagtagctgggattacaggcatgcatcaccacacccagctaatttttgtatttttagtagacacagggtttcaccatgttggccaggctggtcaagaattcctgacctcaagtgatttgcccacctcggccttccaaaatgctgggattacaggtgtgagccactgtgcctggcagtttccttcctttcttatgtcttggatgagtcacttgacttttccaagccttggtttccttgctgggaaaacaggaattatagccggaatcaggggatggtcatgagggtgaaataagatcatgattagggcagagcctcaggggccaggctgctcctgttggatgtatgtatgagtcaaggtctggagggcgcccgagccagcgtgcatggccagaggggtggtggggagccggcggaggggtggctctccagcagtgttcagccctcctccctccaaaggttttgtttcctggagggaccccaagagtggctcctggtacgttgagaccctggacgacatctttgagcagtgggctcactctgaagacctgcagtccctcctgcttagggtgagtgctgccttcctctgcaaaggagaggggaggctgctgaggggcagcgtgtcctcctggggctggggatttggggtgagcagggcaggcccaaaccaagggtaaaaggtagtagactcctgcctctgagccttggagtcggcacttttgtgtctctttatgagaggcatcctgcctgtggtgacgtttgccctttattcaaagagttgccttccctgtctcctccaaggtccccaggttgacacctcccgctcctccactgatggagctggtcctcagtgccagcgcaggatggctctgtccagaccctgaaggcgggtcatgggcccctccctatatcctgtgggcatcatgtagtcttctactcttgaccctcaagaattgtgaacccctccttgtacatcgccttctcaggaggccccagtgaggaaacagatagggaagggtggcctgataggcccagtcctactccatagaaacccgactcagagcagttgcttcctctgagggtcctgtggccttgtggctgccttgggaggcagcatgtatgggccccagctgctctgctcaggtattcatgccacgagaaggggctgcgaggctggggccactcctggctccttgcaaatatttcagtctgatttgaactttatgaatttggaaattttgaattttgagttttttaaaggtaaagttgaggtgcgtattctttaagccctcctgctcaaagaggctgcagtttgagctgtttttaaggtgcgggttgagtggacattccccccagcccctcttgaattcttccttcagtccagagaactgaactcacagagctctccatggtcatgtcttacaggtcgctaatgctgtttcggtgaaagggatttataaacagatgcctggttgctttaatttcctccggaaaaaacttttctttaaaacatcataaggccagggcccctcaccctgccttatcttgcaccccaaagctttcctgccccaggcctgaaagaggctgaggcctggactttcctgcaactcaaggactttgcagccggcacagggtctgctctttctctgccagtgacagacaggctcttagcagcttccagattgacgacaagtgctgaacagtggaggaagagggacagatgaatgccgtggattgcacgtggcctcttgagcagtggctggtccagggctagtgacttgtgtcccatgatccctgtgttgtctctagagcagggattaacctctgcactactgacatgtggggccaggtcaccctttgctgtgaggctgtcctgtacattgtgggatgttcagcactgtcccttgcctcaatgccagtaacgcgtcttcctgagtggtgccaaacaaaaaggttctcaggtgttgccaaatatgtcctggggtataaaactttcctcgcctgacaaccactggtctgtagggatttttggctacacacaaaccagtatcgctcatagatcagcaaaccggggcctactagagtctgaacagctgtaatctatgaattctaagtgaaattttaaaaattgttaatttttcctatattgcattaattttaaaaaataaatctgaggcaaatatggactctcttttgcctatttcttccctcattttgctccaactctttcttcttccttacaaaagagacttttgcttttttcgaaacatttccccatgtttttctggggtctcgctatgttgcccaggctggtctcaaactcctgggctcaagtgaccctcccaagtagctcttactacaggcgtgcaccattgcacccagccccatttattcatgtcttatttcacttgatccttatcccatcccaggaaggcaacaagggtgagaaccctgtgctcagggaggttaggtctcttgtccaagggaaaacgattatccagagaagagacctggccagaacctgggtcccctgagtcctagccatgcttcccatgtgccttacttgctgaagcacccccggactgcagtgtgaacgtgctgtgcaatagtgacacgctgggcttccccacaaggctccaccctgaggtcttttaagctgtccttatgccagcctatttcttgttttttgggcctttttttttggagatagggtctcactctgtcgcccaggctggagtgcaatgacgcaatcttggcttattgcagtctcgacctcctgggctcaagagatccttccacctcagccacctgagtagcttggactacaggtgtgcaccacctctcccagttaatttttgtatttttagtagagacagagttatgccatgttactcaggctggtcttgaactcctggactcaagcgatcagcctgccttagcctcccaaagtgcaggggttacaggcttgagccattgcgcctgacctatttctggttcttagggccctggatgttaggatggatttctgaattaataataataataaaaccctcatcaagatgtgatttgcatagttgtcactttatataatattattttccttctgtgacctttccaagtctgaaacagtcccagggacttcttttggttagttatttgcaatcacctgcaggacacacacacaagaaaattgtcaggttcacgtaaccacagagctgtgcgtggcagtttcctgtctctgtcctcctgggctaagctactcaagtgagtcacaggcagcccacactacagtagctcctgcctgaggagttcagatgatgtttcggagaaaaagatgcaatcacagcttttcattgacctgttagggtcttcctgtaaagggggtcttagccaggagtcctgtgtgggcttcaggtcagggggccttcgaaccccctaaaaattatatgccaaatgtgcggatggcatatttttagatttcatttgtttctcatcaaaactgctgtttgcaaggcagttatgcactgtggttggggctataactgtttccagaggctgttgatcagtatctgttaaactttttttttttttttttgagacagtcttgctctgttgcccagacgagtaca

SEQ ID NO: 15502 - DNA, 31250 bp, Homo sapiens
agcaacgggaaatggcggaaccgggcggcgcggcgggccggtaagccgggccgaggggcagcgggtcttggagtcgccaggccgcgctctccgttcaccgctccaggtggcccccgcgtcggctcctgcctcgccccttcgcctccactcccccttcctctcgcctgtgtcccttctctcgccattttgctggcctttcccgtccactgcgttcagcccctcacccccccgccaacccttctcacttctcccctcctgtccctttgtcctctctcggcctccctctttcccctactccaagcgcgcgactccctctaaaacccgggaccgctcactctgcagtcaccatggcaaccactctgcgtggcggtccctgcgcgcagtcctcctaagagtagagggctctgcagggcgcggggctgttggataccgcccctgaccttgctccggggccactcgctgtggccggagaccagcccggccccgcgcctccctcctgcaaggacagatcccctctcgcaggcttgggggtgacccgcgatgggaggggtccctgcggttaggcggcccgcgatagtccgcggtcaccgtcctggggcctgggtggaagcactgagcgcgcacagggagggcggctgagtgaagatccctgccaccgggcctctgctcgcttaggctctgtttaaaaggatagaaacgattggaaagagtttggcctttttaccttagacacatcggtattgtttcatttttttaaaggtgggtctgtatgtattgacatggaaagactaaaggtattattaataaaacgataggcataaatgtaaaagggtaggtatactatgatctctaattcagggtgtgtgtgtgtgtttaaaacatagaaaaatgttgaaagaatgtggtcctaaatgttatcaatgattatcttgggaaggaaagggaagatcacagggaactgtcactgtctgtctctttgaacatatctatattcctttgacagataaaaatagcttgaatctttaattttttaaaaaagatatacatatatatatatatatatatatattcctgtgctacgtaaatcgtggagaaactcagagtccccagaacacttactctgatcgcgctactttctctacgttgtatttcttttccccagttttgtcccagacacaagttatatttgaggtgacttttctggggtgatctaatcctgctgttccttcgatgttttaataattatatttttcattcattcatggagctttgcttttgtggcatctccgccacctgacaggcatgatatagtgctatggttcctgacaaacaggacaaagacgtgacaacagcctgggggtggcagagaagtaacaagtaaataaacagatgtgcagaattcaggaggggataaggaccaagaaaaagaaagctgttgcttgaaactgttcaattgtttctctaaaaccaggtcccatccggaagatggatcggcttctgagggagagaaggaagggaataatgaaagccacatggtaaaattccctatgggcagttattccgggcttatatttactaggaattaaagagaatcagagtacgggcactgtggctcacgcctgtaatcccaacactttgggaggccaaggcaggtggatcacatgaggttaggagtttgagacaagcctggccaacatggtaaaaccccatctctactaaaaatataaaaattagccgggcgtggtggtgcgcacatgtagtcccagctactcgggaggctgaggcaggacagtggcttgaactcgggagacagaggttgcagtgagccaagatcacaccattgcactccagcctgggtgaccagtgaaactctatctcaaaaataaataaataggccgggcacggtgactcacgcctgtaattccagcactttgggaggccgaggcaggcagatcacgaggtcaaaagatcgagactatcctggccaacatggtgaaaccctgtctctactaaaaatacaaaaatttgccaggcatggtggttcacgcctgtagtcccagctactcgggaggctgaggcaggagaatggcttgaacctgggagatggaggttgcagtgagccgagattgtgccactgcactcagcctggcgacagagcgagactccatctcaaaaaatagataaataaaattaaattaaaaataaataaataaagagaattaggacttggtcaagtatattgtatgatgacattatcttgcaccagaacaaactcaattcagttgaagagagactcattttcttcctaccccattctacagtgtcagtgattagtcagggatgcaaaggatgtccaactttgggttgccctgagtttttcggaactcatttcctgtaacaaaggatgcaaaaatgattatgaaaagcagagagggccaggcatggtggctcacgcctgtggtcccggcactttgggaggctgaggcggatggatctcttgaggccaggaattcaagaccagcctggccaacatggtgaaaccccatccctactaaaaatggaaaaattaactgggcatggtggtacacacctgtagtcccagctacttgggaggctgaagcaggagaatcgcttgaacccaggaggtggaagttgcagtgagccgagatcacgccaccgcactccagcctgggcagcagagtgagcccctgtcacaaaaaaaaataaaaaaagaaagaacagataaactgaagcatgaaacatgattttttttttttttgagacagagtctcactctgtctccaggctgaagttcagtggcacgatctcagctcactgcaacctctgccttccgagtttaagcaattctcctgccccagccttctaagtagctgggattacaggtgtgcaccaccatacccagctaatttttgtatttttagtagagacggggtttcaccatgttggtcaggatggtctcaatctcctgacctcgtgatctgcctgcctcagcctcccaaagtgaaacatgatctcttagtgatgctgagaagggtataaatgcagttttcccattgatataattacactataaagaataaaacctcacaaggtcctttatactttgtttcctgatttttttcctgccacacctttacaggtgtcaccaccagagaaggatgatggccagaaaggtgaagaagctgtcggtagcacagagcatcctgaggaagtcacaacccaagcggaagctgcaattgaagagggggaggtggagacagaaggggaagcagcagtggaaggggaagaggaggctgtgtcctatggagatgctgaaagcgaagaggaatattactatacagaaacttcatccccggaagggcaaatcagtgctgcagatacgacttacccgtatttcagtcctcctcaggaactgcctggagaggaggcatacgatagtgttagcggggaggctggtctccaaggcttccagcaagaggccaccggtccaccagaatccagagaaaggagggtcacctccccagagccatcccacggagtcttaggcccgtcggagcaaatgggccaggtcacctctgggccagcagtgggcagattggtgagtagccctgacttctgttttgtgccagtgtcgcacggcccacggggtttgtcaccctatgtgaggaacttgggaatacattataaatacaaattgcaatccctgttagaaatgtcttagcaaggctgggtgcggtggctcacgcctgtaatcccagcactttgggaggcgaaggtgggtgggtcacctgaggtcaggagttcgagaccagcctggccaacgtggtgaaatcctgtctctactaaatatgcaaaaattaggcaggcgtggtggcgcacgcctgtaatcccagctactcaggaggctgaggtgggagaattgcttgaacccgagaggcggaggctgcagtgagccaagatcccaccattgcactatagcctgggcaacagagtgagaccttgtctcaaaaaaaaaaaaaaaaagaaaagaaatttcttagcaagcttaggtctcaggattcacggtcaaatgctgagagatcctggactctgcttcagtctgcccaagcccaaggctgggggcctccatagccgccatccacgtaagggcatccaagttcccaggcttccagagcagcattgtccaatacggtccatcagtcacatgtggctacagagagctctccaaatgtgactagcgagctggaggaatggagcttttaactgtttaagattctaatttccatttaaatagccacctgttgccagtggctgccataatgaatagtgcagttctagataaaaacaatgacaatagctgcgttcttatattttttcatcaattttctttaaacaatcacaaagttacagaaaaaaatggagtacaataaaaaggatcttttattttcttaaacactggagagtgggttgcggatctggtcaccaaagccttcgaacgcttctgtatgtttcccacaaacagctgggacacaaccatcaaaatctagaaattgggtcgggcatggtggtgcacgcctgtaatcccagcacttcgggaggccaaggcgggtggatcacttgaggccaggagttcgataccagcctggccaacatggtgaaaccccatctctactaaaaatacaaaaattagctggacgtggtggtgcacacctgtaatcccagctactcgggaggctgaggcaggagaatcacttgaactggagaggcaggggttgccgtcagccgagatcgcacccctgtactcctgcatgggcgacagagcgagactctgtctcaaaaaaaaaaaaaaattctggaaattgccttgctccatttccaaggaatgctcaggcctcattcagggttcaccaaatgtcccaatgatgtcttttgtagcaaagagattcagttcagaatcaaatgttgccttgagtgctcatatttctgtagtctcctcagtctttccttgacaaccttgacccttgtgaaggtcataggccagctgtcttgtagagcgcccctcagcctggatttgccccgtgtttcctcatgatggggttagggtcatgaggctttagtgggactatcacggaagcgacgtggggctctcagtgcgtcccaccagggatgcaggattccagcttccaccattcctgatgatgttcacttctgtcaccaaatttaaaagcaccaagattcttcattgtgaagcgaccttttactcctttatacttaatgaagattttgtgggaaggtgcttttttcttttttggtttaagataggaaggcgaatactatttagaatgggaaaaaaattgcaacagattccaaccagttattgaggacttcttatatttgcttacaaacgtatacaggtgttatacaacttttggcagatttatccctaagtatttctcttttttttgagatgtagtctcgctctgtcacccaggctggagtgcagtggcatgatcttggttcacagcaacctctgcctcccgggttcaagcaattctcctgcctcagcctcccaagtagctgggactacaggcacacaccaccacacctggctaaaattcggtatttttagtagagatggggtttcaccatgttggccaggctggtctcgaactcctgcccacaaatgatctgcctgccgcagcttcccaaagtgttgggattacaggtgtgagccatcgctcctgcccagtatttcacatttttgatgccattataaatggtttccaattgtctgtggctagcatatagaaatacaattggtttttgtatactcacctgatattctgccacgttgctaaagtccctcactagttagactagcttgtttgtagaatcggtaggctttttcacaaagataatcatctcatctgagaaaaaagacagttaacttcttcctttcccatccagatgccttttctttctttttcttgcctgattgcattggctagaaccgccagcaccatgttgaatagaagcggtgagagcagacctcttgtcttgccctgatcttacaggaaaagcatcagtctttgactgtaaagtgccatgtttgctgtgggtgttgcagatgccctttatcaggttaaggaagttcccttgtattctcggtttgttgtatgttgttgggttgtttttttttttttaatcataaaagggtattgggttttgtcaaatccttttctgtgtctgttaagaagactgtattttcctttttagttagttgatttggtagattacattgattgattttcagatgttcaagcaaccccgcattctgagataaacacagggagccactttggagtgatgtgaatgtcggttcctctttaaactcttggtttatttatattcttacatctgcatagactcagggctctccatgtgattcactgggttataacccattactgtcattatgtattttgatgctcagtttggccagtgagggcccatttaaaccagcctttgtgtgatcggacgcacctccatccttctttgagggctttcttgctttctgccatagactgcccagccttagaatcagacatttctccaggagccctgtttctgttagtggaaaatagaatttagaagttatcacttgggtgctggggtcctcattgatgctggggtgtcactgtccccaggacctctcagcggcaggagatagggcctgtgtgcgtgtactgtacgtacttcccccacatttatacatacaccatgtacacagacattcgctcacatctatatttattggaacacacccctgcggccggccttggctcacacccctgcggccggccttggctcacaacagaacctctaattccatctcacctccataaggagtccctcctggttttctcctcttccttttttttttttttttttttgaaacagagtcttgcccaggtagctgggactgcaagcactcaccatcacgcccggctaatttttgtattttttgtacaagggggcgtcttaccatgatacccaggctggtctcgaactcctgggctcagtcaatcctccctcctcaacctcccaaagtgctgggattacaggcatgagccaccacgcccggcctcctcttccatatttgtagctcctttctccaacagggagaagcctggccccatgatccttactgtattcactgatgtggtcaatcctcctggatgtaacctgtctcccacttttactgccttggctgccccctactcccagcataccttaggtttcaattgttctgcgaggggagatgggagtatggaagggaggcagggaaagaggatgctttatacttcttagcactgactatgggatagacactgttctgtgttgtcttagaatcctgacaaccctacgaggtaggaactatgattgtgcccattgtacagatgaggaaactgagaggtgcaaggtcattgcatagtcacccagctgttgcggcaaacggtagctcttgcttcaaagccaccgttctgaaccacaaggcacccatccctcctactcccctaccctgggaaacccgaaagagtttctaaaagtcactttggagaacagcatgattcagtatttggtgagccctaattaagttttatgatcacaagtgacaaatataaaaccaaaaccaaaatcttattttaagaatttatcaacaacaacaggccaggcctagtggctcatggctgtgatcccagcactttgggaggccgatgcaggcggatcacttgaggccaggagttcgagaccagcttaaccaacatggcgagaccccatctctactaaaaatacaaaaattagccgggtgtgttggtgcacacctgtagtcccagctacttaggaggctgaggcacaagaatcgcttgagcttgggagtcagagattgcatgagccaagatcatgccactgcactccagcctgggagacagagcgagaccccatctcaaaaacaaaacaaaacaaacaaacaaaaaaaaaaatatatatatatatatatatatctcaacaacagcaaaaccagtgtcttcacctttgtttaagtgaagtctaggtcacttgttgctctgtaaacccgattttcatccttgggcctagtttctagaaaatacactgggaagtagttttcaaatatgattgaagaaagggcagggacagcccctgagcgagccttgcttcccacctcccactggctctcagtctttgggacagtgtgagtggagcttgtgtccagttgtgcacacggacacccggaaacctctcattaggagaagccactgctgcgcaccctggagatgggttttgaccctgggctcccgttaatgttgttgtggctccagatgcctcagaaataacttccagagtcaacaccatctgcggaagtgccgtgagacggtgcatgggctggagacagagacagccggcgccgaacatacctggggctgcccgtgcaaactggggcaagcccttcagcctccatgtggctgctttactatggagaacagaaatgactagaacctgacttgtggggttatggcgagggtggcatgagatgagctttgtaacaatgtgttgtttatgggcagcaaaaccctgactcattgtctgggttactaatatccaagagttcatcatcagcgataattattgtcaatagtcgtaactgcaaaagtctcttttaaagctaaaatggatgccgggcacagtggctgtaatcccaacactttgcgaggccgaggcgggtggatcacttgaggtcaggagttcgagaccggcctgggtaacatggcaaaaccccgtctctactaaaagtgcaaaaattagccaggtgtggtggcaggtgcctgtaatcccagctactcaggaggctgaggcaagagaatcacttgaacccaggaggcggagtttgcagtgagccgagatggtgccactgcactccagcctgggcgacagagcgagagtccatctcaaaaacaacaacaactacaaaaaacgctgaaaaacagagctggggaaaggcattaaggggagggcttctcataacaaaaactatcacaaaagactctgcaaaccccacaatgttgcacaaagatcatcataacctttcaaaaaaaaaaaaaacacttctgctaggacagctgccagcaactgcctgtcgaaacttggactgatgccaccctgttattgatccttacagccaaggagaattatcgcaaaacaattatgtaatcctcctcatttttcctgtgtcaactttcatcttcctttacctccccaaatacaaacataatttactatgacacccgtattcccattgcaatgccctatccccaaataaatgtcattttcctttacagaacctctctctgtttgttatttaggatgatacattgctcaaaatttaacatgattgttaaagtaataggaaatcacttggatataaaaatcatcatttgacttttgcaaatgtccaaaatggaaaacatctaactctcccccgcccagggaattcagaagtggttcccccagctcacacctgtaatcccagcactttgggaggccaaagcggaaaggctgaatgaggccaggaatttgagaccagcctaggaatcatagcaagaccctacctctaagtaaaatattaaaaaattagaccagtgtggtggtgtgcacctgtaatcccagctactctggaggctaaggagggaggatcaccggagcccagaagttgggggttgcagtgagctatgattgcagcactgcacgccagtctaggtggcagagtgagacccttactcaataataataataataataataataaaagagtggtttctgcgtgtctgcatctgtagctaagtgtaaacacccaggcacgagaatgcatgggtcctgggatcttttgctcccacatgctgagcgcctcgaggatgggaaaccacaactctgagcaccctcttcatgaaagcatgcggaaaagcctcggctcctggccagggtctcccaagaggactgtttcctcttctctcctttcaaaccagccccctttagggaaatttcaataagaaaatgtcttcccttcataaaaacacctggctcgattttaactttatttatttatttatttttgagaaggggtcttgctctgttgcccaggctggagtgcagtgctgtgatctctgctcactgcaacctctgcctcccgggttcaagcaattctccctcctcagcctcccaagtagctgggattacaggtgcccgccaccgcacccagctaatttttgtatttctggtagagacggggtttcgccatgttggccaggctggtctcgaactcctggcctcaagcgatccacccgccttggcctcccaaagtgctgggagttacaggcatgagccacgtgcccggccaggttttttaaaaaacacacaggtgactatattttgagtctgacaactttcacaaatgtaatgagttaaaattgaataacttctcagtggcaattaagccctgttgacttagttttggttgttcttgccatagacaggatccacagaggagccccaggggcaggtgctcccaatgggcgtccagcaccgcttccggctgagccacgggagcgacatcgagtcctcagacctggaggagttcgtctcgcaggagccaggtgccacccacctgctgaggtcaccctgccctggcgatgagccacctgcacaggcccttctgtgcaagggatgccactcgtttgtcatccgttacctgtttcctgagtggctgtgagctgaaagagaaaaatcttattaacagatatggataacatttattgggcatttactgttttatctcatttaatcctaacagtgaccgatgaagtaggaatccttctccatttaacagacaggttccctaaggccattaaggaactggtccgattaagtgacagaacgcggccttcaccaagattcagtgacgcccagccccatcccctgacagccatttctcacgggctcctggtctcagagcgagacgtgccgtgacagcaaccccaggcctgaatctgtctgctggctttcaaaggctttccagaacccctgtcttcttacgtagtcccagtatcccagtgttgtggacgtgggagggcagatcaggcagttgcaaattccctgtggtaccgacctgcagccggtccaaacctttcattacttgcaaatgacatgaaaacagcacgtgtctaaattagtaaaaaaacaagccgggcgcggtggctcacgcctggaatcccagccaaggccggtggatcacctgaggtcaggtgttcgagaccagtctggccaacatggtgaaacccctgtctctactaaaaatacaaaaattaccgggcgtggtggcgggtgcctgtaatccccagctgctcgggaggctgaggcaggagaatcgcttgaaccccggaggtggaggttgcagtgagccgagatcacgccactgcactccagcctgggcaacagagcaagactctgtctggggataaaaaatattgtatccaatccactagttaagtggccacctttctgttcactctttatgtgtaaagaaagcctctcaaaaataatttccttcctgcctacctttaaaacgggacgctttctctgggatgcattgagtcagggaatagaagatggggtgaatgatgtttctgacccacagaccgttgggatgcttttgctgtcactttcccatcatgctgcatgaggcatgacagcagctgtgccattgatgccccagaatagaatcactgaggcttctctccagcagctcctcaatggtgtcgctgtctctccccccagtgatccccccaggggtgcccgatgcccaccccagggaaggagacctgccagtgttccaggaccagatccagcagcccagcaccgaggagggggccatggcagagagagtggagtccgaggggagtgacgaggaagcagaagacgaagggtcccagctggtggttttggacccagaccacgtaaggaagccttcccaggttttgcttttgcctacatggatggcgaatgactcaggcccctttctctgcctgcactgtctcccactcctgaccctaaatgctgtacttgtatctcgcctgttcactgcaccgtttattggcactgattgacctgcctcttcgtagggtactctcctctgaggttggtataggtgaggcctgtgtttctcaaccccggaaccactgccccgtggggccgggtcattctgtgctgtgccttgcatggtgtggaacagcatccccgagctccccctgctacatgccaggagcaccacccccccgccttggttgtgatcatcaaaaatgtctccaggctggacgtggtagctcatgcctgtaatcccagcactttgggaggccaaggtctgtggatcacctgaggtcaggagttcgagaccagcctggccaacatggtgaaaccccatctctactaaaaatacaaaaaaaaaaaaaaattagctgggcatggtggtgagcacctgtaatccctgttactcaggaggctgaggcaggagaatcgcttaaacccaagaggcggaggttgcatgcagacagccaagatggcaccagtgcactccagcctgggcaataagagcgaaactctgtctcaaaaaaaaaaaaaaaaaaatgtctccagtcattgccaaatgttggcggtgtggggcccatcttcgcagccactgccttgagggcaccaattggatcgcagctccctgccccacccactggcaaggggaaaaggcagatgttgatttcatttacccatcaggacagctgcagagctccaggaactgccggaaggagctgggggctgcacagggaggttctctccccagaccactgctccaccccaccctctggccccagctcaccatcattttgccaaaatatgcactcagttctctgcaagtgcctcagatgagaccatgaggtgcctttaatttgtggcttccagagtaagaatcccaagcagaagcagggagcactccacacggaagtcgtctctggcccaccggagggagacctgtggccacctgggctgagccctgggtcgggcaggagggtaaccagaaaggtaaccacctgtggttttccattgttctagcccctgatggtaagattccaggctgccctgaagaactacctgaaccgacagatcgaaaagttgaagctggacctccaagagctggtgtgtatccgtccagtctcccaccctggtcggatgcctgcgtcctggtgaccctgtttctctctttggtccaggttgtggctaccaagcagagccgagcccagcggcaggagctgggggtgaatctctatgaggtgcagcagcacctggtacacctgcagaagctgctggagaagagtcacgaccgccacgcaatggcctcgagcgagcgcaggcagaaggaggaggagctgcaggccgcccgcgctctctacaccaagacctgcgcagccgccaacgaggagcgcaaaaagtgtaaggcaacccggcagccccacacgccatccggtcctggagggtttcccaggggtgtctccatgtaccatggccaggcatctagaaaagtaagatgtgtgtgcatcctggaggggttcccaccctttttaggaggggaaggcacataaatcaaatgtctttttgttgttgtttttttgagatggagtctcactctgtcacccaggctggagtgcaatggcgcgatcttggctcactgcaacctcccccttccgggatcaagccagtctcctggctgagcctcccaagtagctggtattacaggcacctgccaccatgcctggctattttttgtatttttagtagagacggggtttcaccatgttggccaggctggtctcgaactcctgacctcaggtgattcgcctgcctcggcctcccaaaatgctgggattacaggcatgagacactgcacccggttataaatatgttaaatggcacctgtcaggacaaagcagcaaatgctgaagctgctaacagccagagcgtagagattcaaaactgggagagatgggtgagctgcagaggtcccaggatagatgagaccaggaggcgagagcagaccgggggtgatggagggtttcaatagatgcgaatgcgagggtgaggccggcacgacggtcagaccatggcccagggcctgaccgccgtaggatgtgtgcggcaggtcagtgggtagctttgaatcagatgagacagtgggggctacagcacgtgctatgcaacattaccgataaagcaacgtccttgcacagagctggtcatgtaggtgaccggggacagtggcttcctcttgtgactacggagtatttcagtctttatgctttttgatgttttcaactttctcaatcaactgtgtattactcttataatggggaaatgacctacacaaacctggaggaaaacagaagcacatggctatcccagctgttctggaaagaaacattttaaaccctgagaaaagtggaagaggttctggaaatttcagagttagggtaagtgggcacttatcaagcacctctcttggctgggcgcagtggctcacgcctgtaatcctagcactttgggaggccgaggcgggcggatcacgaggtcaggagatcgagaccatcccggctaaaacggtgaaaccccgtctctactaaaaatacaaaaaattagccgggcgtagtggcgggcgcctgtagtcccagctacttgggaggctgaggcaggagaatggcgtgaacctgggagtcggagcttgcagtgagccgagatcccgccactgcactccagcctgggcgacagagcgagactccgtctcaaaaaaaaaaaaaaaaaaaaaaaaaagaaaaaagaacctctctccagttagcatcaaatgaacagaaaacagtaaaaggaaagaaagtgacatccacactgaactgaaagagccacatcctccagaagtaaccaaatttacacccacctgaaggaggacgcgtgcccctaactgctccccacacctgcagtgaggctggagccgtggagctggtgtggagcgccctccggctcccctctgctagggcttaaagagtgggtgggattccaaaaagatccaaacactctggtggactctgcttcctggagattaggagagggccagagccgaggctcttcaacccagcaaggcctgcgtcaaacagcaccgtctctgccttctcagaactgaagaatttgggcaacggtcccggccctgaccggggggcagccaccactgcacagtcccttaggtgagacgtgggtcctggcccctggagaaagcccacggtcacctgcctcatctgggagggagactgtattagggttgtctagagggacagaactaacaggatagatatatagagaaaggagagtttattcagtattgacacaggatcacaaggtcccacaataggccgtctgcaggctgaggagcaaggagagccggtctgagttccaaaaatgaagaacctggagtccagtgttcaagggcaggaagcatccagcacaggagaaagatgtaggctgggaggctacaccagtctctcttttcacatttttctgcctgcttacactctagccgcactgtcagctgatgagatggtgcccacccagattgggggtgggtctgccttttcccaggccactgactcaaatgttaatctcctttggcaacaccctcacagacacacccaggatcaatactttgtatccttcaatccaatcaagttgacactcagtattaaccatcaccgacactaaaccttcacaccaaaatgagttaccaacccgagatccccagacctgagaggagactgagccggacagacaggcaaacccagccctgattctaaaaacagagcatgcggaggcaccaactggtagtctcatgagattttagaggacgttgtatccgtaaagagaacaaagtgttaggaagaggggtacgtgaaatttaaaaatataatcatcatcccagagtgtgcagaggcgccaactggtagtctcatgagattttagaggacattgcatccataaagagaacaaagtgttaggaaaaggggtacgtgaaatttaaaaatataatcatcatccccccaaaaggcactaactagacaaatgaatgcagttgaaaactgaatttcttaactaaaaagccagttcgaggaaccttccctggaaatagagcaaaaccccaaatgattgatatcttgaggaggaggtaaaagacatggacgacagattagggaaatcgaatcagtgtccgaaagggagatttcaggagatgagaggcaatagccaatgtccaggagaacagatgcgtgagttcaggaaagacgaatctgcagatagaaagactcgtgacgggccatgcagctgaaagagaaaataaacctccgcagacatagctggtgggatttccaaataccacggcaaaagaaaaaatgctgcaggcttccaggcgggaaaacccagatggcctcttgaggccgggcctgggctacgctttcatcaaggcctccatcagctgcgccttggaggaaccagggagagctcaaaaccaccaggacctatcccagcccagatttcagattggtttgttctgggaaggaccaggcattgtttgtttctggctttctttttgacccttaagcttccagatgatgctaacttgcagccagggctgagaatcacagatcttaaatttaaatagcaggatgtcaatgcatacagaattcagaattctcttttttgtgttttttgtttgtttgtttgtttgttgagatggagtctctctctgtcgcccaggctggagtgcagtggcgtgatctcagctcactgcaacctccacctcccgggttcaagcgattctcctgcttcagcctcccaagtagctgggactacaggggcccgccaccatgcctggctaatttttgtatttttgtagataacggggtttcaccatgttggtcaggctggtcttgaacccctgacctcgtgatccgcccaccttggcctcccaatgcatacagaattctaagggagaaggatggttagcatttgacctacatgtcagttagactctggaaattaacaacaacgggaagtccacgcatgaagacttctggctgcagccaaatctgctcagacaaaacccatgacagagtttatttacatttccacaaacaagcctgaaaacagacattctattcgagaagctaaaaagagggaaataaactgaaagaagcagaaaaataaaccaataaagatcaaaagcagaagctgatgaaataaataaaaaatgaattgacttgataaataaactgctttttttttaaatgaccaataaaccttacacactgctggcttatctggcaataaaaaggagatcatgcaagtaacagtgttgggaatgaggacaacttgggggagggttttttttgttttgttttttgtttttaattgcaagaaagctatgcattgtactggtttcatcatgcaagaaattgaaaatgtcaaaaatctgttttccctaaatgcaccagtattggaagatgttatggaaggcttctagtaacctttcaaggaacaaacacttcctgtgttatcaaagctccagggcatggaagattccggaaactccccacaggctggtcctgcaatgcttagtgaaaggctggctgcaaacgctgacagcatacaagcaggaaactgtaaagcggccccacatgtgaggagtgaaaatcctgaacaaaatgttagcaaaaataagtaggatttacttccagaattcacacaggaataattcacaattaggaaatctactaattttgtgcattatatttataaattaaagaatggaggccggatgtggtggctcacgcctgtaatcccagcactttgggaggccgaggcgggcagattacctgaggtcaggagttcgagaccagcctggccaacgtggtgaaaccctgtttctactaaaagtacaaaaaattagccaggtgtggtggcaggcacctgtaatcccagctactcaggaggttgagacaggagaattgcttgagcccaggagacagaggttgcagtgagccgagactgtgccactgcactccatcctggccaacagagtgagacactgtctcaaaaaaaaaaaataaataaatcaaataaaacaaaatacaaggataaaaaaaaaaggcttcctgggtgggtgccaaatgggtatttaataaaactcatcatccatcccaaagtaggatagaaggagagttctaagtatttatcagaaactaacaagaaaatgttacccagtggaaagactagacttaaaatcaggaatgagatgaggaggcctgctagcatagcagttaccccagactgttttggaggctccagcaacgcaaagaaaacaagagaaagaaatgagatatggatctgggaatgaaatactgaaattctcaacctctactaatgaaaaataaaagccaatagaaacagtaagaaatcaataaagtagctggataccagctctgtagttttcttctacaccagtaatatagttaggaattacaatttttaaaaaagctcattcataatagctataacaacttttaaataagtccaggaagaaatccaacaaggaatgatgagcctgtctgaaaaaaaacaataaatgttatgaaaggtcataaaacagatttaaataaatggagtgcccacgttaccagctgggaagacgcatgatataaaaatgccatttccctccaaattagcaataaaaccattgcaattcccgttaccctccgtggtgagatgttttgggtgaacttaaatttattcaacataattatttacttattttggaaaagtaatgattcaaaatgcaagagctctacaactaagaggaagttttcgtctcttttccccttcccccacccagccaccagggccctccgcagaggcaacgtagattcttgtggattctttttgtttttgttttcttcgagacagcgagacgcatcttgctctgtttcccaggctggaatgcaatggcagagtagcctcgaactcccagccttaagtgatcctcacacctcagcttcccaagtagctgggactacacacacaccaccaggcctggctaattttcatatatatatatatatatatatatatatatatatatttttttttttttttggtagaaacagggtcttactgtgttgcccaggctggtctccaattcctgggctcaagtgatcctcttgcttcggcctcccaaagtcctgggattacaggcataagccactgtgttcagcccttgtggagtcttttggagattttttgcatatctaagcaaagtcacaagggtgtgtgtgtatgtgtatctctctctctctctttaacttaaatggctgcatattatacccactgctcggttcctcgcttgctgtcccttagcaacacgtgctgcggatattccacctcaaaacaaaaagcacctcgggccaggtgcggaggctcacgcctgtagtgttgacactttgggaggctgaggctggcagatcgtttgagctcaggagttcaagaccagcctgggcaatgcggcaaaaccccatctctacaaaaaatacaaaaatgagaaattggccgggcatggtggcatgtgcctggagtcccagctacttggggggctgaggtgaacccaggaggttgaagctgcggtgagctatgattgtgcgactgcactccagcctgggtgacaaagtgacaccctgtctcagaaaacaacaagaacaacaacactttattctcaacaaattgattttaaagttcatttagaagactaaatgcacaaaaatatccaagacaattttgaaaaggaaggataatgaaagaaatatttaagaataataacaagtccttagccaggcctggtggctcacgcctgtaatcccagcactttgggaggccgaggcaagcggatcacaaggtcaggagatcgagaccatcctggctaacatggtgaaaccccatctctactaaaaaaaaaaatacaattactcgggcgtggtggcgggcacctgtggtcccagctactcaggagactgaggcagaagaatggcgtgaacccgggacgcagagcttgcagtgagccgagatcaccactgcactccagcctgggcgacagagtgagactctgtctcaaaaaaaaaaaaaagaagaatagcaagtcctcaaagagaacttagaggaaattactttggaatttagctactgcaagctatattaatgcacaggttgctttttttttgagacagagtctcactttgtcacccaggctgtagtgcagtggcatgatcctcccacctcagcctcctgagtagttgggattacggacgtgcaccaacacatcctgttaatttttgtattttgagtagagacagggtttcaccatgttggctagactggtcttgaactcctggcctcaagtgatccgcccacctcggcctctcaaagtgctggggttacaggcgtgagccaccacacccagccaaaatggctttgcaagtttaagctgtatccttcgagcacacctggctccaggatgatatgcgtccagcagccttttggcctgtaattcagttttctgtttggatccagccactgaaagggagtgctctgtgcagtgagcaagcaagtactgacccacgtgtagctccctcaataaatttgcactccagctttagaaatccatctcatggccgggcgcggtggctcatgcctgtaatcccagcactttgggaggccaaggtgggtggatcaggaggttaggagatggagattatcctggctaacatggtgaaaccccgtctctactaaaaatacaaaaaattagccgggcgtggtggcgggcgcctgtagtcccagctactcgggaggctgaggcaggagaatggcgtgaaccctgggggcggagcttgcagtgagtcgagatcgcgccactgcactccagcctgggcgacagagcgagatttcgtctcaaaaaaaaaaaaagaaatccatctcatgcaagttttgttaaaggaatcagttcctcgggccttggcctcctctgagagcactgacataaatctgtcacttaacttgggacaggatggaagctgctgcctcttctagcctcgtcctctctggcctgcactgctgtgcagcggtgtcagtgcaggggcatctgtggagctcagcctgccctggatgttctcgtctcctcccaggggacttaagactccacctaaggttgccagcctttcagtggtaagacatctatgcaatcaacccgaagccttaccacctggcactacttcagtgtatccttagactaccaggaggatctctgagacttggtggggaatggaacagcttgctgcaatttgtggatgtagattccgtatatttttgtctcttccaagagactgtaaactctttgctgacaaagtctgtgtcttgatagtttaaaagcagtttcccagtcttacccaaaaatggcaggaagggtgcccagaacggctgttccctgcttcctcctgggtctctgcatgggggacgctgggacagcctccccactcactctctctctctttctcccccgccgcgccccgcagtggcggctctgcagactgagatggagaacttggccctgcatctcttctacatgcagaacatcgaccaggacatgcgtgacgacatccgcgtgatgacacaagtggtaaagaaggccgagacggagaggatccgggcagaaatcgagaagaaaaagcaggtattctgcaaactcgacacatgtttaatgatcaccagaccgtggagcttcaaaaaggggctcagctttgcctcctgcgtgaaggcttccggccggaggggtggcggccggcctgggtggcgtcaacttgtatcaagggttggtggagaacaggccctcagccacgggcacctcctgacggggctgcttctcatcctgtttcccaggacctgtatgtggaccagctcaccactcgagcccagcaactggaagaagacattgccctgtttgaggctcagtacttggcccaagctgaggacacccggattttaaggaaagcagtgagtgaggtaaaagcagtccccgcagctctcagtgttcgaccctccagtgagtgtccacgcacagggtgctggtgggtctactagactgcacctgcccgtctgctggatgagtgactgcagccagcttacatctgcaaacatcgggccctccccatggtggggccacagtagatactgacaggtggacagcccggattcctattccttccctggctagtgggtgacagaaggcctcgcagggttcaggtactctagtcgcttcatgaccgccaaggccagcttgctgcggggatgctcagcaagttccttagcctgcagggacctcttccggggaggactgaagtctttctaacaattctcacccccgtgggcagccggccttccgggtagctcctacatctctgcacctcgtggagtagggagtggagggaacgaagggggtgaaagctgctccctcttggccccagattcaggtctgtagtggtagcaccagaaaccaaagttactgcaacttaaaaaaaaaaaaaaaaaaactatgagtcaccatcttcattcacgggtgcgggaatgacacggaggaaacaattaactttttttttttttgagacagagtctcgctctgtcgcccaggctggagtgcagtggcacaatctcagctcactgcaacctccgcctcccagattcaagcaattctcctgcctcagcctccagagtggctgggactacaggcgcccacctccatgcccagctaatttttgtatttttagtaaaaacagggtttcaccatgttggccaggttggtctcaaactcctgacctcaggtgatccacccacctcggcctcccaaagtcctgggattacagtcatgagccaccgtgcccagccaatgaaaaagaaggaagaggacttgaaggaacggatgagcacgctgggctcccagggtaaagggagggcccggggctgggcgttactcagcactggtctctccagctacaaatgcaattaaagtagagcacgtcccaatcagaatctcaggaacaaacaatcccttagttaacaaaacaattctggagttttatctgaaaaataaattaggaaggctagccaagaatggttttggaagagaagattcaaacggggcaagcagccatcccagtctgctcaggactgaggggtccccaagacaagggactttccatgctaagcccagggggtcctggacacagcaggatggcagatcaccctagcatcgccgcaccaaatattaaagtatacagtaaagctctggccaggcaaggtggtgcacacctgtaatcccagcacttggggaggctgaggcaagaggatggcttgagcccagaagttcaagaccagactgggcaacatggtgagaccctgtctccacaaaaaaataataattaaaaaaaaataaaacattagcccaccatggtggtgtgcacctgtggtcccagctactcaggaggctgaggcaggaggatcacttaagcccgggaggtcaaaaaaaaaaaaagaacaacaacactttattctcaacgaattgattttaaagttcacttagaagactaaatgctcaagaatacccaagaaaattttgaaaaggaaggatcatgaaagatccttgaactatgaaagatccaatgaaatatgatcataccactgcactccagcctgggctacggagcaagaccctgtctaaaataaaacaaaaccgtaaagttctagaggctaaaataatgtgtcacaagatagacaggcaagacattgaagcctatgagagagccccaaagcaagccagagtttatataaaaacctagtagattataaattaccagagagctaatgaattatgcatccaatgatgtcgggacatttggttaatcatttgggaaaaaattaaatcttttcctcataccagacactaaaataaattccagatggaatcaagtatttaaatgggggaaaatgtgccagacgaaaacaaatgaaaatatttatataatcctgggctggggaggcctttcaaagtataacaccaaaagcaggaaccttaaaggaaaagactaggaggggccgggtaaggtggctcacgcctgtaatcccagcactttgggaggccgaggccgctggatcacctgaggtcaggagttcgagaccagcctggcccgcatggcaaaaccccatctctactgaaaatacaaaaattagctgggcgtggtggtacacgcctgtaatgccagctacttgggaggctgaggcaggagaatcgcttgaacccaggaggcagaagttgcagtgagccgagatcatgccattgcatttcagcctgggcgacagagccagaatccatctcaaaaaacaaaacaaaacaaaagactaggaggacaatcacaccctcaataaaacctttgtagattaaggacgccacaaaccagatgaaggcggggagacaggcaggagaagacaactcgcagccattagtaaatccggggttgtgaagagaggctgaaagccaaggagactcgccctgtgtgcttccacaccctggaggcaggtgggctacttggtagatgcttccttttgcacctcccgccctcccctcgatgcaacttccccagggaagggggccgcccgcacttccttcatttctcatttccagtacccagaacagtgcgggggcaacagcagggcccctgttcatcgagcgaagtcacaagtaaccaaaggacagggagtcccctacagagttggcaaagataaggagagatgagccctccctgctgtcggccatgaaaatacagattggcctttatctttatcaagatcttcatccagggcgatatgatcatatgcagccactccctccctaaccctaaccctaaccccgcaccctgttagtgcttagactccattccaaggaacctagcaaagacctatgcagataacatttttgtatgttaaaaatgataaagccaggcttggtggggtgcacctgtagtcccagctactcaggaggctgaagcaggaggagcacttgtgcccaggaagtcagggctgcagtgagctatgattgcaccactgcactccagcctgggtgacagagtgaaacccccgtctctaaagaaataaatacagtgaatagagactcatgggggagatgacgctcatcaccgtgttgtgtcatcagaaagaaagaccccaagaagaggacattagtgaaacccattttcatacacctgtgcatcagaatacactacaccaaaaagagctctactgacatggaaacctgtctcgatattaatttcttattttaattttttttaaattatactttaagttttagggtacacgtgcacgatgtgcaggtttgttacatatgtatacatgtgccatgctggtgtgctgcacccattaactcgtcatttagcattaggtatatctcctaatgctatctctcccccctccccccaccccacaacaggccccgttgtgtgacgttccccttcctgtgtccatgtgttctcattgttcaattcccacctatgagtgagaacatgcggtgtttgggtttttgtccttgcaatagtttgctgagaatgatggtagagactaagtctcactctgtcccccaggctggagtgcactggggccctcatggctcactgtagcctcaaacttctgggtccaagcaatcctcccacctcagcctctcaagtaggtaggactataagcacatgccaccacaccgtgctaatttttttattatgattattctttttgtagagacggtgtttctttttgttgcccagactggttgggaactcctggcctcaagtaatccccccgcctcagcctcccaaagtgctgggattacgggcatgagccaccgcacctggcacaatacattaatttttaatatggcggggcatggtggctcacacctgtaatcccagcactttgtgagaccgaggtcggcagatcacctgagggtcaggagttcgagaccagcctggccaacatggtgaaaccccgtctctactaaaaattcaaaaattagccaggcgtggtggcgagtgcctataatcgcagctgttcgggagactgagacaggagaattgcttgaactcaggaggcggaaattgcagtgagccaagatcgtgccattttgctccagcctgggtgacgagagtaaaagtgtctcaaaaaaaaaaattaataggagattatgaaacaatatatagaatttgatttcgcacacacacacaatcacaggtgtaagaagttagaaatggttatctctaagtgttagggttattgaattttcattttctttttgcttatttgcacattctatttgcataggctgaacacttgcctttgtgaaaaactggggtctaaatgcacaggtgactgagcccggcagccatctttccatccttatgccttgacctgcacctcagtcaaccaggctgtggccggcagcctcaggggcaccatggggaggcctcgcacaggctcagtttaaggtgcatcctggctgaatttgggtccccacctgctgcctgggccagctcccactgcccaatggcacagagcagcctccttagtgaataacttacccccatacaaaactgtgacccagcagtcccacgactgggcatttatccaaaggaaagggaatccgtgcatccaatagacacctgcacccccatggccaggctggtctcggacccctgacctcaggtgatccgtccgccttgacctcccaaagtgctggggttacaggcatgagccgccgcacctggcccagtcaacaataatttattgtacattttcagatagctagaagagagggttttgaatgttcccaactcaaagaaataacaattgctggaggtgactgatacgctaattaccttgattcaagcagtacacattgtacatgtgtcgaaatatcactctgtaccccagagatatacagctgtaacatgtcagctaaaataaaaggaaatactacagacaaaagggaagtcagtcccgggatgtacacagtgtcccttcctaggctgcccaataatcctaagtaagcgtctgtgagaggaaaaaaaagtccccctcatcgtggtatacttaattcacaccattttaggttacgtcgtaatgaatagatggttcagaaaccctcacagccaagcatggtgtctccagggcgatggcctctctcatgcccggcgctgccctcggctcccccgtgatgttctagcgcactgtggttcagtcactgtctaccaagcttgcctgggtgtcacggcgtgcaggcacttctgggacttggcgttctacaggacgccccagttggctgactcgggccgccagcttgctcaagtcacagtgcttgcattggggatgactcatcaagaatcccaaacaccactcaaaacaagaccgcgatccaggccgtgctgggcatgcaggcatcaactcacttgacccggcagccccggggtcgctcctgtacccatggaggtgccgctcctgtacccatgtcacagctggggacactgaggcacagcgggtgagattcagcccaggcagccgtaccagccttaacctctgtgccccaagcataaaggaactcccctttcccttggagtaaattcctgaaccacccccctagttttcaagcccctcccctgcatgggccaagcccttactgcaggtggcccctcactgccccccacgatgcccctagacttccagcctccgctcagcctgcctgacctgcccacccctggctgtccagttgtgcctcctcattcccagtctaggcagccctgcttcccccagctggacgagagcatccagccctggccattcttgagacaaacacctccttccatcatggcctccctacaggaagcggtgctgggcccgtcctgtgggacctcagtccgaatcaatgacaccaccaaccctgcagaggtgtttcacggatgctggccaggatcccctcctcctctccctcctcctctccctcttcctctccgtcttccccctccccctcctccctctccccctcctccctctttcatctcctccccctccctctccccctcctccctctttcatctcctccccctccctctcccccttctccctccttcatcttccccctcctccctctcctcccctctccctccttcatcttccccctcctccctcccccttcctccctctcctcccttccctcctcctcctcattcccaagcactgagcaccgcaggccctgagcaaaggctcaaagcgggtacgggttatcttgaaagctacattcaggctcgtgtttacccctctgcagatgcatgatcaaggaaagtaccggtgatagaaggaaaagaggaagatttgggaatgtgaggctctggtgttcttgggctttgctcgcaaatgaaatgagacagccattcctgccccctcccctgttggctgcaggcctgcaccgagatcgacgccatcagcgtggagaagaggcgcatcatgcagcaatgggccagcagcctggtgggcatgaagcaccgcgacgaggcgcacagggcggtgctggaggcgctcaggtactgcagggccacaggcagcgaggatgtgcgggaaccccaggggtccgtggcaggcccgccccacaccccctctctctgggtccaccggatctctgggacagagggtgcaccttgatccccgggtccgggcttccgtccggaaagctccctcattgtttggtaagatttcagcgattcttaaatcctttccaacactgcggcgctgggaggggagaggcttttctgctcagatttcctggcaggattaagtagaaacagagcagggtaaagagaaagctatctttgggaggtaaaggtgtccctttgatttgcagtatcaccacctgagtgcggaaaccccatcccttctcgattgttctgcctgagggctgcattccaaccgaaatcctattttaatctccaaaggaaggggaggaagaggcctcctctgggcatcccctcacttctggggatggatgcgtggctcagggcagggcgttggagacacaggtgctgccttcattcctaaaaccacccagggtgaccaggtctcgggacgcggaaagaaaaagccgggcactgtggtggcacgtgtctcacccgctgagctttaacttcccctccacctttcgtagtctccaccccttgtgcccagcacagagcctggcatacagcaagcgctcaagaaaggctggaccaaggaatgagggtctggctggccccacagcacccgcagccaggcagccagcagcagtcacacaaccaggagatgcttttccttttgggtgctgtgattaaagaaacaaaatgaaaccattttgtttttaaaagtttttagaccaaaacattttcaaatgaataatattggattaaccatactcatttctggccaggcgcagtggctcgcacctgtaatcccaacattttgggaggctgagacgggtgggtcacgaggccaggagttcaagaccagcctggccaagatggtgaaaccccgtctctactaaaaatacaaaaattagccaggcatggtgtgggcgcctgtaatccccgctactcgggagggtgagacagagaactgcttgaattgcggaggttgtagtgagccgagatcacgccactgcactctagcctgggagacagagcaagactctgtctcaaaaaaaataaaaataataataatactcatttccttcactcccttgagtcaacaacataaagccaaagggaacactgtggtttgatacaggcgatgtttggctgaagcttcgtttcccctgtaaagatgcaggtcgaggaaccagagccagctgtggccgggcaagggctcctctccctgtgtcaccagggttgcctgaacaccaggacgagaggacttggccatctgcccacttgggtgtctttttcctcctgccccaatgctaggacttgatacctgactgtttaattacacggctcagctgccacgggccttaagaaaagtcaaggccaggttctctctgagggtccagcacctggcctggctctccgaggctcatggcctgtgaaccctgcagcgtccccaagggaagacgtcacctccgagatggtcctgttgtccagctctcccctgcatcccagactaaccagtgtcctctctgcaaaccgtcctcattgccctcagagacatggcttccttttggttgcaaacattgtaaaaatcgtattcgatcaggtctcctcctcctcggcccgcagtcactagaaccccctcccaagacaagcaaaggcacctggttttctgggatcccctgcctaacttgtgtgcaattgcaagaaagcatatgcgttcacccggagtcttccttccctctcttgctccgtgggagcacaccacactcactgttctgcacctctttgctttttccatttaacagcgtgtccctagagcgcttcccaagtcaaaatataaacaccgctcgttcccgcctttctaccacatggcattccgctgggatacttctacggggaagcttcctgcccggggcatcgagggcgttcgcgtccgtctgttatggcggtgctgctgtagataaccggatccgcgaatgctaacgctcaccaggatgctatatagccttttttatattgcctatcaagcccggaatgtctgggtctagcgggtattgctaagtaggattgtgacagtcacgcccccggcagcggtgtttcaaagtcccctgacagctcagcatgttgtcacacttcaggactgtgccaatccgattgatgaagaaaatagataatcttgttttataaaacgtgcatgcgcag

SEQ ID NO: 15503 - DNA, 30113 bp, Homo sapiens
gggaaatggcggaaccgggcggcgcggcgggccggtaagccgggccgaggggcagcgggtcttggagtcgccaggccgcgctctccgttcaccgctccaggtggcccccgcgtcggctcctgcctcgccccttcgcctccactcccccttcctctcgcctgtgtcccttctctcgccattttgctggcctttcccgtccactgcgttcagcccctcacccccccgccaacccttctcacttctcccctcctgtccctttgtcctctctcggcctccctctttcccctactccaagcgcgcgactccctctaaaacccgggaccgctcactctgcagtcaccatggcaaccactctgcgtggcggtccctgcgcgcagtcctcctaagagtagagggctctgcagggcgcggggctgttggataccgcccctgaccttgctccggggccactcgctgtggccggagaccagcccggccccgcgcctccctcctgcaaggacagatcccctctcgcaggcttgggggtgacccgcgatgggaggggtccctgcggttaggcggcccgcgatagtccgcggtcaccgtcctggggcctgggtggaagcactgagcgcgcacagggagggcggctgagtgaagatccctgccaccgggcctctgctcgcttaggctctgtttaaaaggatagaaacgattggaaagagtttggcctttttaccttagacacatcggtattgtttcatttttttaaaggtgggtctgtatgtattgacatggaaagactaaaggtattattaataaaacgataggcataaatgtaaaagggtaggtatactatgatctctaattcagggtgtgtgtgtgtgtttaaaacatagaaaaatgttgaaagaatgtggtcctaaatgttatcaatgattatcttgggaaggaaagggaagatcacagggaactgtcactgtctgtctctttgaacatatctatattcctttgacagataaaaatagcttgaatctttaattttttaaaaaagatatacatatatatatatatatatatatattcctgtgctacgtaaatcgtggagaaactcagagtccccagaacacttactctgatcgcgctactttctctacgttgtatttcttttccccagttttgtcccagacacaagttatatttgaggtgacttttctggggtgatctaatcctgctgttccttcgatgttttaataattatatttttcattcattcatggagctttgcttttgtggcatctccgccacctgacaggcatgatatagtgctatggttcctgacaaacaggacaaagacgtgacaacagcctgggggtggcagagaagtaacaagtaaataaacagatgtgcagaattcaggaggggataaggaccaagaaaaagaaagctgttgcttgaaactgttcaattgtttctctaaaaccaggtcccatccggaagatggatcggcttctgagggagagaaggaagggaataatgaaagccacatggtaaaattccctatgggcagttattccgggcttatatttactaggaattaaagagaatcagagtacgggcactgtggctcacgcctgtaatcccaacactttgggaggccaaggcaggtggatcacatgaggttaggagtttgagacaagcctggccaacatggtaaaaccccatctctactaaaaatataaaaattagccgggcgtggtggtgcgcacatgtagtcccagctactcgggaggctgaggcaggacagtggcttgaactcgggagacagaggttgcagtgagccaagatcacaccattgcactccagcctgggtgaccagtgaaactctatctcaaaaataaataaataggccgggcacggtgactcacgcctgtaattccagcactttgggaggccgaggcaggcagatcacgaggtcaaaagatcgagactatcctggccaacatggtgaaaccctgtctctactaaaaatacaaaaatttgccaggcatggtggttcacgcctgtagtcccagctactcgggaggctgaggcaggagaatggcttgaacctgggagatggaggttgcagtgagccgagattgtgccactgcactcagcctggcgacagagcgagactccatctcaaaaaatagataaataaaattaaattaaaaataaataaataaagagaattaggacttggtcaagtatattgtatgatgacattatcttgcaccagaacaaactcaattcagttgaagagagactcattttcttcctaccccattctacagtgtcagtgattagtcagggatgcaaaggatgtccaactttgggttgccctgagtttttcggaactcatttcctgtaacaaaggatgcaaaaatgattatgaaaagcagagagggccaggcatggtggctcacgcctgtggtcccggcactttgggaggctgaggcggatggatctcttgaggccaggaattcaagaccagcctggccaacatggtgaaaccccatccctactaaaaatggaaaaattaactgggcatggtggtacacacctgtagtcccagctacttgggaggctgaagcaggagaatcgcttgaacccaggaggtggaagttgcagtgagccgagatcacgccaccgcactccagcctgggcagcagagtgagcccctgtcacaaaaaaaaataaaaaaagaaagaacagataaactgaagcatgaaacatgattttttttttttttgagacagagtctcactctgtctccaggctgaagttcagtggcacgatctcagctcactgcaacctctgccttccgagtttaagcaattctcctgccccagccttctaagtagctgggattacaggtgtgcaccaccatacccagctaatttttgtatttttagtagagacggggtttcaccatgttggtcaggatggtctcaatctcctgacctcgtgatctgcctgcctcagcctcccaaagtgaaacatgatctcttagtgatgctgagaagggtataaatgcagttttcccattgatataattacactataaagaataaaacctcacaaggtcctttatactttgtttcctgatttttttcctgccacacctttacaggtgtcaccaccagagaaggatgatggccagaaaggtgaagaagctgtcggtagcacagagcatcctgaggaagtcacaacccaagcggaagctgcaattgaagagggggaggtggagacagaaggggaagcagcagtggaaggggaagaggaggctgtgtcctatggagatgctgaaagcgaagaggaatattactatacagaaacttcatccccggaagggcaaatcagtgctgcagatacgacttacccgtatttcagtcctcctcaggaactgcctggagaggaggcatacgatagtgttagcggggaggctggtctccaaggcttccagcaagaggccaccggtccaccagaatccagagaaaggagggtcacctccccagagccatcccacggagtcttaggcccgtcggagcaaatgggccaggtcacctctgggccagcagtgggcagattggtgagtagccctgacttctgttttgtgccagtgtcgcacggcccacggggtttgtcaccctatgtgaggaacttgggaatacattataaatacaaattgcaatccctgttagaaatgtcttagcaaggctgggtgcggtggctcacgcctgtaatcccagcactttgggaggcgaaggtgggtgggtcacctgaggtcaggagttcgagaccagcctggccaacgtggtgaaatcctgtctctactaaatatgcaaaaattaggcaggcgtggtggcgcacgcctgtaatcccagctactcaggaggctgaggtgggagaattgcttgaacccgagaggcggaggctgcagtgagccaagatcccaccattgcactatagcctgggcaacagagtgagaccttgtctcaaaaaaaaaaaaaaaaagaaaagaaatttcttagcaagcttaggtctcaggattcacggtcaaatgctgagagatcctggactctgcttcagtctgcccaagcccaaggctgggggcctccatagccgccatccacgtaagggcatccaagttcccaggcttccagagcagcattgtccaatacggtccatcagtcacatgtggctacagagagctctccaaatgtgactagcgagctggaggaatggagcttttaactgtttaagattctaatttccatttaaatagccacctgttgccagtggctgccataatgaatagtgcagttctagataaaaacaatgacaatagctgcgttcttatattttttcatcaattttctttaaacaatcacaaagttacagaaaaaaatggagtacaataaaaaggatcttttattttcttaaacactggagagtgggttgcggatctggtcaccaaagccttcgaacgcttctgtatgtttcccacaaacagctgggacacaaccatcaaaatctagaaattgggtcgggcatggtggtgcacgcctgtaatcccagcacttcgggaggccaaggcgggtggatcacttgaggccaggagttcgataccagcctggccaacatggtgaaaccccatctctactaaaaatacaaaaattagctggacgtggtggtgcacacctgtaatcccagctactcgggaggctgaggcaggagaatcacttgaactggagaggcaggggttgccgtcagccgagatcgcacccctgtactcctgcatgggcgacagagcgagactctgtctcaaaaaaaaaaaaaaattctggaaattgccttgctccatttccaaggaatgctcaggcctcattcagggttcaccaaatgtcccaatgatgtcttttgtagcaaagagattcagttcagaatcaaatgttgccttgagtgctcatatttctgtagtctcctcagtctttccttgacaaccttgacccttgtgaaggtcataggccagctgtcttgtagagcgcccctcagcctggatttgccccgtgtttcctcatgatggggttagggtcatgaggctttagtgggactatcacggaagcgacgtggggctctcagtgcgtcccaccagggatgcaggattccagcttccaccattcctgatgatgttcacttctgtcaccaaatttaaaagcaccaagattcttcattgtgaagcgaccttttactcctttatacttaatgaagattttgtgggaaggtgcttttttcttttttggtttaagataggaaggcgaatactatttagaatgggaaaaaaattgcaacagattccaaccagttattgaggacttcttatatttgcttacaaacgtatacaggtgttatacaacttttggcagatttatccctaagtatttctcttttttttgagatgtagtctcgctctgtcacccaggctggagtgcagtggcatgatcttggttcacagcaacctctgcctcccgggttcaagcaattctcctgcctcagcctcccaagtagctgggactacaggcacacaccaccacacctggctaaaattcggtatttttagtagagatggggtttcaccatgttggccaggctggtctcgaactcctgcccacaaatgatctgcctgccgcagcttcccaaagtgttgggattacaggtgtgagccatcgctcctgcccagtatttcacatttttgatgccattataaatggtttccaattgtctgtggctagcatatagaaatacaattggtttttgtatactcacctgatattctgccacgttgctaaagtccctcactagttagactagcttgtttgtagaatcggtaggctttttcacaaagataatcatctcatctgagaaaaaagacagttaacttcttcctttcccatccagatgccttttctttctttttcttgcctgattgcattggctagaaccgccagcaccatgttgaatagaagcggtgagagcagacctcttgtcttgccctgatcttacaggaaaagcatcagtctttgactgtaaagtgccatgtttgctgtgggtgttgcagatgccctttatcaggttaaggaagttcccttgtattctcggtttgttgtatgttgttgggttgtttttttttttttaatcataaaagggtattgggttttgtcaaatccttttctgtgtctgttaagaagactgtattttcctttttagttagttgatttggtagattacattgattgattttcagatgttcaagcaaccccgcattctgagataaacacagggagccactttggagtgatgtgaatgtcggttcctctttaaactcttggtttatttatattcttacatctgcatagactcagggctctccatgtgattcactgggttataacccattactgtcattatgtattttgatgctcagtttggccagtgagggcccatttaaaccagcctttgtgtgatcggacgcacctccatccttctttgagggctttcttgctttctgccatagactgcccagccttagaatcagacatttctccaggagccctgtttctgttagtggaaaatagaatttagaagttatcacttgggtgctggggtcctcattgatgctggggtgtcactgtccccaggacctctcagcggcaggagatagggcctgtgtgcgtgtactgtacgtacttcccccacatttatacatacaccatgtacacagacattcgctcacatctatatttattggaacacacccctgcggccggccttggctcacacccctgcggccggccttggctcacaacagaacctctaattccatctcacctccataaggagtccctcctggttttctcctcttccttttttttttttttttttttgaaacagagtcttgcccaggtagctgggactgcaagcactcaccatcacgcccggctaatttttgtattttttgtacaagggggcgtcttaccatgatacccaggctggtctcgaactcctgggctcagtcaatcctccctcctcaacctcccaaagtgctgggattacaggcatgagccaccacgcccggcctcctcttccatatttgtagctcctttctccaacagggagaagcctggccccatgatccttactgtattcactgatgtggtcaatcctcctggatgtaacctgtctcccacttttactgccttggctgccccctactcccagcataccttaggtttcaattgttctgcgaggggagatgggagtatggaagggaggcagggaaagaggatgctttatacttcttagcactgactatgggatagacactgttctgtgttgtcttagaatcctgacaaccctacgaggtaggaactatgattgtgcccattgtacagatgaggaaactgagaggtgcaaggtcattgcatagtcacccagctgttgcggcaaacggtagctcttgcttcaaagccaccgttctgaaccacaaggcacccatccctcctactcccctaccctgggaaacccgaaagagtttctaaaagtcactttggagaacagcatgattcagtatttggtgagccctaattaagttttatgatcacaagtgacaaatataaaaccaaaaccaaaatcttattttaagaatttatcaacaacaacaggccaggcctagtggctcatggctgtgatcccagcactttgggaggccgatgcaggcggatcacttgaggccaggagttcgagaccagcttaaccaacatggcgagaccccatctctactaaaaatacaaaaattagccgggtgtgttggtgcacacctgtagtcccagctacttaggaggctgaggcacaagaatcgcttgagcttgggagtcagagattgcatgagccaagatcatgccactgcactccagcctgggagacagagcgagaccccatctcaaaaacaaaacaaaacaaacaaacaaaaaaaaaaatatatatatatatatatatatctcaacaacagcaaaaccagtgtcttcacctttgtttaagtgaagtctaggtcacttgttgctctgtaaacccgattttcatccttgggcctagtttctagaaaatacactgggaagtagttttcaaatatgattgaagaaagggcagggacagcccctgagcgagccttgcttcccacctcccactggctctcagtctttgggacagtgtgagtggagcttgtgtccagttgtgcacacggacacccggaaacctctcattaggagaagccactgctgcgcaccctggagatgggttttgaccctgggctcccgttaatgttgttgtggctccagatgcctcagaaataacttccagagtcaacaccatctgcggaagtgccgtgagacggtgcatgggctggagacagagacagccggcgccgaacatacctggggctgcccgtgcaaactggggcaagcccttcagcctccatgtggctgctttactatggagaacagaaatgactagaacctgacttgtggggttatggcgagggtggcatgagatgagctttgtaacaatgtgttgtttatgggcagcaaaaccctgactcattgtctgggttactaatatccaagagttcatcatcagcgataattattgtcaatagtcgtaactgcaaaagtctcttttaaagctaaaatggatgccgggcacagtggctgtaatcccaacactttgcgaggccgaggcgggtggatcacttgaggtcaggagttcgagaccggcctgggtaacatggcaaaaccccgtctctactaaaagtgcaaaaattagccaggtgtggtggcaggtgcctgtaatcccagctactcaggaggctgaggcaagagaatcacttgaacccaggaggcggagtttgcagtgagccgagatggtgccactgcactccagcctgggcgacagagcgagagtccatctcaaaaacaacaacaactacaaaaaacgctgaaaaacagagctggggaaaggcattaaggggagggcttctcataacaaaaactatcacaaaagactctgcaaaccccacaatgttgcacaaagatcatcataacctttcaaaaaaaaaaaaaacacttctgctaggacagctgccagcaactgcctgtcgaaacttggactgatgccaccctgttattgatccttacagccaaggagaattatcgcaaaacaattatgtaatcctcctcatttttcctgtgtcaactttcatcttcctttacctccccaaatacaaacataatttactatgacacccgtattcccattgcaatgccctatccccaaataaatgtcattttcctttacagaacctctctctgtttgttatttaggatgatacattgctcaaaatttaacatgattgttaaagtaataggaaatcacttggatataaaaatcatcatttgacttttgcaaatgtccaaaatggaaaacatctaactctcccccgcccagggaattcagaagtggttcccccagctcacacctgtaatcccagcactttgggaggccaaagcggaaaggctgaatgaggccaggaatttgagaccagcctaggaatcatagcaagaccctacctctaagtaaaatattaaaaaattagaccagtgtggtggtgtgcacctgtaatcccagctactctggaggctaaggagggaggatcaccggagcccagaagttgggggttgcagtgagctatgattgcagcactgcacgccagtctaggtggcagagtgagacccttactcaataataataataataataataataaaagagtggtttctgcgtgtctgcatctgtagctaagtgtaaacacccaggcacgagaatgcatgggtcctgggatcttttgctcccacatgctgagcgcctcgaggatgggaaaccacaactctgagcaccctcttcatgaaagcatgcggaaaagcctcggctcctggccagggtctcccaagaggactgtttcctcttctctcctttcaaaccagccccctttagggaaatttcaataagaaaatgtcttcccttcataaaaacacctggctcgattttaactttatttatttatttatttttgagaaggggtcttgctctgttgcccaggctggagtgcagtgctgtgatctctgctcactgcaacctctgcctcccgggttcaagcaattctccctcctcagcctcccaagtagctgggattacaggtgcccgccaccgcacccagctaatttttgtatttctggtagagacggggtttcgccatgttggccaggctggtctcgaactcctggcctcaagcgatccacccgccttggcctcccaaagtgctgggagttacaggcatgagccacgtgcccggccaggttttttaaaaaacacacaggtgactatattttgagtctgacaactttcacaaatgtaatgagttaaaattgaataacttctcagtggcaattaagccctgttgacttagttttggttgttcttgccatagacaggatccacagaggagccccaggggcaggtgctcccaatgggcgtccagcaccgcttccggctgagccacgggagcgacatcgagtcctcagacctggaggagttcgtctcgcaggagccaggtgccacccacctgctgaggtcaccctgccctggcgatgagccacctgcacaggcccttctgtgcaagggatgccactcgtttgtcatccgttacctgtttcctgagtggctgtgagctgaaagagaaaaatcttattaacagatatggataacatttattgggcatttactgttttatctcatttaatcctaacagtgaccgatgaagtaggaatccttctccatttaacagacaggttccctaaggccattaaggaactggtccgattaagtgacagaacgcggccttcaccaagattcagtgacgcccagccccatcccctgacagccatttctcacgggctcctggtctcagagcgagacgtgccgtgacagcaaccccaggcctgaatctgtctgctggctttcaaaggctttccagaacccctgtcttcttacgtagtcccagtatcccagtgttgtggacgtgggagggcagatcaggcagttgcaaattccctgtggtaccgacctgcagccggtccaaacctttcattacttgcaaatgacatgaaaacagcacgtgtctaaattagtaaaaaaacaagccgggcgcggtggctcacgcctggaatcccagccaaggccggtggatcacctgaggtcaggtgttcgagaccagtctggccaacatggtgaaacccctgtctctactaaaaatacaaaaattaccgggcgtggtggcgggtgcctgtaatccccagctgctcgggaggctgaggcaggagaatcgcttgaaccccggaggtggaggttgcagtgagccgagatcacgccactgcactccagcctgggcaacagagcaagactctgtctggggataaaaaatattgtatccaatccactagttaagtggccacctttctgttcactctttatgtgtaaagaaagcctctcaaaaataatttccttcctgcctacctttaaaacgggacgctttctctgggatgcattgagtcagggaatagaagatggggtgaatgatgtttctgacccacagaccgttgggatgcttttgctgtcactttcccatcatgctgcatgaggcatgacagcagctgtgccattgatgccccagaatagaatcactgaggcttctctccagcagctcctcaatggtgtcgctgtctctccccccagtgatccccccaggggtgcccgatgcccaccccagggaaggagacctgccagtgttccaggaccagatccagcagcccagcaccgaggagggggccatggcagagagagtggagtccgaggggagtgacgaggaagcagaagacgaagggtcccagctggtggttttggacccagaccacgtaaggaagccttcccaggttttgcttttgcctacatggatggcgaatgactcaggcccctttctctgcctgcactgtctcccactcctgaccctaaatgctgtacttgtatctcgcctgttcactgcaccgtttattggcactgattgacctgcctcttcgtagggtactctcctctgaggttggtataggtgaggcctgtgtttctcaaccccggaaccactgccccgtggggccgggtcattctgtgctgtgccttgcatggtgtggaacagcatccccgagctccccctgctacatgccaggagcaccacccccccgccttggttgtgatcatcaaaaatgtctccaggctggacgtggtagctcatgcctgtaatcccagcactttgggaggccaaggtctgtggatcacctgaggtcaggagttcgagaccagcctggccaacatggtgaaaccccatctctactaaaaatacaaaaaaaaaaaaaaattagctgggcatggtggtgagcacctgtaatccctgttactcaggaggctgaggcaggagaatcgcttaaacccaagaggcggaggttgcatgcagacagccaagatggcaccagtgcactccagcctgggcaataagagcgaaactctgtctcaaaaaaaaaaaaaaaaaaatgtctccagtcattgccaaatgttggcggtgtggggcccatcttcgcagccactgccttgagggcaccaattggatcgcagctccctgccccacccactggcaaggggaaaaggcagatgttgatttcatttacccatcaggacagctgcagagctccaggaactgccggaaggagctgggggctgcacagggaggttctctccccagaccactgctccaccccaccctctggccccagctcaccatcattttgccaaaatatgcactcagttctctgcaagtgcctcagatgagaccatgaggtgcctttaatttgtggcttccagagtaagaatcccaagcagaagcagggagcactccacacggaagtcgtctctggcccaccggagggagacctgtggccacctgggctgagccctgggtcgggcaggagggtaaccagaaaggtaaccacctgtggttttccattgttctagcccctgatggtaagattccaggctgccctgaagaactacctgaaccgacagatcgaaaagttgaagctggacctccaagagctggtgtgtatccgtccagtctcccaccctggtcggatgcctgcgtcctggtgaccctgtttctctctttggtccaggttgtggctaccaagcagagccgagcccagcggcaggagctgggggtgaatctctatgaggtgcagcagcacctggtacacctgcagaagctgctggagaagagtcacgaccgccacgcaatggcctcgagcgagcgcaggcagaaggaggaggagctgcaggccgcccgcgctctctacaccaagacctgcgcagccgccaacgaggagcgcaaaaagtgtaaggcaacccggcagccccacacgccatccggtcctggagggtttcccaggggtgtctccatgtaccatggccaggcatctagaaaagtaagatgtgtgtgcatcctggaggggttcccaccctttttaggaggggaaggcacataaatcaaatgtctttttgttgttgtttttttgagatggagtctcactctgtcacccaggctggagtgcaatggcgcgatcttggctcactgcaacctcccccttccgggatcaagccagtctcctggctgagcctcccaagtagctggtattacaggcacctgccaccatgcctggctattttttgtatttttagtagagacggggtttcaccatgttggccaggctggtctcgaactcctgacctcaggtgattcgcctgcctcggcctcccaaaatgctgggattacaggcatgagacactgcacccggttataaatatgttaaatggcacctgtcaggacaaagcagcaaatgctgaagctgctaacagccagagcgtagagattcaaaactgggagagatgggtgagctgcagaggtcccaggatagatgagaccaggaggcgagagcagaccgggggtgatggagggtttcaatagatgcgaatgcgagggtgaggccggcacgacggtcagaccatggcccagggcctgaccgccgtaggatgtgtgcggcaggtcagtgggtagctttgaatcagatgagacagtgggggctacagcacgtgctatgcaacattaccgataaagcaacgtccttgcacagagctggtcatgtaggtgaccggggacagtggcttcctcttgtgactacggagtatttcagtctttatgctttttgatgttttcaactttctcaatcaactgtgtattactcttataatggggaaatgacctacacaaacctggaggaaaacagaagcacatggctatcccagctgttctggaaagaaacattttaaaccctgagaaaagtggaagaggttctggaaatttcagagttagggtaagtgggcacttatcaagcacctctcttggctgggcgcagtggctcacgcctgtaatcctagcactttgggaggccgaggcgggcggatcacgaggtcaggagatcgagaccatcccggctaaaacggtgaaaccccgtctctactaaaaatacaaaaaattagccgggcgtagtggcgggcgcctgtagtcccagctacttgggaggctgaggcaggagaatggcgtgaacctgggagtcggagcttgcagtgagccgagatcccgccactgcactccagcctgggcgacagagcgagactccgtctcaaaaaaaaaaaaaaaaaaaaaaaaaagaaaaaagaacctctctccagttagcatcaaatgaacagaaaacagtaaaaggaaagaaagtgacatccacactgaactgaaagagccacatcctccagaagtaaccaaatttacacccacctgaaggaggacgcgtgcccctaactgctccccacacctgcagtgaggctggagccgtggagctggtgtggagcgccctccggctcccctctgctagggcttaaagagtgggtgggattccaaaaagatccaaacactctggtggactctgcttcctggagattaggagagggccagagccgaggctcttcaacccagcaaggcctgcgtcaaacagcaccgtctctgccttctcagaactgaagaatttgggcaacggtcccggccctgaccggggggcagccaccactgcacagtcccttaggtgagacgtgggtcctggcccctggagaaagcccacggtcacctgcctcatctgggagggagactgtattagggttgtctagagggacagaactaacaggatagatatatagagaaaggagagtttattcagtattgacacaggatcacaaggtcccacaataggccgtctgcaggctgaggagcaaggagagccggtctgagttccaaaaatgaagaacctggagtccagtgttcaagggcaggaagcatccagcacaggagaaagatgtaggctgggaggctacaccagtctctcttttcacatttttctgcctgcttacactctagccgcactgtcagctgatgagatggtgcccacccagattgggggtgggtctgccttttcccaggccactgactcaaatgttaatctcctttggcaacaccctcacagacacacccaggatcaatactttgtatccttcaatccaatcaagttgacactcagtattaaccatcaccgacactaaaccttcacaccaaaatgagttaccaacccgagatccccagacctgagaggagactgagccggacagacaggcaaacccagccctgattctaaaaacagagcatgcggaggcaccaactggtagtctcatgagattttagaggacgttgtatccgtaaagagaacaaagtgttaggaagaggggtacgtgaaatttaaaaatataatcatcatcccagagtgtgcagaggcgccaactggtagtctcatgagattttagaggacattgcatccataaagagaacaaagtgttaggaaaaggggtacgtgaaatttaaaaatataatcatcatccccccaaaaggcactaactagacaaatgaatgcagttgaaaactgaatttcttaactaaaaagccagttcgaggaaccttccctggaaatagagcaaaaccccaaatgattgatatcttgaggaggaggtaaaagacatggacgacagattagggaaatcgaatcagtgtccgaaagggagatttcaggagatgagaggcaatagccaatgtccaggagaacagatgcgtgagttcaggaaagacgaatctgcagatagaaagactcgtgacgggccatgcagctgaaagagaaaataaacctccgcagacatagctggtgggatttccaaataccacggcaaaagaaaaaatgctgcaggcttccaggcgggaaaacccagatggcctcttgaggccgggcctgggctacgctttcatcaaggcctccatcagctgcgccttggaggaaccagggagagctcaaaaccaccaggacctatcccagcccagatttcagattggtttgttctgggaaggaccaggcattgtttgtttctggctttctttttgacccttaagcttccagatgatgctaacttgcagccagggctgagaatcacagatcttaaatttaaatagcaggatgtcaatgcatacagaattcagaattctcttttttgtgttttttgtttgtttgtttgtttgttgagatggagtctctctctgtcgcccaggctggagtgcagtggcgtgatctcagctcactgcaacctccacctcccgggttcaagcgattctcctgcttcagcctcccaagtagctgggactacaggggcccgccaccatgcctggctaatttttgtatttttgtagataacggggtttcaccatgttggtcaggctggtcttgaacccctgacctcgtgatccgcccaccttggcctcccaatgcatacagaattctaagggagaaggatggttagcatttgacctacatgtcagttagactctggaaattaacaacaacgggaagtccacgcatgaagacttctggctgcagccaaatctgctcagacaaaacccatgacagagtttatttacatttccacaaacaagcctgaaaacagacattctattcgagaagctaaaaagagggaaataaactgaaagaagcagaaaaataaaccaataaagatcaaaagcagaagctgatgaaataaataaaaaatgaattgacttgataaataaactgctttttttttaaatgaccaataaaccttacacactgctggcttatctggcaataaaaaggagatcatgcaagtaacagtgttgggaatgaggacaacttgggggagggttttttttgttttgttttttgtttttaattgcaagaaagctatgcattgtactggtttcatcatgcaagaaattgaaaatgtcaaaaatctgttttccctaaatgcaccagtattggaagatgttatggaaggcttctagtaacctttcaaggaacaaacacttcctgtgttatcaaagctccagggcatggaagattccggaaactccccacaggctggtcctgcaatgcttagtgaaaggctggctgcaaacgctgacagcatacaagcaggaaactgtaaagcggccccacatgtgaggagtgaaaatcctgaacaaaatgttagcaaaaataagtaggatttacttccagaattcacacaggaataattcacaattaggaaatctactaattttgtgcattatatttataaattaaagaatggaggccggatgtggtggctcacgcctgtaatcccagcactttgggaggccgaggcgggcagattacctgaggtcaggagttcgagaccagcctggccaacgtggtgaaaccctgtttctactaaaagtacaaaaaattagccaggtgtggtggcaggcacctgtaatcccagctactcaggaggttgagacaggagaattgcttgagcccaggagacagaggttgcagtgagccgagactgtgccactgcactccatcctggccaacagagtgagacactgtctcaaaaaaaaaaaataaataaatcaaataaaacaaaatacaaggataaaaaaaaaaggcttcctgggtgggtgccaaatgggtatttaataaaactcatcatccatcccaaagtaggatagaaggagagttctaagtatttatcagaaactaacaagaaaatgttacccagtggaaagactagacttaaaatcaggaatgagatgaggaggcctgctagcatagcagttaccccagactgttttggaggctccagcaacgcaaagaaaacaagagaaagaaatgagatatggatctgggaatgaaatactgaaattctcaacctctactaatgaaaaataaaagccaatagaaacagtaagaaatcaataaagtagctggataccagctctgtagttttcttctacaccagtaatatagttaggaattacaatttttaaaaaagctcattcataatagctataacaacttttaaataagtccaggaagaaatccaacaaggaatgatgagcctgtctgaaaaaaaacaataaatgttatgaaaggtcataaaacagatttaaataaatggagtgcccacgttaccagctgggaagacgcatgatataaaaatgccatttccctccaaattagcaataaaaccattgcaattcccgttaccctccgtggtgagatgttttgggtgaacttaaatttattcaacataattatttacttattttggaaaagtaatgattcaaaatgcaagagctctacaactaagaggaagttttcgtctcttttccccttcccccacccagccaccagggccctccgcagaggcaacgtagattcttgtggattctttttgtttttgttttcttcgagacagcgagacgcatcttgctctgtttcccaggctggaatgcaatggcagagtagcctcgaactcccagccttaagtgatcctcacacctcagcttcccaagtagctgggactacacacacaccaccaggcctggctaattttcatatatatatatatatatatatatatatatatatatttttttttttttttggtagaaacagggtcttactgtgttgcccaggctggtctccaattcctgggctcaagtgatcctcttgcttcggcctcccaaagtcctgggattacaggcataagccactgtgttcagcccttgtggagtcttttggagattttttgcatatctaagcaaagtcacaagggtgtgtgtgtatgtgtatctctctctctctctttaacttaaatggctgcatattatacccactgctcggttcctcgcttgctgtcccttagcaacacgtgctgcggatattccacctcaaaacaaaaagcacctcgggccaggtgcggaggctcacgcctgtagtgttgacactttgggaggctgaggctggcagatcgtttgagctcaggagttcaagaccagcctgggcaatgcggcaaaaccccatctctacaaaaaatacaaaaatgagaaattggccgggcatggtggcatgtgcctggagtcccagctacttggggggctgaggtgaacccaggaggttgaagctgcggtgagctatgattgtgcgactgcactccagcctgggtgacaaagtgacaccctgtctcagaaaacaacaagaacaacaacactttattctcaacaaattgattttaaagttcatttagaagactaaatgcacaaaaatatccaagacaattttgaaaaggaaggataatgaaagaaatatttaagaataataacaagtccttagccaggcctggtggctcacgcctgtaatcccagcactttgggaggccgaggcaagcggatcacaaggtcaggagatcgagaccatcctggctaacatggtgaaaccccatctctactaaaaaaaaaaatacaattactcgggcgtggtggcgggcacctgtggtcccagctactcaggagactgaggcagaagaatggcgtgaacccgggacgcagagcttgcagtgagccgagatcaccactgcactccagcctgggcgacagagtgagactctgtctcaaaaaaaaaaaaaagaagaatagcaagtcctcaaagagaacttagaggaaattactttggaatttagctactgcaagctatattaatgcacaggttgctttttttttgagacagagtctcactttgtcacccaggctgtagtgcagtggcatgatcctcccacctcagcctcctgagtagttgggattacggacgtgcaccaacacatcctgttaatttttgtattttgagtagagacagggtttcaccatgttggctagactggtcttgaactcctggcctcaagtgatccgcccacctcggcctctcaaagtgctggggttacaggcgtgagccaccacacccagccaaaatggctttgcaagtttaagctgtatccttcgagcacacctggctccaggatgatatgcgtccagcagccttttggcctgtaattcagttttctgtttggatccagccactgaaagggagtgctctgtgcagtgagcaagcaagtactgacccacgtgtagctccctcaataaatttgcactccagctttagaaatccatctcatggccgggcgcggtggctcatgcctgtaatcccagcactttgggaggccaaggtgggtggatcaggaggttaggagatggagattatcctggctaacatggtgaaaccccgtctctactaaaaatacaaaaaattagccgggcgtggtggcgggcgcctgtagtcccagctactcgggaggctgaggcaggagaatggcgtgaaccctgggggcggagcttgcagtgagtcgagatcgcgccactgcactccagcctgggcgacagagcgagatttcgtctcaaaaaaaaaaaaagaaatccatctcatgcaagttttgttaaaggaatcagttcctcgggccttggcctcctctgagagcactgacataaatctgtcacttaacttgggacaggatggaagctgctgcctcttctagcctcgtcctctctggcctgcactgctgtgcagcggtgtcagtgcaggggcatctgtggagctcagcctgccctggatgttctcgtctcctcccaggggacttaagactccacctaaggttgccagcctttcagtggtaagacatctatgcaatcaacccgaagccttaccacctggcactacttcagtgtatccttagactaccaggaggatctctgagacttggtggggaatggaacagcttgctgcaatttgtggatgtagattccgtatatttttgtctcttccaagagactgtaaactctttgctgacaaagtctgtgtcttgatagtttaaaagcagtttcccagtcttacccaaaaatggcaggaagggtgcccagaacggctgttccctgcttcctcctgggtctctgcatgggggacgctgggacagcctccccactcactctctctctctttctcccccgccgcgccccgcagtggcggctctgcagactgagatggagaacttggccctgcatctcttctacatgcagaacatcgaccaggacatgcgtgacgacatccgcgtgatgacacaagtggtaaagaaggccgagacggagaggatccgggcagaaatcgagaagaaaaagcaggtattctgcaaactcgacacatgtttaatgatcaccagaccgtggagcttcaaaaaggggctcagctttgcctcctgcgtgaaggcttccggccggaggggtggcggccggcctgggtggcgtcaacttgtatcaagggttggtggagaacaggccctcagccacgggcacctcctgacggggctgcttctcatcctgtttcccaggacctgtatgtggaccagctcaccactcgagcccagcaactggaagaagacattgccctgtttgaggctcagtacttggcccaagctgaggacacccggattttaaggaaagcagtgagtgaggtaaaagcagtccccgcagctctcagtgttcgaccctccagtgagtgtccacgcacagggtgctggtgggtctactagactgcacctgcccgtctgctggatgagtgactgcagccagcttacatctgcaaacatcgggccctccccatggtggggccacagtagatactgacaggtggacagcccggattcctattccttccctggctagtgggtgacagaaggcctcgcagggttcaggtactctagtcgcttcatgaccgccaaggccagcttgctgcggggatgctcagcaagttccttagcctgcagggacctcttccggggaggactgaagtctttctaacaattctcacccccgtgggcagccggccttccgggtagctcctacatctctgcacctcgtggagtagggagtggagggaacgaagggggtgaaagctgctccctcttggccccagattcaggtctgtagtggtagcaccagaaaccaaagttactgcaacttaaaaaaaaaaaaaaaaaaactatgagtcaccatcttcattcacgggtgcgggaatgacacggaggaaacaattaactttttttttttttgagacagagtctcgctctgtcgcccaggctggagtgcagtggcacaatctcagctcactgcaacctccgcctcccagattcaagcaattctcctgcctcagcctccagagtggctgggactacaggcgcccacctccatgcccagctaatttttgtatttttagtaaaaacagggtttcaccatgttggccaggttggtctcaaactcctgacctcaggtgatccacccacctcggcctcccaaagtcctgggattacagtcatgagccaccgtgcccagccaatgaaaaagaaggaagaggacttgaaggaacggatgagcacgctgggctcccagggtaaagggagggcccggggctgggcgttactcagcactggtctctccagctacaaatgcaattaaagtagagcacgtcccaatcagaatctcaggaacaaacaatcccttagttaacaaaacaattctggagttttatctgaaaaataaattaggaaggctagccaagaatggttttggaagagaagattcaaacggggcaagcagccatcccagtctgctcaggactgaggggtccccaagacaagggactttccatgctaagcccagggggtcctggacacagcaggatggcagatcaccctagcatcgccgcaccaaatattaaagtatacagtaaagctctggccaggcaaggtggtgcacacctgtaatcccagcacttggggaggctgaggcaagaggatggcttgagcccagaagttcaagaccagactgggcaacatggtgagaccctgtctccacaaaaaaataataattaaaaaaaaataaaacattagcccaccatggtggtgtgcacctgtggtcccagctactcaggaggctgaggcaggaggatcacttaagcccgggaggtcaaaaaaaaaaaaagaacaacaacactttattctcaacgaattgattttaaagttcacttagaagactaaatgctcaagaatacccaagaaaattttgaaaaggaaggatcatgaaagatccttgaactatgaaagatccaatgaaatatgatcataccactgcactccagcctgggctacggagcaagaccctgtctaaaataaaacaaaaccgtaaagttctagaggctaaaataatgtgtcacaagatagacaggcaagacattgaagcctatgagagagccccaaagcaagccagagtttatataaaaacctagtagattataaattaccagagagctaatgaattatgcatccaatgatgtcgggacatttggttaatcatttgggaaaaaattaaatcttttcctcataccagacactaaaataaattccagatggaatcaagtatttaaatgggggaaaatgtgccagacgaaaacaaatgaaaatatttatataatcctgggctggggaggcctttcaaagtataacaccaaaagcaggaaccttaaaggaaaagactaggaggggccgggtaaggtggctcacgcctgtaatcccagcactttgggaggccgaggccgctggatcacctgaggtcaggagttcgagaccagcctggcccgcatggcaaaaccccatctctactgaaaatacaaaaattagctgggcgtggtggtacacgcctgtaatgccagctacttgggaggctgaggcaggagaatcgcttgaacccaggaggcagaagttgcagtgagccgagatcatgccattgcatttcagcctgggcgacagagccagaatccatctcaaaaaacaaaacaaaacaaaagactaggaggacaatcacaccctcaataaaacctttgtagattaaggacgccacaaaccagatgaaggcggggagacaggcaggagaagacaactcgcagccattagtaaatccggggttgtgaagagaggctgaaagccaaggagactcgccctgtgtgcttccacaccctggaggcaggtgggctacttggtagatgcttccttttgcacctcccgccctcccctcgatgcaacttccccagggaagggggccgcccgcacttccttcatttctcatttccagtacccagaacagtgcgggggcaacagcagggcccctgttcatcgagcgaagtcacaagtaaccaaaggacagggagtcccctacagagttggcaaagataaggagagatgagccctccctgctgtcggccatgaaaatacagattggcctttatctttatcaagatcttcatccagggcgatatgatcatatgcagccactccctccctaaccctaaccctaaccccgcaccctgttagtgcttagactccattccaaggaacctagcaaagacctatgcagataacatttttgtatgttaaaaatgataaagccaggcttggtggggtgcacctgtagtcccagctactcaggaggctgaagcaggaggagcacttgtgcccaggaagtcagggctgcagtgagctatgattgcaccactgcactccagcctgggtgacagagtgaaacccccgtctctaaagaaataaatacagtgaatagagactcatgggggagatgacgctcatcaccgtgttgtgtcatcagaaagaaagaccccaagaagaggacattagtgaaacccattttcatacacctgtgcatcagaatacactacaccaaaaagagctctactgacatggaaacctgtctcgatattaatttcttattttaattttttttaaattatactttaagttttagggtacacgtgcacgatgtgcaggtttgttacatatgtatacatgtgccatgctggtgtgctgcacccattaactcgtcatttagcattaggtatatctcctaatgctatctctcccccctccccccaccccacaacaggccccgttgtgtgacgttccccttcctgtgtccatgtgttctcattgttcaattcccacctatgagtgagaacatgcggtgtttgggtttttgtccttgcaatagtttgctgagaatgatggtagagactaagtctcactctgtcccccaggctggagtgcactggggccctcatggctcactgtagcctcaaacttctgggtccaagcaatcctcccacctcagcctctcaagtaggtaggactataagcacatgccaccacaccgtgctaatttttttattatgattattctttttgtagagacggtgtttctttttgttgcccagactggttgggaactcctggcctcaagtaatccccccgcctcagcctcccaaagtgctgggattacgggcatgagccaccgcacctggcacaatacattaatttttaatatggcggggcatggtggctcacacctgtaatcccagcactttgtgagaccgaggtcggcagatcacctgagggtcaggagttcgagaccagcctggccaacatggtgaaaccccgtctctactaaaaattcaaaaattagccaggcgtggtggcgagtgcctataatcgcagctgttcgggagactgagacaggagaattgcttgaactcaggaggcggaaattgcagtgagccaagatcgtgccattttgctccagcctgggtgacgagagtaaaagtgtctcaaaaaaaaaaattaataggagattatgaaacaatatatagaatttgatttcgcacacacacacaatcacaggtgtaagaagttagaaatggttatctctaagtgttagggttattgaattttcattttctttttgcttatttgcacattctatttgcataggctgaacacttgcctttgtgaaaaactggggtctaaatgcacaggtgactgagcccggcagccatctttccatccttatgccttgacctgcacctcagtcaaccaggctgtggccggcagcctcaggggcaccatggggaggcctcgcacaggctcagtttaaggtgcatcctggctgaatttgggtccccacctgctgcctgggccagctcccactgcccaatggcacagagcagcctccttagtgaataacttacccccatacaaaactgtgacccagcagtcccacgactgggcatttatccaaaggaaagggaatccgtgcatccaatagacacctgcacccccatggccaggctggtctcggacccctgacctcaggtgatccgtccgccttgacctcccaaagtgctggggttacaggcatgagccgccgcacctggcccagtcaacaataatttattgtacattttcagatagctagaagagagggttttgaatgttcccaactcaaagaaataacaattgctggaggtgactgatacgctaattaccttgattcaagcagtacacattgtacatgtgtcgaaatatcactctgtaccccagagatatacagctgtaacatgtcagctaaaataaaaggaaatactacagacaaaagggaagtcagtcccgggatgtacacagtgtcccttcctaggctgcccaataatcctaagtaagcgtctgtgagaggaaaaaaaagtccccctcatcgtggtatacttaattcacaccattttaggttacgtcgtaatgaatagatggttcagaaaccctcacagccaagcatggtgtctccagggcgatggcctctctcatgcccggcgctgccctcggctcccccgtgatgttctagcgcactgtggttcagtcactgtctaccaagcttgcctgggtgtcacggcgtgcaggcacttctgggacttggcgttctacaggacgccccagttggctgactcgggccgccagcttgctcaagtcacagtgcttgcattggggatgactcatcaagaatcccaaacaccactcaaaacaagaccgcgatccaggccgtgctgggcatgcaggcatcaactcacttgacccggcagccccggggtcgctcctgtacccatggaggtgccgctcctgtacccatgtcacagctggggacactgaggcacagcgggtgagattcagcccaggcagccgtaccagccttaacctctgtgccccaagcataaaggaactcccctttcccttggagtaaattcctgaaccacccccctagttttcaagcccctcccctgcatgggccaagcccttactgcaggtggcccctcactgccccccacgatgcccctagacttccagcctccgctcagcctgcctgacctgcccacccctggctgtccagttgtgcctcctcattcccagtctaggcagccctgcttcccccagctggacgagagcatccagccctggccattcttgagacaaacacctccttccatcatggcctccctacaggaagcggtgctgggcccgtcctgtgggacctcagtccgaatcaatgacaccaccaaccctgcagaggtgtttcacggatgctggccaggatcccctcctcctctccctcctcctctccctcttcctctccgtcttccccctccccctcctccctctccccctcctccctctttcatctcctccccctccctctccccctcctccctctttcatctcctccccctccctctcccccttctccctccttcatcttccccctcctccctctcctcccctctccctccttcatcttccccctcctccctcccccttcctccctctcctcccttccctcctcctcctcattcccaagcactgagcaccgcaggccctgagcaaaggctcaaagcgggtacgggttatcttgaaagctacattcaggctcgtgtttacccctctgcagatgcatgatcaaggaaagtaccggtgatagaaggaaaagaggaagatttgggaatgtgaggctctggtgttcttgggctttgctcgcaaatgaaatgagacagccattcctgccccctcccctgttggctgcaggcctgcaccgagatcgacgccatcagcgtggagaagaggcgcatcatgcagcaatgggccagcagcctggtgggcatgaagcaccgcgacgaggcgcacagggcggtgctggaggcgctcaggtactgcagggccacaggcagcgaggatgtgcgggaaccccaggggtccgtggcaggcccgccccacaccccctctctctgggtccaccggatctctgggacagagggtgcaccttgatccccgggtccgggcttccgtccggaaagctccctcattgtttggtaagatttcagcgattcttaaatcctttccaacactgcggcgctgggaggggagaggcttttctgctcagatttcctggcaggattaagtagaaacagagcagggtaaagagaaagctatctttgggaggtaaaggtgtccctttgatttgcagtatcaccacctgagtgcggaaaccccatcccttctcgattgttctgcctgagggctgcattccaaccgaaatcctattttaatctccaaaggaaggggaggaagaggcctcctctgggcatcccctcacttctggggatggatgcgtggctcagggcagggcgttggagacacaggtgctgccttcattcctaaaaccacccagggtgaccaggtctcgggacgcggaaagaaaaagccgggcactgtggtggcacgtgtctcacccgctgagctttaacttcccctccacctttcgtagtctccaccccttgtgcccagcacagagcctggcatacagcaagcgctcaagaaaggctggaccaaggaatgagggtctggctggccccacagcacccgcagccaggcagccagcagcagtcacacaaccaggagatgcttttccttttgggtgctgtgattaaagaaacaaaatgaaaccattttgtttttaaaagtttttagaccaaaacattttcaaatgaataatattggattaaccatactcatttctggccaggcgcagtggctcgcacctgtaatcccaacattttgggaggctgagacgggtgggtcacgaggccaggagttcaagaccagcctggccaagatggtgaaaccccgtctctactaaaaatacaaaaattagccaggcatggtgtgggcgcctgtaatccccgctactcgggagggtgagacagagaactgcttgaattgcggaggttgtagtgagccgagatcacgccactgcactctagcctgggagacagagcaagactctgtctcaaaaaaaataaaaataataataa

SEQ ID NO: 15504 - DNA, 54188 bp, Homo sapiens
ggatgttgacagcgtcgcctagcaacgggaaatggcggaaccgggcggcgcggcgggccggtaagccgggccgaggggcagcgggtcttggagtcgccaggccgcgctctccgttcaccgctccaggtggcccccgcgtcggctcctgcctcgccccttcgcctccactcccccttcctctcgcctgtgtcccttctctcgccattttgctggcctttcccgtccactgcgttcagcccctcacccccccgccaacccttctcacttctcccctcctgtccctttgtcctctctcggcctccctctttcccctactccaagcgcgcgactccctctaaaacccgggaccgctcactctgcagtcaccatggcaaccactctgcgtggcggtccctgcgcgcagtcctcctaagagtagagggctctgcagggcgcggggctgttggataccgcccctgaccttgctccggggccactcgctgtggccggagaccagcccggccccgcgcctccctcctgcaaggacagatcccctctcgcaggcttgggggtgacccgcgatgggaggggtccctgcggttaggcggcccgcgatagtccgcggtcaccgtcctggggcctgggtggaagcactgagcgcgcacagggagggcggctgagtgaagatccctgccaccgggcctctgctcgcttaggctctgtttaaaaggatagaaacgattggaaagagtttggcctttttaccttagacacatcggtattgtttcatttttttaaaggtgggtctgtatgtattgacatggaaagactaaaggtattattaataaaacgataggcataaatgtaaaagggtaggtatactatgatctctaattcagggtgtgtgtgtgtgtttaaaacatagaaaaatgttgaaagaatgtggtcctaaatgttatcaatgattatcttgggaaggaaagggaagatcacagggaactgtcactgtctgtctctttgaacatatctatattcctttgacagataaaaatagcttgaatctttaattttttaaaaaagatatacatatatatatatatatatatatattcctgtgctacgtaaatcgtggagaaactcagagtccccagaacacttactctgatcgcgctactttctctacgttgtatttcttttccccagttttgtcccagacacaagttatatttgaggtgacttttctggggtgatctaatcctgctgttccttcgatgttttaataattatatttttcattcattcatggagctttgcttttgtggcatctccgccacctgacaggcatgatatagtgctatggttcctgacaaacaggacaaagacgtgacaacagcctgggggtggcagagaagtaacaagtaaataaacagatgtgcagaattcaggaggggataaggaccaagaaaaagaaagctgttgcttgaaactgttcaattgtttctctaaaaccaggtcccatccggaagatggatcggcttctgagggagagaaggaagggaataatgaaagccacatggtaaaattccctatgggcagttattccgggcttatatttactaggaattaaagagaatcagagtacgggcactgtggctcacgcctgtaatcccaacactttgggaggccaaggcaggtggatcacatgaggttaggagtttgagacaagcctggccaacatggtaaaaccccatctctactaaaaatataaaaattagccgggcgtggtggtgcgcacatgtagtcccagctactcgggaggctgaggcaggacagtggcttgaactcgggagacagaggttgcagtgagccaagatcacaccattgcactccagcctgggtgaccagtgaaactctatctcaaaaataaataaataggccgggcacggtgactcacgcctgtaattccagcactttgggaggccgaggcaggcagatcacgaggtcaaaagatcgagactatcctggccaacatggtgaaaccctgtctctactaaaaatacaaaaatttgccaggcatggtggttcacgcctgtagtcccagctactcgggaggctgaggcaggagaatggcttgaacctgggagatggaggttgcagtgagccgagattgtgccactgcactcagcctggcgacagagcgagactccatctcaaaaaatagataaataaaattaaattaaaaataaataaataaagagaattaggacttggtcaagtatattgtatgatgacattatcttgcaccagaacaaactcaattcagttgaagagagactcattttcttcctaccccattctacagtgtcagtgattagtcagggatgcaaaggatgtccaactttgggttgccctgagtttttcggaactcatttcctgtaacaaaggatgcaaaaatgattatgaaaagcagagagggccaggcatggtggctcacgcctgtggtcccggcactttgggaggctgaggcggatggatctcttgaggccaggaattcaagaccagcctggccaacatggtgaaaccccatccctactaaaaatggaaaaattaactgggcatggtggtacacacctgtagtcccagctacttgggaggctgaagcaggagaatcgcttgaacccaggaggtggaagttgcagtgagccgagatcacgccaccgcactccagcctgggcagcagagtgagcccctgtcacaaaaaaaaataaaaaaagaaagaacagataaactgaagcatgaaacatgattttttttttttttgagacagagtctcactctgtctccaggctgaagttcagtggcacgatctcagctcactgcaacctctgccttccgagtttaagcaattctcctgccccagccttctaagtagctgggattacaggtgtgcaccaccatacccagctaatttttgtatttttagtagagacggggtttcaccatgttggtcaggatggtctcaatctcctgacctcgtgatctgcctgcctcagcctcccaaagtgaaacatgatctcttagtgatgctgagaagggtataaatgcagttttcccattgatataattacactataaagaataaaacctcacaaggtcctttatactttgtttcctgatttttttcctgccacacctttacaggtgtcaccaccagagaaggatgatggccagaaaggtgaagaagctgtcggtagcacagagcatcctgaggaagtcacaacccaagcggaagctgcaattgaagagggggaggtggagacagaaggggaagcagcagtggaaggggaagaggaggctgtgtcctatggagatgctgaaagcgaagaggaatattactatacagaaacttcatccccggaagggcaaatcagtgctgcagatacgacttacccgtatttcagtcctcctcaggaactgcctggagaggaggcatacgatagtgttagcggggaggctggtctccaaggcttccagcaagaggccaccggtccaccagaatccagagaaaggagggtcacctccccagagccatcccacggagtcttaggcccgtcggagcaaatgggccaggtcacctctgggccagcagtgggcagattggtgagtagccctgacttctgttttgtgccagtgtcgcacggcccacggggtttgtcaccctatgtgaggaacttgggaatacattataaatacaaattgcaatccctgttagaaatgtcttagcaaggctgggtgcggtggctcacgcctgtaatcccagcactttgggaggcgaaggtgggtgggtcacctgaggtcaggagttcgagaccagcctggccaacgtggtgaaatcctgtctctactaaatatgcaaaaattaggcaggcgtggtggcgcacgcctgtaatcccagctactcaggaggctgaggtgggagaattgcttgaacccgagaggcggaggctgcagtgagccaagatcccaccattgcactatagcctgggcaacagagtgagaccttgtctcaaaaaaaaaaaaaaaaagaaaagaaatttcttagcaagcttaggtctcaggattcacggtcaaatgctgagagatcctggactctgcttcagtctgcccaagcccaaggctgggggcctccatagccgccatccacgtaagggcatccaagttcccaggcttccagagcagcattgtccaatacggtccatcagtcacatgtggctacagagagctctccaaatgtgactagcgagctggaggaatggagcttttaactgtttaagattctaatttccatttaaatagccacctgttgccagtggctgccataatgaatagtgcagttctagataaaaacaatgacaatagctgcgttcttatattttttcatcaattttctttaaacaatcacaaagttacagaaaaaaatggagtacaataaaaaggatcttttattttcttaaacactggagagtgggttgcggatctggtcaccaaagccttcgaacgcttctgtatgtttcccacaaacagctgggacacaaccatcaaaatctagaaattgggtcgggcatggtggtgcacgcctgtaatcccagcacttcgggaggccaaggcgggtggatcacttgaggccaggagttcgataccagcctggccaacatggtgaaaccccatctctactaaaaatacaaaaattagctggacgtggtggtgcacacctgtaatcccagctactcgggaggctgaggcaggagaatcacttgaactggagaggcaggggttgccgtcagccgagatcgcacccctgtactcctgcatgggcgacagagcgagactctgtctcaaaaaaaaaaaaaaattctggaaattgccttgctccatttccaaggaatgctcaggcctcattcagggttcaccaaatgtcccaatgatgtcttttgtagcaaagagattcagttcagaatcaaatgttgccttgagtgctcatatttctgtagtctcctcagtctttccttgacaaccttgacccttgtgaaggtcataggccagctgtcttgtagagcgcccctcagcctggatttgccccgtgtttcctcatgatggggttagggtcatgaggctttagtgggactatcacggaagcgacgtggggctctcagtgcgtcccaccagggatgcaggattccagcttccaccattcctgatgatgttcacttctgtcaccaaatttaaaagcaccaagattcttcattgtgaagcgaccttttactcctttatacttaatgaagattttgtgggaaggtgcttttttcttttttggtttaagataggaaggcgaatactatttagaatgggaaaaaaattgcaacagattccaaccagttattgaggacttcttatatttgcttacaaacgtatacaggtgttatacaacttttggcagatttatccctaagtatttctcttttttttgagatgtagtctcgctctgtcacccaggctggagtgcagtggcatgatcttggttcacagcaacctctgcctcccgggttcaagcaattctcctgcctcagcctcccaagtagctgggactacaggcacacaccaccacacctggctaaaattcggtatttttagtagagatggggtttcaccatgttggccaggctggtctcgaactcctgcccacaaatgatctgcctgccgcagcttcccaaagtgttgggattacaggtgtgagccatcgctcctgcccagtatttcacatttttgatgccattataaatggtttccaattgtctgtggctagcatatagaaatacaattggtttttgtatactcacctgatattctgccacgttgctaaagtccctcactagttagactagcttgtttgtagaatcggtaggctttttcacaaagataatcatctcatctgagaaaaaagacagttaacttcttcctttcccatccagatgccttttctttctttttcttgcctgattgcattggctagaaccgccagcaccatgttgaatagaagcggtgagagcagacctcttgtcttgccctgatcttacaggaaaagcatcagtctttgactgtaaagtgccatgtttgctgtgggtgttgcagatgccctttatcaggttaaggaagttcccttgtattctcggtttgttgtatgttgttgggttgtttttttttttttaatcataaaagggtattgggttttgtcaaatccttttctgtgtctgttaagaagactgtattttcctttttagttagttgatttggtagattacattgattgattttcagatgttcaagcaaccccgcattctgagataaacacagggagccactttggagtgatgtgaatgtcggttcctctttaaactcttggtttatttatattcttacatctgcatagactcagggctctccatgtgattcactgggttataacccattactgtcattatgtattttgatgctcagtttggccagtgagggcccatttaaaccagcctttgtgtgatcggacgcacctccatccttctttgagggctttcttgctttctgccatagactgcccagccttagaatcagacatttctccaggagccctgtttctgttagtggaaaatagaatttagaagttatcacttgggtgctggggtcctcattgatgctggggtgtcactgtccccaggacctctcagcggcaggagatagggcctgtgtgcgtgtactgtacgtacttcccccacatttatacatacaccatgtacacagacattcgctcacatctatatttattggaacacacccctgcggccggccttggctcacacccctgcggccggccttggctcacaacagaacctctaattccatctcacctccataaggagtccctcctggttttctcctcttccttttttttttttttttttttgaaacagagtcttgcccaggtagctgggactgcaagcactcaccatcacgcccggctaatttttgtattttttgtacaagggggcgtcttaccatgatacccaggctggtctcgaactcctgggctcagtcaatcctccctcctcaacctcccaaagtgctgggattacaggcatgagccaccacgcccggcctcctcttccatatttgtagctcctttctccaacagggagaagcctggccccatgatccttactgtattcactgatgtggtcaatcctcctggatgtaacctgtctcccacttttactgccttggctgccccctactcccagcataccttaggtttcaattgttctgcgaggggagatgggagtatggaagggaggcagggaaagaggatgctttatacttcttagcactgactatgggatagacactgttctgtgttgtcttagaatcctgacaaccctacgaggtaggaactatgattgtgcccattgtacagatgaggaaactgagaggtgcaaggtcattgcatagtcacccagctgttgcggcaaacggtagctcttgcttcaaagccaccgttctgaaccacaaggcacccatccctcctactcccctaccctgggaaacccgaaagagtttctaaaagtcactttggagaacagcatgattcagtatttggtgagccctaattaagttttatgatcacaagtgacaaatataaaaccaaaaccaaaatcttattttaagaatttatcaacaacaacaggccaggcctagtggctcatggctgtgatcccagcactttgggaggccgatgcaggcggatcacttgaggccaggagttcgagaccagcttaaccaacatggcgagaccccatctctactaaaaatacaaaaattagccgggtgtgttggtgcacacctgtagtcccagctacttaggaggctgaggcacaagaatcgcttgagcttgggagtcagagattgcatgagccaagatcatgccactgcactccagcctgggagacagagcgagaccccatctcaaaaacaaaacaaaacaaacaaacaaaaaaaaaaatatatatatatatatatatatctcaacaacagcaaaaccagtgtcttcacctttgtttaagtgaagtctaggtcacttgttgctctgtaaacccgattttcatccttgggcctagtttctagaaaatacactgggaagtagttttcaaatatgattgaagaaagggcagggacagcccctgagcgagccttgcttcccacctcccactggctctcagtctttgggacagtgtgagtggagcttgtgtccagttgtgcacacggacacccggaaacctctcattaggagaagccactgctgcgcaccctggagatgggttttgaccctgggctcccgttaatgttgttgtggctccagatgcctcagaaataacttccagagtcaacaccatctgcggaagtgccgtgagacggtgcatgggctggagacagagacagccggcgccgaacatacctggggctgcccgtgcaaactggggcaagcccttcagcctccatgtggctgctttactatggagaacagaaatgactagaacctgacttgtggggttatggcgagggtggcatgagatgagctttgtaacaatgtgttgtttatgggcagcaaaaccctgactcattgtctgggttactaatatccaagagttcatcatcagcgataattattgtcaatagtcgtaactgcaaaagtctcttttaaagctaaaatggatgccgggcacagtggctgtaatcccaacactttgcgaggccgaggcgggtggatcacttgaggtcaggagttcgagaccggcctgggtaacatggcaaaaccccgtctctactaaaagtgcaaaaattagccaggtgtggtggcaggtgcctgtaatcccagctactcaggaggctgaggcaagagaatcacttgaacccaggaggcggagtttgcagtgagccgagatggtgccactgcactccagcctgggcgacagagcgagagtccatctcaaaaacaacaacaactacaaaaaacgctgaaaaacagagctggggaaaggcattaaggggagggcttctcataacaaaaactatcacaaaagactctgcaaaccccacaatgttgcacaaagatcatcataacctttcaaaaaaaaaaaaaacacttctgctaggacagctgccagcaactgcctgtcgaaacttggactgatgccaccctgttattgatccttacagccaaggagaattatcgcaaaacaattatgtaatcctcctcatttttcctgtgtcaactttcatcttcctttacctccccaaatacaaacataatttactatgacacccgtattcccattgcaatgccctatccccaaataaatgtcattttcctttacagaacctctctctgtttgttatttaggatgatacattgctcaaaatttaacatgattgttaaagtaataggaaatcacttggatataaaaatcatcatttgacttttgcaaatgtccaaaatggaaaacatctaactctcccccgcccagggaattcagaagtggttcccccagctcacacctgtaatcccagcactttgggaggccaaagcggaaaggctgaatgaggccaggaatttgagaccagcctaggaatcatagcaagaccctacctctaagtaaaatattaaaaaattagaccagtgtggtggtgtgcacctgtaatcccagctactctggaggctaaggagggaggatcaccggagcccagaagttgggggttgcagtgagctatgattgcagcactgcacgccagtctaggtggcagagtgagacccttactcaataataataataataataataataaaagagtggtttctgcgtgtctgcatctgtagctaagtgtaaacacccaggcacgagaatgcatgggtcctgggatcttttgctcccacatgctgagcgcctcgaggatgggaaaccacaactctgagcaccctcttcatgaaagcatgcggaaaagcctcggctcctggccagggtctcccaagaggactgtttcctcttctctcctttcaaaccagccccctttagggaaatttcaataagaaaatgtcttcccttcataaaaacacctggctcgattttaactttatttatttatttatttttgagaaggggtcttgctctgttgcccaggctggagtgcagtgctgtgatctctgctcactgcaacctctgcctcccgggttcaagcaattctccctcctcagcctcccaagtagctgggattacaggtgcccgccaccgcacccagctaatttttgtatttctggtagagacggggtttcgccatgttggccaggctggtctcgaactcctggcctcaagcgatccacccgccttggcctcccaaagtgctgggagttacaggcatgagccacgtgcccggccaggttttttaaaaaacacacaggtgactatattttgagtctgacaactttcacaaatgtaatgagttaaaattgaataacttctcagtggcaattaagccctgttgacttagttttggttgttcttgccatagacaggatccacagaggagccccaggggcaggtgctcccaatgggcgtccagcaccgcttccggctgagccacgggagcgacatcgagtcctcagacctggaggagttcgtctcgcaggagccaggtgccacccacctgctgaggtcaccctgccctggcgatgagccacctgcacaggcccttctgtgcaagggatgccactcgtttgtcatccgttacctgtttcctgagtggctgtgagctgaaagagaaaaatcttattaacagatatggataacatttattgggcatttactgttttatctcatttaatcctaacagtgaccgatgaagtaggaatccttctccatttaacagacaggttccctaaggccattaaggaactggtccgattaagtgacagaacgcggccttcaccaagattcagtgacgcccagccccatcccctgacagccatttctcacgggctcctggtctcagagcgagacgtgccgtgacagcaaccccaggcctgaatctgtctgctggctttcaaaggctttccagaacccctgtcttcttacgtagtcccagtatcccagtgttgtggacgtgggagggcagatcaggcagttgcaaattccctgtggtaccgacctgcagccggtccaaacctttcattacttgcaaatgacatgaaaacagcacgtgtctaaattagtaaaaaaacaagccgggcgcggtggctcacgcctggaatcccagccaaggccggtggatcacctgaggtcaggtgttcgagaccagtctggccaacatggtgaaacccctgtctctactaaaaatacaaaaattaccgggcgtggtggcgggtgcctgtaatccccagctgctcgggaggctgaggcaggagaatcgcttgaaccccggaggtggaggttgcagtgagccgagatcacgccactgcactccagcctgggcaacagagcaagactctgtctggggataaaaaatattgtatccaatccactagttaagtggccacctttctgttcactctttatgtgtaaagaaagcctctcaaaaataatttccttcctgcctacctttaaaacgggacgctttctctgggatgcattgagtcagggaatagaagatggggtgaatgatgtttctgacccacagaccgttgggatgcttttgctgtcactttcccatcatgctgcatgaggcatgacagcagctgtgccattgatgccccagaatagaatcactgaggcttctctccagcagctcctcaatggtgtcgctgtctctccccccagtgatccccccaggggtgcccgatgcccaccccagggaaggagacctgccagtgttccaggaccagatccagcagcccagcaccgaggagggggccatggcagagagagtggagtccgaggggagtgacgaggaagcagaagacgaagggtcccagctggtggttttggacccagaccacgtaaggaagccttcccaggttttgcttttgcctacatggatggcgaatgactcaggcccctttctctgcctgcactgtctcccactcctgaccctaaatgctgtacttgtatctcgcctgttcactgcaccgtttattggcactgattgacctgcctcttcgtagggtactctcctctgaggttggtataggtgaggcctgtgtttctcaaccccggaaccactgccccgtggggccgggtcattctgtgctgtgccttgcatggtgtggaacagcatccccgagctccccctgctacatgccaggagcaccacccccccgccttggttgtgatcatcaaaaatgtctccaggctggacgtggtagctcatgcctgtaatcccagcactttgggaggccaaggtctgtggatcacctgaggtcaggagttcgagaccagcctggccaacatggtgaaaccccatctctactaaaaatacaaaaaaaaaaaaaaattagctgggcatggtggtgagcacctgtaatccctgttactcaggaggctgaggcaggagaatcgcttaaacccaagaggcggaggttgcatgcagacagccaagatggcaccagtgcactccagcctgggcaataagagcgaaactctgtctcaaaaaaaaaaaaaaaaaaatgtctccagtcattgccaaatgttggcggtgtggggcccatcttcgcagccactgccttgagggcaccaattggatcgcagctccctgccccacccactggcaaggggaaaaggcagatgttgatttcatttacccatcaggacagctgcagagctccaggaactgccggaaggagctgggggctgcacagggaggttctctccccagaccactgctccaccccaccctctggccccagctcaccatcattttgccaaaatatgcactcagttctctgcaagtgcctcagatgagaccatgaggtgcctttaatttgtggcttccagagtaagaatcccaagcagaagcagggagcactccacacggaagtcgtctctggcccaccggagggagacctgtggccacctgggctgagccctgggtcgggcaggagggtaaccagaaaggtaaccacctgtggttttccattgttctagcccctgatggtaagattccaggctgccctgaagaactacctgaaccgacagatcgaaaagttgaagctggacctccaagagctggtgtgtatccgtccagtctcccaccctggtcggatgcctgcgtcctggtgaccctgtttctctctttggtccaggttgtggctaccaagcagagccgagcccagcggcaggagctgggggtgaatctctatgaggtgcagcagcacctggtacacctgcagaagctgctggagaagagtcacgaccgccacgcaatggcctcgagcgagcgcaggcagaaggaggaggagctgcaggccgcccgcgctctctacaccaagacctgcgcagccgccaacgaggagcgcaaaaagtgtaaggcaacccggcagccccacacgccatccggtcctggagggtttcccaggggtgtctccatgtaccatggccaggcatctagaaaagtaagatgtgtgtgcatcctggaggggttcccaccctttttaggaggggaaggcacataaatcaaatgtctttttgttgttgtttttttgagatggagtctcactctgtcacccaggctggagtgcaatggcgcgatcttggctcactgcaacctcccccttccgggatcaagccagtctcctggctgagcctcccaagtagctggtattacaggcacctgccaccatgcctggctattttttgtatttttagtagagacggggtttcaccatgttggccaggctggtctcgaactcctgacctcaggtgattcgcctgcctcggcctcccaaaatgctgggattacaggcatgagacactgcacccggttataaatatgttaaatggcacctgtcaggacaaagcagcaaatgctgaagctgctaacagccagagcgtagagattcaaaactgggagagatgggtgagctgcagaggtcccaggatagatgagaccaggaggcgagagcagaccgggggtgatggagggtttcaatagatgcgaatgcgagggtgaggccggcacgacggtcagaccatggcccagggcctgaccgccgtaggatgtgtgcggcaggtcagtgggtagctttgaatcagatgagacagtgggggctacagcacgtgctatgcaacattaccgataaagcaacgtccttgcacagagctggtcatgtaggtgaccggggacagtggcttcctcttgtgactacggagtatttcagtctttatgctttttgatgttttcaactttctcaatcaactgtgtattactcttataatggggaaatgacctacacaaacctggaggaaaacagaagcacatggctatcccagctgttctggaaagaaacattttaaaccctgagaaaagtggaagaggttctggaaatttcagagttagggtaagtgggcacttatcaagcacctctcttggctgggcgcagtggctcacgcctgtaatcctagcactttgggaggccgaggcgggcggatcacgaggtcaggagatcgagaccatcccggctaaaacggtgaaaccccgtctctactaaaaatacaaaaaattagccgggcgtagtggcgggcgcctgtagtcccagctacttgggaggctgaggcaggagaatggcgtgaacctgggagtcggagcttgcagtgagccgagatcccgccactgcactccagcctgggcgacagagcgagactccgtctcaaaaaaaaaaaaaaaaaaaaaaaaaagaaaaaagaacctctctccagttagcatcaaatgaacagaaaacagtaaaaggaaagaaagtgacatccacactgaactgaaagagccacatcctccagaagtaaccaaatttacacccacctgaaggaggacgcgtgcccctaactgctccccacacctgcagtgaggctggagccgtggagctggtgtggagcgccctccggctcccctctgctagggcttaaagagtgggtgggattccaaaaagatccaaacactctggtggactctgcttcctggagattaggagagggccagagccgaggctcttcaacccagcaaggcctgcgtcaaacagcaccgtctctgccttctcagaactgaagaatttgggcaacggtcccggccctgaccggggggcagccaccactgcacagtcccttaggtgagacgtgggtcctggcccctggagaaagcccacggtcacctgcctcatctgggagggagactgtattagggttgtctagagggacagaactaacaggatagatatatagagaaaggagagtttattcagtattgacacaggatcacaaggtcccacaataggccgtctgcaggctgaggagcaaggagagccggtctgagttccaaaaatgaagaacctggagtccagtgttcaagggcaggaagcatccagcacaggagaaagatgtaggctgggaggctacaccagtctctcttttcacatttttctgcctgcttacactctagccgcactgtcagctgatgagatggtgcccacccagattgggggtgggtctgccttttcccaggccactgactcaaatgttaatctcctttggcaacaccctcacagacacacccaggatcaatactttgtatccttcaatccaatcaagttgacactcagtattaaccatcaccgacactaaaccttcacaccaaaatgagttaccaacccgagatccccagacctgagaggagactgagccggacagacaggcaaacccagccctgattctaaaaacagagcatgcggaggcaccaactggtagtctcatgagattttagaggacgttgtatccgtaaagagaacaaagtgttaggaagaggggtacgtgaaatttaaaaatataatcatcatcccagagtgtgcagaggcgccaactggtagtctcatgagattttagaggacattgcatccataaagagaacaaagtgttaggaaaaggggtacgtgaaatttaaaaatataatcatcatccccccaaaaggcactaactagacaaatgaatgcagttgaaaactgaatttcttaactaaaaagccagttcgaggaaccttccctggaaatagagcaaaaccccaaatgattgatatcttgaggaggaggtaaaagacatggacgacagattagggaaatcgaatcagtgtccgaaagggagatttcaggagatgagaggcaatagccaatgtccaggagaacagatgcgtgagttcaggaaagacgaatctgcagatagaaagactcgtgacgggccatgcagctgaaagagaaaataaacctccgcagacatagctggtgggatttccaaataccacggcaaaagaaaaaatgctgcaggcttccaggcgggaaaacccagatggcctcttgaggccgggcctgggctacgctttcatcaaggcctccatcagctgcgccttggaggaaccagggagagctcaaaaccaccaggacctatcccagcccagatttcagattggtttgttctgggaaggaccaggcattgtttgtttctggctttctttttgacccttaagcttccagatgatgctaacttgcagccagggctgagaatcacagatcttaaatttaaatagcaggatgtcaatgcatacagaattcagaattctcttttttgtgttttttgtttgtttgtttgtttgttgagatggagtctctctctgtcgcccaggctggagtgcagtggcgtgatctcagctcactgcaacctccacctcccgggttcaagcgattctcctgcttcagcctcccaagtagctgggactacaggggcccgccaccatgcctggctaatttttgtatttttgtagataacggggtttcaccatgttggtcaggctggtcttgaacccctgacctcgtgatccgcccaccttggcctcccaatgcatacagaattctaagggagaaggatggttagcatttgacctacatgtcagttagactctggaaattaacaacaacgggaagtccacgcatgaagacttctggctgcagccaaatctgctcagacaaaacccatgacagagtttatttacatttccacaaacaagcctgaaaacagacattctattcgagaagctaaaaagagggaaataaactgaaagaagcagaaaaataaaccaataaagatcaaaagcagaagctgatgaaataaataaaaaatgaattgacttgataaataaactgctttttttttaaatgaccaataaaccttacacactgctggcttatctggcaataaaaaggagatcatgcaagtaacagtgttgggaatgaggacaacttgggggagggttttttttgttttgttttttgtttttaattgcaagaaagctatgcattgtactggtttcatcatgcaagaaattgaaaatgtcaaaaatctgttttccctaaatgcaccagtattggaagatgttatggaaggcttctagtaacctttcaaggaacaaacacttcctgtgttatcaaagctccagggcatggaagattccggaaactccccacaggctggtcctgcaatgcttagtgaaaggctggctgcaaacgctgacagcatacaagcaggaaactgtaaagcggccccacatgtgaggagtgaaaatcctgaacaaaatgttagcaaaaataagtaggatttacttccagaattcacacaggaataattcacaattaggaaatctactaattttgtgcattatatttataaattaaagaatggaggccggatgtggtggctcacgcctgtaatcccagcactttgggaggccgaggcgggcagattacctgaggtcaggagttcgagaccagcctggccaacgtggtgaaaccctgtttctactaaaagtacaaaaaattagccaggtgtggtggcaggcacctgtaatcccagctactcaggaggttgagacaggagaattgcttgagcccaggagacagaggttgcagtgagccgagactgtgccactgcactccatcctggccaacagagtgagacactgtctcaaaaaaaaaaaataaataaatcaaataaaacaaaatacaaggataaaaaaaaaaggcttcctgggtgggtgccaaatgggtatttaataaaactcatcatccatcccaaagtaggatagaaggagagttctaagtatttatcagaaactaacaagaaaatgttacccagtggaaagactagacttaaaatcaggaatgagatgaggaggcctgctagcatagcagttaccccagactgttttggaggctccagcaacgcaaagaaaacaagagaaagaaatgagatatggatctgggaatgaaatactgaaattctcaacctctactaatgaaaaataaaagccaatagaaacagtaagaaatcaataaagtagctggataccagctctgtagttttcttctacaccagtaatatagttaggaattacaatttttaaaaaagctcattcataatagctataacaacttttaaataagtccaggaagaaatccaacaaggaatgatgagcctgtctgaaaaaaaacaataaatgttatgaaaggtcataaaacagatttaaataaatggagtgcccacgttaccagctgggaagacgcatgatataaaaatgccatttccctccaaattagcaataaaaccattgcaattcccgttaccctccgtggtgagatgttttgggtgaacttaaatttattcaacataattatttacttattttggaaaagtaatgattcaaaatgcaagagctctacaactaagaggaagttttcgtctcttttccccttcccccacccagccaccagggccctccgcagaggcaacgtagattcttgtggattctttttgtttttgttttcttcgagacagcgagacgcatcttgctctgtttcccaggctggaatgcaatggcagagtagcctcgaactcccagccttaagtgatcctcacacctcagcttcccaagtagctgggactacacacacaccaccaggcctggctaattttcatatatatatatatatatatatatatatatatatatttttttttttttttggtagaaacagggtcttactgtgttgcccaggctggtctccaattcctgggctcaagtgatcctcttgcttcggcctcccaaagtcctgggattacaggcataagccactgtgttcagcccttgtggagtcttttggagattttttgcatatctaagcaaagtcacaagggtgtgtgtgtatgtgtatctctctctctctctttaacttaaatggctgcatattatacccactgctcggttcctcgcttgctgtcccttagcaacacgtgctgcggatattccacctcaaaacaaaaagcacctcgggccaggtgcggaggctcacgcctgtagtgttgacactttgggaggctgaggctggcagatcgtttgagctcaggagttcaagaccagcctgggcaatgcggcaaaaccccatctctacaaaaaatacaaaaatgagaaattggccgggcatggtggcatgtgcctggagtcccagctacttggggggctgaggtgaacccaggaggttgaagctgcggtgagctatgattgtgcgactgcactccagcctgggtgacaaagtgacaccctgtctcagaaaacaacaagaacaacaacactttattctcaacaaattgattttaaagttcatttagaagactaaatgcacaaaaatatccaagacaattttgaaaaggaaggataatgaaagaaatatttaagaataataacaagtccttagccaggcctggtggctcacgcctgtaatcccagcactttgggaggccgaggcaagcggatcacaaggtcaggagatcgagaccatcctggctaacatggtgaaaccccatctctactaaaaaaaaaaatacaattactcgggcgtggtggcgggcacctgtggtcccagctactcaggagactgaggcagaagaatggcgtgaacccgggacgcagagcttgcagtgagccgagatcaccactgcactccagcctgggcgacagagtgagactctgtctcaaaaaaaaaaaaaagaagaatagcaagtcctcaaagagaacttagaggaaattactttggaatttagctactgcaagctatattaatgcacaggttgctttttttttgagacagagtctcactttgtcacccaggctgtagtgcagtggcatgatcctcccacctcagcctcctgagtagttgggattacggacgtgcaccaacacatcctgttaatttttgtattttgagtagagacagggtttcaccatgttggctagactggtcttgaactcctggcctcaagtgatccgcccacctcggcctctcaaagtgctggggttacaggcgtgagccaccacacccagccaaaatggctttgcaagtttaagctgtatccttcgagcacacctggctccaggatgatatgcgtccagcagccttttggcctgtaattcagttttctgtttggatccagccactgaaagggagtgctctgtgcagtgagcaagcaagtactgacccacgtgtagctccctcaataaatttgcactccagctttagaaatccatctcatggccgggcgcggtggctcatgcctgtaatcccagcactttgggaggccaaggtgggtggatcaggaggttaggagatggagattatcctggctaacatggtgaaaccccgtctctactaaaaatacaaaaaattagccgggcgtggtggcgggcgcctgtagtcccagctactcgggaggctgaggcaggagaatggcgtgaaccctgggggcggagcttgcagtgagtcgagatcgcgccactgcactccagcctgggcgacagagcgagatttcgtctcaaaaaaaaaaaaagaaatccatctcatgcaagttttgttaaaggaatcagttcctcgggccttggcctcctctgagagcactgacataaatctgtcacttaacttgggacaggatggaagctgctgcctcttctagcctcgtcctctctggcctgcactgctgtgcagcggtgtcagtgcaggggcatctgtggagctcagcctgccctggatgttctcgtctcctcccaggggacttaagactccacctaaggttgccagcctttcagtggtaagacatctatgcaatcaacccgaagccttaccacctggcactacttcagtgtatccttagactaccaggaggatctctgagacttggtggggaatggaacagcttgctgcaatttgtggatgtagattccgtatatttttgtctcttccaagagactgtaaactctttgctgacaaagtctgtgtcttgatagtttaaaagcagtttcccagtcttacccaaaaatggcaggaagggtgcccagaacggctgttccctgcttcctcctgggtctctgcatgggggacgctgggacagcctccccactcactctctctctctttctcccccgccgcgccccgcagtggcggctctgcagactgagatggagaacttggccctgcatctcttctacatgcagaacatcgaccaggacatgcgtgacgacatccgcgtgatgacacaagtggtaaagaaggccgagacggagaggatccgggcagaaatcgagaagaaaaagcaggtattctgcaaactcgacacatgtttaatgatcaccagaccgtggagcttcaaaaaggggctcagctttgcctcctgcgtgaaggcttccggccggaggggtggcggccggcctgggtggcgtcaacttgtatcaagggttggtggagaacaggccctcagccacgggcacctcctgacggggctgcttctcatcctgtttcccaggacctgtatgtggaccagctcaccactcgagcccagcaactggaagaagacattgccctgtttgaggctcagtacttggcccaagctgaggacacccggattttaaggaaagcagtgagtgaggtaaaagcagtccccgcagctctcagtgttcgaccctccagtgagtgtccacgcacagggtgctggtgggtctactagactgcacctgcccgtctgctggatgagtgactgcagccagcttacatctgcaaacatcgggccctccccatggtggggccacagtagatactgacaggtggacagcccggattcctattccttccctggctagtgggtgacagaaggcctcgcagggttcaggtactctagtcgcttcatgaccgccaaggccagcttgctgcggggatgctcagcaagttccttagcctgcagggacctcttccggggaggactgaagtctttctaacaattctcacccccgtgggcagccggccttccgggtagctcctacatctctgcacctcgtggagtagggagtggagggaacgaagggggtgaaagctgctccctcttggccccagattcaggtctgtagtggtagcaccagaaaccaaagttactgcaacttaaaaaaaaaaaaaaaaaaactatgagtcaccatcttcattcacgggtgcgggaatgacacggaggaaacaattaactttttttttttttgagacagagtctcgctctgtcgcccaggctggagtgcagtggcacaatctcagctcactgcaacctccgcctcccagattcaagcaattctcctgcctcagcctccagagtggctgggactacaggcgcccacctccatgcccagctaatttttgtatttttagtaaaaacagggtttcaccatgttggccaggttggtctcaaactcctgacctcaggtgatccacccacctcggcctcccaaagtcctgggattacagtcatgagccaccgtgcccagccaatgaaaaagaaggaagaggacttgaaggaacggatgagcacgctgggctcccagggtaaagggagggcccggggctgggcgttactcagcactggtctctccagctacaaatgcaattaaagtagagcacgtcccaatcagaatctcaggaacaaacaatcccttagttaacaaaacaattctggagttttatctgaaaaataaattaggaaggctagccaagaatggttttggaagagaagattcaaacggggcaagcagccatcccagtctgctcaggactgaggggtccccaagacaagggactttccatgctaagcccagggggtcctggacacagcaggatggcagatcaccctagcatcgccgcaccaaatattaaagtatacagtaaagctctggccaggcaaggtggtgcacacctgtaatcccagcacttggggaggctgaggcaagaggatggcttgagcccagaagttcaagaccagactgggcaacatggtgagaccctgtctccacaaaaaaataataattaaaaaaaaataaaacattagcccaccatggtggtgtgcacctgtggtcccagctactcaggaggctgaggcaggaggatcacttaagcccgggaggtcaaaaaaaaaaaaagaacaacaacactttattctcaacgaattgattttaaagttcacttagaagactaaatgctcaagaatacccaagaaaattttgaaaaggaaggatcatgaaagatccttgaactatgaaagatccaatgaaatatgatcataccactgcactccagcctgggctacggagcaagaccctgtctaaaataaaacaaaaccgtaaagttctagaggctaaaataatgtgtcacaagatagacaggcaagacattgaagcctatgagagagccccaaagcaagccagagtttatataaaaacctagtagattataaattaccagagagctaatgaattatgcatccaatgatgtcgggacatttggttaatcatttgggaaaaaattaaatcttttcctcataccagacactaaaataaattccagatggaatcaagtatttaaatgggggaaaatgtgccagacgaaaacaaatgaaaatatttatataatcctgggctggggaggcctttcaaagtataacaccaaaagcaggaaccttaaaggaaaagactaggaggggccgggtaaggtggctcacgcctgtaatcccagcactttgggaggccgaggccgctggatcacctgaggtcaggagttcgagaccagcctggcccgcatggcaaaaccccatctctactgaaaatacaaaaattagctgggcgtggtggtacacgcctgtaatgccagctacttgggaggctgaggcaggagaatcgcttgaacccaggaggcagaagttgcagtgagccgagatcatgccattgcatttcagcctgggcgacagagccagaatccatctcaaaaaacaaaacaaaacaaaagactaggaggacaatcacaccctcaataaaacctttgtagattaaggacgccacaaaccagatgaaggcggggagacaggcaggagaagacaactcgcagccattagtaaatccggggttgtgaagagaggctgaaagccaaggagactcgccctgtgtgcttccacaccctggaggcaggtgggctacttggtagatgcttccttttgcacctcccgccctcccctcgatgcaacttccccagggaagggggccgcccgcacttccttcatttctcatttccagtacccagaacagtgcgggggcaacagcagggcccctgttcatcgagcgaagtcacaagtaaccaaaggacagggagtcccctacagagttggcaaagataaggagagatgagccctccctgctgtcggccatgaaaatacagattggcctttatctttatcaagatcttcatccagggcgatatgatcatatgcagccactccctccctaaccctaaccctaaccccgcaccctgttagtgcttagactccattccaaggaacctagcaaagacctatgcagataacatttttgtatgttaaaaatgataaagccaggcttggtggggtgcacctgtagtcccagctactcaggaggctgaagcaggaggagcacttgtgcccaggaagtcagggctgcagtgagctatgattgcaccactgcactccagcctgggtgacagagtgaaacccccgtctctaaagaaataaatacagtgaatagagactcatgggggagatgacgctcatcaccgtgttgtgtcatcagaaagaaagaccccaagaagaggacattagtgaaacccattttcatacacctgtgcatcagaatacactacaccaaaaagagctctactgacatggaaacctgtctcgatattaatttcttattttaattttttttaaattatactttaagttttagggtacacgtgcacgatgtgcaggtttgttacatatgtatacatgtgccatgctggtgtgctgcacccattaactcgtcatttagcattaggtatatctcctaatgctatctctcccccctccccccaccccacaacaggccccgttgtgtgacgttccccttcctgtgtccatgtgttctcattgttcaattcccacctatgagtgagaacatgcggtgtttgggtttttgtccttgcaatagtttgctgagaatgatggtagagactaagtctcactctgtcccccaggctggagtgcactggggccctcatggctcactgtagcctcaaacttctgggtccaagcaatcctcccacctcagcctctcaagtaggtaggactataagcacatgccaccacaccgtgctaatttttttattatgattattctttttgtagagacggtgtttctttttgttgcccagactggttgggaactcctggcctcaagtaatccccccgcctcagcctcccaaagtgctgggattacgggcatgagccaccgcacctggcacaatacattaatttttaatatggcggggcatggtggctcacacctgtaatcccagcactttgtgagaccgaggtcggcagatcacctgagggtcaggagttcgagaccagcctggccaacatggtgaaaccccgtctctactaaaaattcaaaaattagccaggcgtggtggcgagtgcctataatcgcagctgttcgggagactgagacaggagaattgcttgaactcaggaggcggaaattgcagtgagccaagatcgtgccattttgctccagcctgggtgacgagagtaaaagtgtctcaaaaaaaaaaattaataggagattatgaaacaatatatagaatttgatttcgcacacacacacaatcacaggtgtaagaagttagaaatggttatctctaagtgttagggttattgaattttcattttctttttgcttatttgcacattctatttgcataggctgaacacttgcctttgtgaaaaactggggtctaaatgcacaggtgactgagcccggcagccatctttccatccttatgccttgacctgcacctcagtcaaccaggctgtggccggcagcctcaggggcaccatggggaggcctcgcacaggctcagtttaaggtgcatcctggctgaatttgggtccccacctgctgcctgggccagctcccactgcccaatggcacagagcagcctccttagtgaataacttacccccatacaaaactgtgacccagcagtcccacgactgggcatttatccaaaggaaagggaatccgtgcatccaatagacacctgcacccccatggccaggctggtctcggacccctgacctcaggtgatccgtccgccttgacctcccaaagtgctggggttacaggcatgagccgccgcacctggcccagtcaacaataatttattgtacattttcagatagctagaagagagggttttgaatgttcccaactcaaagaaataacaattgctggaggtgactgatacgctaattaccttgattcaagcagtacacattgtacatgtgtcgaaatatcactctgtaccccagagatatacagctgtaacatgtcagctaaaataaaaggaaatactacagacaaaagggaagtcagtcccgggatgtacacagtgtcccttcctaggctgcccaataatcctaagtaagcgtctgtgagaggaaaaaaaagtccccctcatcgtggtatacttaattcacaccattttaggttacgtcgtaatgaatagatggttcagaaaccctcacagccaagcatggtgtctccagggcgatggcctctctcatgcccggcgctgccctcggctcccccgtgatgttctagcgcactgtggttcagtcactgtctaccaagcttgcctgggtgtcacggcgtgcaggcacttctgggacttggcgttctacaggacgccccagttggctgactcgggccgccagcttgctcaagtcacagtgcttgcattggggatgactcatcaagaatcccaaacaccactcaaaacaagaccgcgatccaggccgtgctgggcatgcaggcatcaactcacttgacccggcagccccggggtcgctcctgtacccatggaggtgccgctcctgtacccatgtcacagctggggacactgaggcacagcgggtgagattcagcccaggcagccgtaccagccttaacctctgtgccccaagcataaaggaactcccctttcccttggagtaaattcctgaaccacccccctagttttcaagcccctcccctgcatgggccaagcccttactgcaggtggcccctcactgccccccacgatgcccctagacttccagcctccgctcagcctgcctgacctgcccacccctggctgtccagttgtgcctcctcattcccagtctaggcagccctgcttcccccagctggacgagagcatccagccctggccattcttgagacaaacacctccttccatcatggcctccctacaggaagcggtgctgggcccgtcctgtgggacctcagtccgaatcaatgacaccaccaaccctgcagaggtgtttcacggatgctggccaggatcccctcctcctctccctcctcctctccctcttcctctccgtcttccccctccccctcctccctctccccctcctccctctttcatctcctccccctccctctccccctcctccctctttcatctcctccccctccctctcccccttctccctccttcatcttccccctcctccctctcctcccctctccctccttcatcttccccctcctccctcccccttcctccctctcctcccttccctcctcctcctcattcccaagcactgagcaccgcaggccctgagcaaaggctcaaagcgggtacgggttatcttgaaagctacattcaggctcgtgtttacccctctgcagatgcatgatcaaggaaagtaccggtgatagaaggaaaagaggaagatttgggaatgtgaggctctggtgttcttgggctttgctcgcaaatgaaatgagacagccattcctgccccctcccctgttggctgcaggcctgcaccgagatcgacgccatcagcgtggagaagaggcgcatcatgcagcaatgggccagcagcctggtgggcatgaagcaccgcgacgaggcgcacagggcggtgctggaggcgctcaggtactgcagggccacaggcagcgaggatgtgcgggaaccccaggggtccgtggcaggcccgccccacaccccctctctctgggtccaccggatctctgggacagagggtgcaccttgatccccgggtccgggcttccgtccggaaagctccctcattgtttggtaagatttcagcgattcttaaatcctttccaacactgcggcgctgggaggggagaggcttttctgctcagatttcctggcaggattaagtagaaacagagcagggtaaagagaaagctatctttgggaggtaaaggtgtccctttgatttgcagtatcaccacctgagtgcggaaaccccatcccttctcgattgttctgcctgagggctgcattccaaccgaaatcctattttaatctccaaaggaaggggaggaagaggcctcctctgggcatcccctcacttctggggatggatgcgtggctcagggcagggcgttggagacacaggtgctgccttcattcctaaaaccacccagggtgaccaggtctcgggacgcggaaagaaaaagccgggcactgtggtggcacgtgtctcacccgctgagctttaacttcccctccacctttcgtagtctccaccccttgtgcccagcacagagcctggcatacagcaagcgctcaagaaaggctggaccaaggaatgagggtctggctggccccacagcacccgcagccaggcagccagcagcagtcacacaaccaggagatgcttttccttttgggtgctgtgattaaagaaacaaaatgaaaccattttgtttttaaaagtttttagaccaaaacattttcaaatgaataatattggattaaccatactcatttctggccaggcgcagtggctcgcacctgtaatcccaacattttgggaggctgagacgggtgggtcacgaggccaggagttcaagaccagcctggccaagatggtgaaaccccgtctctactaaaaatacaaaaattagccaggcatggtgtgggcgcctgtaatccccgctactcgggagggtgagacagagaactgcttgaattgcggaggttgtagtgagccgagatcacgccactgcactctagcctgggagacagagcaagactctgtctcaaaaaaaataaaaataataataatactcatttccttcactcccttgagtcaacaacataaagccaaagggaacactgtggtttgatacaggcgatgtttggctgaagcttcgtttcccctgtaaagatgcaggtcgaggaaccagagccagctgtggccgggcaagggctcctctccctgtgtcaccagggttgcctgaacaccaggacgagaggacttggccatctgcccacttgggtgtctttttcctcctgccccaatgctaggacttgatacctgactgtttaattacacggctcagctgccacgggccttaagaaaagtcaaggccaggttctctctgagggtccagcacctggcctggctctccgaggctcatggcctgtgaaccctgcagcgtccccaagggaagacgtcacctccgagatggtcctgttgtccagctctcccctgcatcccagactaaccagtgtcctctctgcaaaccgtcctcattgccctcagagacatggcttccttttggttgcaaacattgtaaaaatcgtattcgatcaggtctcctcctcctcggcccgcagtcactagaaccccctcccaagacaagcaaaggcacctggttttctgggatcccctgcctaacttgtgtgcaattgcaagaaagcatatgcgttcacccggagtcttccttccctctcttgctccgtgggagcacaccacactcactgttctgcacctctttgctttttccatttaacagcgtgtccctagagcgcttcccaagtcaaaatataaacaccgctcgttcccgcctttctaccacatggcattccgctgggatacttctacggggaagcttcctgcccggggcatcgagggcgttcgcgtccgtctgttatggcggtgctgctgtagataaccggatccgcgaatgctaacgctcaccaggatgctatatagccttttttatattgcctatcaagcccggaatgtctgggtctagcgggtattgctaagtaggattgtgacagtcacgcccccggcagcggtgtttcaaagtcccctgacagctcagcatgttgtcacacttcaggactgtgccaatccgattgatgaagaaaatagataatcttgttttataaaacgtgcatgcgcagaatgttgagtgaatattttagtggactatgtacacgcacaaacacttcacaacgagtgagagagcctctgacttcacctgcagcttgccacaccaaggccccggggaggagtgaggcccaacttttatttattatatttttgtggttcttgcaatggagtctcgctctgtcccccaggctggagtgcagtggcaccatctctgctcactgcgacctccgcctcctgggttcaagcgattctcctgcctcagcctcccaagtagctgggattacaggcgtgcaccaccacgcctggctaatttttgtatttttagtagagacggggtttcaccatgtgggccaggctgatcttgaacccctacctcaggtgatccacccgtcttggcctcccaaagtgctgggattacaggcgggagccactgcgcccggccagtcttttaaaagtgcaggccgtgtagaacattgtgagaagtataaactgtaattacagagatttgctgtttgcacccagatagatttgaagaagcaacttggagacaggtttaatagatcagggccattattacagaaataaattattgcatagcttaggacttccaagctaggagtgcagtgactgaactatacctcaaatattgaccttgagatgttcagatttgtagagcatcttagaaaatggtgacattcctggctgatggtcaggatggtgcataccaggccggtaccctggtggctgtctgggcatttctggagccttcaccctgcgagatccccatggggcaggaccccctggcccagaagcttggttttgccatcacaccgagaaggcacacttgtcctggagttagtttacatgaatcgagctcaccagagcctgacgtgtaactgagtataatagcccatttatgtgcatgatgaaatataaacaccaaagaaccgaatgctccacgctcggactagcagattcttatctgtgggggaggacacaggagcggatgacacagacccctgctcagggaccggctagagggcggaatgcctgggccccggccctgtctgcttcctgcttcttccccgaagttcatggcctgtccgtccacatgggcgggaggtgtcccgcgagcagccctcaccctgaccttggctgctttctccattccattccccacccctcctccctcctgacacccatggcattttttcagataagttaatacctttgattaggttccagccaaacctcaccctttctctttccccatgcctttgtgtctctcttcgtctgatgtcgagtctacaacctaatgctttgaagacagactgacttccccgtccttggtcagggggttgctgctgcgtggggggggcggtaaccataatcttgcccccgtgtctcatacacaagctgcaagcttagctcagaagctgtgcctgtcttggctgctttttcttgctgtcttccctatttttgcaggagttttgcacacggtcataaaagttcaggagaaacatgaaacgtgttattctgtttcctgtttaagtcgacctgaggaagctgaaggggtcaggcgcggtggctcacgcctgtaatcccagctctttgggaggccgaggcgggcagatcacgagctcaggagctggagattgaaaccatcttggctaacatggtgaaaccccgtctctactaaaaatacaaaaaaacagccagacctggtggcgggcacctgtggtcccagctactcaggaggctgaggcaggagaatcgcctgaacccgggaggtggaggtggcggtgaagcaagatggtgccactgcactccagcctgggtgacagagcgagacttcgtctcaaaaaaataagaaagaaaaagaaaaaaaagagagagagagagacagagagagagagagaaaaaaagaaagaaagaaaagaaaagaaaactgagggcttgccctaatctcctagacttccttttccctcagtcctgatgatggcagagacgactcctcaaaggctcttccccttggcatggagtgctggagcctgccctagggagggaggacaggatggagcaagacactgaacgcagaattagagctaggcaacgagcgggtgatttcactgtttcctgggtaacaagccccaggctcagctcggtctggtgtagcccctcaaaggggacactgtccttgcccccagttgatggaggaggaaggagcggaaggcagtgtgggatgggttgggtgtgggcattgccacagtgtccccagcaggcctccttctagcctggggatctggcaggtgggtcccagtcaccaccaatgccccatatacccaaggacactggtgacccagcagacctgaggccacagaccaaagacagagtaacaaccccattaaaaatgtgcccccatgggcgggcatagtggctcctgcctgtaatcacagtgctttgggagactgaggcaagaggatcccttaagcccaggagttcaagaccagcccgggcaacatagtaaagtaagaccttgtctctaaaataaaatataaaaaatagccaggtgtggtggtgtgtgcctgtggtctcatctacttgggaggcagaagcaggatgatcacttgagtccaggaatttgaggctgcagtgaactgtgattgcacgaatgcactccagcctgggcaacagagcaagaccctgtctctcaaaaaatttttaattagcggggcatggtggtgtgcacctgtagacctgtagtcccacctactcgggaggctgggtgggaggattgcttgagcccaggaggtcgaggctgcagtgagccgagatggtgccactgcactccagcctgggcaacagagccagagcctgtctcaaaaaaataaaaaagtgtccccagacacaggggcatgggtgaggcctgtcaggactgctgtggtagctcatggtgtcctgtcccttcttcccaccagggaatgaccgtggctgtgggcacaccccctgtccatctgggcctgcctgtgggagctggacactgccctccccagcagccagaagtcctgaaggaaccgtgtgtgaccctcaagaccagaccgggcctgccacaccaacccttcaaagaccgcagcggtccaggcaatccaacgtgggtcccaaagctaggtgaataaccacgaggagcccacggtcagccccttcccatcacatacgcagggaaatgggtcactttcactttcagaaaacaaagcctggaccgcacttaacttggaggcagataacctaatcagaattcacacacgcctgggacttggagccaaaagcacccgtgctcttacctgcctttgtcctatttcctggcgggaaatacagagggcagacaggtcttggcccgcagccacagcccctttaccccaagatgtgactcggtcagccacacggcctcacagcctcctcccaggccctcagctgtggccacggcagccaggcaggccgacccaaggacaaaagccacgggcagtgtcctgggagagaacccggccttgaccacaggctgctggacacctcctgtgtcccccccttaatcctcagaggcacggtgcccaatgcctgggccatattccagattccatccgttctttttgtttcatttacagacagtccccgacgtcacgatttttggactttaccatggtattaaagcaacaggcaggcaacagaaactgggctttgagtcccacacaacctccctggttttcagcacggtattcaataaattacatggatgccccacactttattatcaaacaggcttcgtgtgagatgattttgcccacctgtaggctcatgggagtgtcctgagcacgtttgagggaggctgggctgagccggggtgcctggcaggaaatctgcaggaagtgcattttgggtttttcagcttttttttttttttttttttttgagatgaagtttcactcttgtcgcccaggctggagtgcaatggtgcgatctcagctcactgcaacctccacctcctgggttcaagtgattctcctgcctcagcctctcaggtagctgggattacagacatgcaccaccaccatgcccggctgattttgtatttttaaaagagacggggtttcaccatgttggccaggctggtcttgaactcctggcctcaggtgatctgcccccacttggcctctgaaagtgctgggaattacaggcgtgagccacggcaccagcctgcattttggacttaggatattttcaacttacgatgggtttgccgggctgcatccccaccgtaagctgaggagaacctgtactttctattggtgcctgctgatctacggagtttttaaagtacgatttaaaaaaataataatccttatcaaggataagtgattgcgttacaggacatttgaaaaacagagaaaaggatttaaaaataccatcgactttctctttttgtgacaagaagactcattagcatgtcagcacactctcaggcacacatttccccgagtgttaggagttctgttgcacagtttgtaactgtatctttttaaattgggcatcttatttttattgtcaaatttagacatttataaggctgctccttcctaaaaaaagaaaatgagtaacttatttacttgaagtcaggatgactggggataatttatgtacaaaattgcatacctccagccctggcaaccgctgtgccgccttctgtgcctatagctctgccatttctagaatgtcatataaatggaatcgcgcagtctgtagcttttcttgtctggcttcttccacttggcatcatgcttttgagacccacccatgttgcaagatcagtagtctgttcctttttattgttgaatagtattcccttgcacggatacatcagatgtatttgtccatccaccaactgatggacatttggcttttacctttggaataccgtgaagaaagctgctgtggctgtcctgaaaagatctttgcatggagacgtgtttccgtttctcccgggtaaatacaggcgcatctcgtttcagtgtgcctcgctttctcctactgcgtggaatcgcttttgtttgtttgtttgtttgtttgtttgtttgtttttgagatgagtttcactctgtcacccaggctggagtgcagtggggcgatcttggctcactgcaacctccacctcccgggttcaagcaattctcctgcttcagcctccagagtagctgggattacaggcacatgccaccatgccctgctaattttttgtattttttagtagagacggggtttcactgtgttagccaggatgatctcgatctcctgacctcatgatccacccgcctcagcctcccaaagtgctgggattacaggaatcgcattttttacaaattgaaggttgacggcagctccgtgtggagcaagtccaccggcaccatctctccagcggtgcgtgctcacttcctgcctctgcaccacatgttggtcgttctcataatatttcaaactttttcattgtcatcgtccgttatggtgatctgtgatgagtgacctttgatgttaactattgtaattggtttttggcaaagccacgaactgcccttgtttaagacagcaaactgaatcaagacatgtcgtgtgtgtactgactgctcgccggctggcgttcttccatttctgtccctctccttgggcctccctattctccaagactcaacagtattgaaattaggcctacaatggccactaagtgctcaagtgaaaggaagagtctcatgcctctcactttatttttattttatttatttatttttgagacactctgtcccccaggctggagggcagtggcacgatcttggctcattgcaacctctacctcccgggttcaagcgattctcctgccccagcctcccgagtggctgagattgcaggtgcctgccaccgtgcccggctaatttttgtatgttagtagagacagggtttcaccatgttggtctcgaactcctgacgtcaaatgatctgcctgcctcggcctcccaaagtgccgggattacaagtgtgagccaacgctcctggccgcctctcactttaaatcaaaagttagaaatgattaagcttcatgaggaaggcatgtcaaaagctgagataagccaaaagctaggcctcttgcaccaaagggatagccaagttgtgaacacaaaggaaaagtttttgaagaaaatttaaagtgctgctctaatgaacacacaaaagaaagggaagcagcctaattgcgcgtctggagaaagttcaggtggtatggacagaagatcaaaccttccggccgggcgcggtggctcacgcctgtaatcccagcactttggaaggcccaggcaggcggatcacgaggtcaggagatcaagaccatcctggctaacacggtgaaaccccgtctctactaaaaatacaaaaagttatccaggcatggcggcaggtgctgaggcaggagaatcacttgaacccaggaggcggaggttgcagtgagccgagatcgcgccactgcactccagcctgggcaacagagcgagactctgtctcaaaaaagagaatgcacctggtgggcatgctagctcaagtaatctcagcactttgggagggcaaggtgagagaattgcttgaggccaggagttctagaccagcctgggcaacatagcaagagcctgtctctaaaaccgaaaaaaggaaagaaagaaaatgtacctggtcacccaagagttttgatggagctggagctgtgcaagatgaatgttgtttccacacctgtaacacagcatttattctgcaacccatgggttgaggagtaatttcaactttcaagtcttactattgcagtaatacagtctgtaaagctatagctgtcatagatagtgattactctgatggatctgagcaaagtaagttgaaaaccttctggaacagactcaccattctagataacgttaaggatattcgtgattcatgagaggaggtcaaaatattactcttggtttttttgaggtggagtcttgctctgttgcccgggctggagtgctatggtacgatcttggctcactgcagcctctgcctcccggattccagtaattctcttgcctcagacttctgagtagctaggattacaggtccttaccaccacacctggctaattttttatatttttagtagagatggggtttcaaccgtgttggccaggctggtcttgaactcctaacctcaagtgatatgctcacctcagcctcccaaagtgctgggattacaggcatgagccacctcagcctcccaaagtgctgggattacaggcatgagccaccgtgcctggcccaaaatattactttttttttttttttttttgaggtggagcttctcttttgtcgcccaggctggagtgcagtggcacgatctcagctcactgaaaactccacctcccaggttcaagcaattctcctgccttagtctcccaagtggctaagattagaggcacctgccactacgcccaactaattttatttttttaaggttggaattgcttttattggggacagatgtgcaagtccccgctcatggtcaggttagtgttctgcccttgcagaggtgccagcagcctgacacctccatctgccgcccgccccgggttagtggaacatgcaaagctcagagggtggaggcaggggtggtcgctgctgaagccagacgtccagctaatttttgtatttttagtagagacgggttttcaccatgttagctaggctggtctcgaactcctgacctcaggtgatctgcctgcctcggcctcccaaagtgctgagattacaggcctgagccactgcgcccggccccaaaatatcacctttaatggcaaaactgcaattacttttgcaccaacctaatatcaacattaacagaagttgattgtaacgcctgtggatggctttgagggctcaggacttcagcgcagaaagtcactcccgatgtggtggaaacaagaactagaatgagaagtggagctgagatgggatggaattgctgtgttcatatgatcaaactttaatggatgaggagttgcttcttacggatgagcgttttcttgaggtggaatctgctcctgtgaagatgccatgcgcattgttgaaattaacaaagaatttagaatattccataaacttggttgatgaggcagcagcagggtttgagaggactgactccaattttgcaagaaggtcttgcgtgggtaaaatcctatcaaacagcatcacatactacagagaaatctttcataaaagaagagtcgatccatgtggcaatggatgtggcaggaagagtcaatccattgtcttattttaagattgccgtccaggtggggtgactcacacctgtaatcccaacactttgggaggccaaggcaggcagatgacctgagctcaggagtttgagaccagcctgggcaacatggtgagacctcatttctacaaaaaatacaaaaattagccaggtgtggtggtgtgcacttgtagtcccaggtactcgagaggctgagggaggtggtggcttgagcctaggaggctgaatttgcaataagccaagatcacaccactgcactccggcctgggtgacagagccagagtcagagcctgtctcaaaaaaaaaaaaaaaaaattgccacagccaccccagccttcagcaaccaccaccctcatcagtcagcagccagcaacatcaatgcaagaccctctaccagcatactttatcaagtatgacttgataaacacttaggtgattgttagcattttttagcaataaagtttgttttttttttcttttttaaaatagagtctcattccattacccaggctggagtgcagtggtgtgatctcagctcattgcaacctctgcctcttgggttcaagggattctcctatctcagcctcctcagtagctgggattacaggtgcccaccacgacacctggtatttttagtagaaatagggtttcaccatgttggccaggctggtctcgaatttctgacctcaggtaatctgcctgcctcagcctctctaagtgctgggattacaggtgtggaccaccacgcccagcctaaagtaagtacattctttagacatgatgctattgcacgcttgatagactacagtaaagtatgcaccttctgtatgcactggggaaccaaaaaagattgtgtgacttgctttactgtgatacttgcttaattgcggtggcctgcaactgaacctgcagtatctccaaggttccggctcaacatacattttactttataacaaatgcttgccggccgtggtggctcacacctgtaatcccagcactttgggaggctgaggcggatcacttgagctcaagagtttgagaccagcctgggcagcatggcaaaaccccatctctacccaaaaataccaaaaattagctgggtatggtggtgcatgcctgtaatcccagctacttgggtggctgaggcaggagaatcccttgagcctggtaggtggaggttgcagtgagccgagattgcgccattgcactccagcctgggtgacagagcgagactccgtctcaaaaataaacaataaaacagctgctgcggtgttttcccaagtgactggttccaatttgcattttctccagcaatttatgagagtcccagttgttccacatcctcgccaacatttggtattatcagtcatctaattttagccatcaaatatagccattagcaaatgtgtggtgcatcgccttgcggtctgagcctgcgtgtccctaatgactagcgatggtgagcatctcttccccggcttattcgctattcctgtgccttctctggtgaagcaacttctgctcatttttccgctgagtggcttatcattgagttgtaagagttcttcatatcttctggagacatcttttatcagacgtgtgctttgaaaatatttttgtcccagtctgtggctttgtcttttttacctctttacagtgtcttttgaagagcaaaagttttaaatttttgtgaagtccaacttattaaatattttctttcctgattcatgctttttatgtcttctctaagaaatctctaagggtcaggccgggcacagtgtggctcatgcctctaatcccagcactttgggaggccaaggtgggcggatcacgaggtcaggagattgagaccatcctggctaacacggtgaaaccccatctctactaaaaatacaaaaaattagccgggcgtggtggcgggcgcctgtagtcccagctacttgggagggtgaggcaggagaatggcatgaacctgggaggcggagcttgcagggagccaagatcacgccactgcactccagcctgggcaacagagcgagactctgtctcaaaaaaaaaaaaaaaaaaaggaaagaaaaagaaatgtctaagggtcacgaagattttctcccaagttttccactaaagttttccaggtctcgcttttaggcatctggtccatttcaagttcacgtttgttgtggtatgagcggggtccaggctcaggttttgtgtgtctctctctagttgtcccagcaccacttgttgaaaagactgtcctttccgtattgaaatcctgtgacacctttgtcaaagatcaatgtattgtgtgtgtgtgtctgtttccagactctctattctgttccgttgatctttttgtcattctttcaccaataccacattgtctttctaactagagctttatggaaaatcttgaaatcagatagtctgagtctttgatgttgttttacaaaattattttggttactctaggtcctttaggtttccatttaaattttaaaacttgcttgtcaatttctggggaaaaaatgccttctgggatgtaactgaaattacattgaatccatagatcagtttgaagagaattgaggccttaataatattaaatcttctgcttcatggacatggcaaatctctccagtatcagtatctttttttttttttttttttgagtcagagtcttgctctatcacctgggctggagtgcagcggaacaatctcagcttactgcaacatccgcctcctgggttcaagtgattctcatgcctcagtgtaccaagtagctgtgaacacagccacacaccaccacgcccggctaattttttttgtatttttagtagagatggggttttgtcatgtgggccaggcttcctttctctattgatagtgtcttatcctttgaataagtttttattcaaatagtcagaaagtactttcttcttggactagaataataccttccatatttttctcacatctctccccagtctttcaattctctttcccaagcaacctgttactgtttcataaaggtctttccagatagatttcgttcatacatatgcattattctcgggtgtttatctctccacttaaaaatcacccgcggccgcttagtgtgtcccgctctgcagcttggtgtttcttgtgctgtgtcttagagttattccatgtcagaacacatagaaatcaccgttgttctttgcagttctcttcacactgtgttctaaatgatgcctgtgccataatttaatcatcctcatcgatccataatgaggccctttcctgttttttggctttttctgatctcatcagtggatcaataaatatccacacacattaaaaatagatactggatcaccaggcacggtggctcatgcctgtaatcccatcactttgggaagctgaggcaggtggatcacttgaggtcaggagttcgagaccagcctggccaacagggcgaaaccctgtctctactaaaaatacaaaaaaaaaaaaaaataggcaggcatggtggcacacgcctgtggtcccagctactcaggcagctgaggcatgagaatcgcttgaacccaggaggttgcagtcagccgagatcgcgccactgtactccagcctgagtggcagagcgagactctgtctcaaaaaaaaaaatactggatggccaggcgcagtggcccacacctgtaattccaacactttgggaggccgaggcaggtggatcacttgaggtcaggagttcaagaccagcctggccaacatggtgaaaccccatctctacaaaaatacaaaaattagctgggcatggtggcacacacctgtaatcccagctacttgagtggcttgaggctgcagtgagctgagatcatgccattgcactctagcctgggtaacagagtgagagactgtctcaaaaaaaaaaaaagaaagaaaggaatgaaaggaatgtttaaagtaccgcagaacatctcagaataataggaaaacatgcctcacacacacaaaattcaaatcctcatgctgaggcgtaagaatgacttgaacccaggaggcagaggttgcagtgaggcaagatcgtgcctctgcactccaacaaatacaggatttgaatctgattatttcatttgaatcagtattttagatctgattatccgatatctgtgttttagagcttgacgttaattacaggtatctcatcgcagcatgccgaggggaaagacaatagaatttgaagtgggcccactggtgttccctcagccacgctgtttcctgcagaccttgggctagtgattgaaatgctctgagtctcaatggccacatctgtaaagctggactatttccttcctaggattattgtcatggttaaggaaggtgggcagatgagaacccctagcccaacgtctgacccatgcgtcactttccttctccccataatcacagtacaaaagagttgtcaacttgggctttcaatagataatagttctcttgatctatttgaaaataatagtcaagatttggctattggctgcaaaaatacagtgagggagaaggaacaaggcccagtgttcaatagcatgtcacagtgactacagttcacggtaagttagtgtatatttctgaatagctagaggaaaagatttggaatgttctcaacacgaaggaaggatcatgtgtgaggtgatagatggccggttcccctgatttgatcatgacatgctgtatgcttgtgtcaaaatatcgcatgtacctctcaaatatgtgccaatctatccataaaaattttttaaagatttggctgctattaaaagagttggtttcctgctgggtgcagcggctcacacctgtaatcccagcactttgggaggccaaggcaggcacattgcttgagctcaggagttggagaccagcctgggcaacacggtgaaaccccatctctacaaatagagtttaaaaattagccgggcatggtggcgcacacctgtaatcccagccactcaagaggttgaggcatgagactcgcttgaacccggcaggcggaggttgcagtgaaccgagatcgcaccactgtatttcagcctgggttacagagtgagactctgtctcaaaaaataaataaataaataaataaataagagttggcttcctaatttatttctctgtgcattgagttcgccttagtgagctccctcgtgtggggcgcagctctgtgcactggctctctgatgtctcacacgtaactggctctccccgctgcatttctacagaggatgccagcatcaagccaaatccaccgacggcgagattgaggcctataagaaatccatcatgaaggaggaagaaaagaacgagaagctggcgagcatcctgaaccggacagagacggaagccacactgctgcagaagctcaccacccagtgcctgaccaagcaggtggccctgcagagccagttcaatacctacaggctcaccctgcaggacacagaggatgccctcagccaggaccagctggtgaggccgggcccgccccacaggtcacacctggcgcacggtggtgcctcttcaggcacgtgcaccctgtggctccttgtctccaggaacaaatgatactcacggaggagttgcaggccatccgccaagccatccagggcgagctggagctcaggaggaagacggatgctgccatccgggagaagctgcaggagcacatgacctccaacaagaccaccaaatacttcaaccagctcatcctgaggctgcagaaggagaagaccaacatggtaggcccctgccccagggaggggctgtgcgaagccccctgcagcctgggcatatgagggcaagccgtcctggaggcggagagggcggagtcagtgtgagcagagggccctcctgtgctcactcctttccatggtgttcaggttgtaagggtgatacatttttactgtagaaaacctagaaataggccaggcgtgagccaccgcatggccagctgccagccaaaggctgatttccctggggggacctggagtgtgacttcgacgtccatggcagggaacccccaattgtgagctcatgttcgcatcccctgggatcttgctttatcctttatcacctgtggtgggggtggaggggacttgtgtccttagaaaaaacaattccttacttgaattgttttttctttgcctcttcccgaggggtgaccgcctccccaacaccccgcctcaagcaggcccctttggaggacccccagaggctaccacaggctccaccatttccagagcacatcctagcagtggggcctgcccaacagtccccattttagtctcagaggagggtgacagattcccgatgccaagctctgccggttttgccctcctgaggggtgggaaaggagctggccaggcagagctgaagggcgtggtgggtgtgaaggagcccatccagccgtgctgctaccagccaagtccagttcccaatccccaggcccccgggcccccgccgagcccctgtctgggcagcccgataggtcatacgtgttttgctgccagtttccagaagagggcagcaaagagtcttggaccaacacattcgtctattacgacaattttccaaccgatgccagtccagctgctgaaaagagtacccccgacacgatgtttgaactgctcaaagcctcatgggctgatagaaggtggggtggggaggcatatctgggaggaggagcaaagtgtggatgggcgggaccacccatccggagctggggtcaaccacggggtccaggcagttaatccagggatggtgtagatgcctagggggagccagggtgggctccacagagaccacaaacagccaggagtggagcgggggtgcaggcccggctgtgacggggagggactgaaggggacttggagccatagcccctgcagggcagttggggaggggggaggcagggagtccttggggggcccagatctcagggtgaacttggcagaggaggaggctgcgagctgacattgccacacaactccagatgccggaagcttccactccaggtgggcagggtctgggttccaccacctggggacattgggtctcctgggaagccgcccgtggtggccagtgagagacatggagcccacaggcgtggcgggaggagaagctcagatggccctgaggaggctggggtaggcaggagccacagtcgtgagagagccaaggccttgtgtggcaggagccgacgggcaggggtgctcagggcagacacagggcccgaggccacctgttagaaccatgccctggggaagaggaccctgtcctggtggtgacagcatctccctgttcccagagcagctttggccacaccattgcagctgtgactgccactgcctcactcctgattatcacaaacgtcctctcgataaaccccccgttgccagaagggatccaaagtctgtctaatgcctccaaagagcccacagaggaggccagcactggcggctcagacctgccggacagcaggaggggtcagaacgcatggaggaaccagtgtctaacaattgcttcttgcttcataaactatgctgcaaatgtgatagagtacagcacagccattacagcttacagagcacaggaacataagacccgacttaccagattaaaaagcaggttagcacccagtgtgtagggtgtgatcctatttttattttggagaattatatagaaaagactgggaggaaaaatggattcagatgggaatggtagctaacttgtgtcagaattgcaggcaattgaatgtgttctctgtcctggcctgtattttcacatttcctcacaatgtgtgtgctacgatttaagaagtgtgttagtctgatctcacactgctgtaggaaatacctaagactggataactgataaaggaaagaggtttaattgactgacagttctgcatggctggggaggcctcaggaaacttacaatcatggcaaaaggcgaaacaggcacctccttcacaaggcagcaggagagagagtgtgtgtgaagcaggaaccgtcaaacacacaaaaccatcagatctcatgagaactcactatcatgagaacagcatgggggtagcggcccccatggtccagtcacctcccacaggggccctcccttgacatgtgggattatggggacacaattcaagatgagatgtgagtggggacacagccaaaccacatcaataagaaaagctaataccatgatctctcttttctgtaaaaagccaacatctgggttccaacaagtaggtcccttgctgggtcctggagacagtgggaaatccagcctcctgcactcgtgactgtgcgtttggaatatctccagaggaacatcccgaccgtcagggaacggtggatcagcaaactcgtcccgggccttgggtgggggcaatattcacaggtatttcttttcatcaattcagatgacacatctttccaaaatcaacggtgacattgcccagaccaccctggacatcacacacaccagcagcaggctggacgcacaccagaagaccctggtggagctggaccaggacgtgaagaaagtcaacgagctcatcaccaacagccagagcgagatctcccggcgcacgatcctgatcgagaggaagcaagggctcatcaacttcctcaacaagcagctggagcggatggtctccgagctgggggtgaggtcccaggcagggagacgtggtccccggctgactgtggtgcctggtggggcagagccccctcagatcccccacggtcagacatgaactcctggaaggcacagaactgcctctttccctacctgctttacagacaaaatggcacgtgtgccaagcgctctaagtcacatttttctgcacaaggccagagagtattccggctttgtggccagttggtctctctggcagtgacacggctctgcctccatagcgagaaggagcataggtaaaacgtaaaggaatgggcacggctgtgtccaatcagatgttattcaaggccactgaagtctgaattccaaataattttcacccagcacgaaatattctgctgctctaagaaaagtggcctaatgcgtttgaggcctgatgccatatacgtcatccaggtccctgtactctcaaagcccctttgggttccagaggccccacccaccctgccagcgcacccaccatggggaagctagagggggctccagagccccttagccatatttcctccagcggggtctgtggcttgcggccctgctgagagctaacttgagcccctcggccttcgtccagtttcatgacctcagggttccaggccctctgcagcccactcacaaagacctttgagcccaagaaggctaattttgctttttttttttttttttttttctgagacggagtcttgctctattgcccaggctggagtgcagtggtgccatcttgctcactgcacatctgcctcctgagttcaagcgattctcctgcctcagccttccaagtagctgggaccacaggtgtgcaccagcacacctggctaatttttgtattttgggtagagacggggtttcaccctgttggccaggctggtcttgaactcctgacctcgggtgatccacccgcctcagcctcccaaagtgctggaattacaggcgtgagtcactgcgcccagccctaattttgctttttgatgaatatccggtctagggggaagaagtggggcccctggagcttgaaatcaaaaggctgagcaagctgatcgacgagcacgatggcaaggcggtccaggcccaggtgacctggctgcgcctgcagcaggagatggtcaaggtgacacaggagcaggaggagcagctggcctccctggacgcatccaagaaggagctccacatcatggagcagaagaaactacgagtagaaagtaagagccgccgtgcccggccctgcagtgatgctgagacgagctctgggacgtgggcacctcccaggggaggggcactcagtggggcacgtcgctggatttgcacgcagccttaaaagcaaataacaaacgcgcatgctccctgtattttgtaaatgtgaaccactgcctgcccagctgcccagttcgcagtcacagcgggagggttgagaaatgtcacgaaatggctccaagctcacggacttcagagctctccttgagagaggagcatggaaggttatcatccccgccaagccagggcactcaggtggaaacactggcacgggaaaagccagggtcctgccaggcaggctcctggtgctgtccccacatcacctccagttgggcttagaaaaccattccaccggggctccccaacccttctgaggcccaaggggctgccaaagcaccagggtgcctggaatgatggaggcgggcatccttcctggaccactctccacccacatgtccacctgccgagacatcccgggtcctgcccggtcttgggtcggggatccatgctggtcaggcctgcagcagagcccccatgggaaatgctgcccagacacatcatgtgcccttctcggaggtcctgctgcctctcgccctgcccttcttgggttgcccaaacccgtctgttggtgagtagcaagtcccaaaagaccctatggagctgtcagctgagtatcggtgtcccaaggcaagagctgccgaaataccatgctgtgagatggggaggatcacccatggagagggcagagagaggggctcacatgcccatgtcctggggtagtcagggcacaccatggggacagcaggaggagctggagaagccctgtgaggagtggccagcggatgaaccagctgtggcctcttgtgccctccacccatcttaacatcaagaagagctgttgttttctgcccctacccctgagcttggctggggcagggcaggggtctaagggcctccctctcctggagactcacagtgtctgagcatcaaccaggtcccggtgctccacagatttgcaagtgtctgggggagggagcctggccctcccacacgccctgcccacacctgctggctgtccccacaggcaggtcctctcagttccgttggaggaccaggctttgggagcttagcagccaaaaagagaccccctgtcctctcctctcctctgtcctggcagggacgagattcaggcaggagcgccaggaacgacaagagggaggggatgaagggagctacagggagagacaaaacctggctcacctctcggacactgctgcctgcgggcgaggacccgtaccctcctggggtctctccctgagtctctgttttctgccataggcaagattgagcaggagaagaaggagcagaaggagatcgagcaccacatgaaggacctggacaacgacctgaagaagctcaacatgttgatgaataaaaaccggtgcagctcggaggagctggagcagaacaaccgggtgacagagaatgagttcgtgcgctcgctgaaggtccggccgtgtccacgcagtcccggggctcaggacgatggagggcgggggtacggtccttgcggtgggcgttctgcaccaggatgtaatttccacacccgttcaagatgcttgtaggggtattagaaatccagcctgcagccctgccctcggtgccgggatagagggcaccagccccggcatccacaatcccatggccctccccacagctgtcccgccccctcccccatgcaggcctctgagagggagaccatcaagatgcaggacaagctgaaccagctcagcgaggagaaggcgaccctcctgaatcaactggtggaagcagagtgagtcccagtctccagccacacgtgggtcatgaaggtcactgcacctacaggcctctgtccgttgaagaccatgtaggaggccaggtgtggcagctcacacccatatcccagtgctttggtcattttttgttgttgttttgttttttgttttgttttgttttgtttttagacagtcttgctctatcccacaggctggagtgcagccgtgcgatctcagctcactgcaacctctgcctcccagcttcaagtgattttcctgcctcaacctcctgagtagctgggattacaggtgcccgccaccatgcctcactaatttttgtatttttagtagagatggggtttcaccctgttggccaggctggtcttgaactcctgatctcaggtgatctgcccacctcagcctcccaaagcgctgggattacattcatgagccaccgtgcccagcaatcccagtgctttgggatgccaaggcaggaggctcctttggggccaggagttcaagacaagacggggcaacacagtgagaccccatatctacaaaaatgttttaaattggccaggcatggtggtgcatgccggtagtcccagctactcgggaggctgaggtgggaggatcgcttgagcccaggaggtcaaggctgcagtgagctaggattgcaccactgcactccagcctgggcgacagagcgagaccctgtctctaaaagaagaaaaagaccacctgggcatgggtctggaacccaccctagtggatcccagattccccacagagtctgtctaccccccttggtggcagttcttgagccaaacgagttactgctagaaattgaagggtttcctttgtgataaagtttttaagtatccattattttatggtgtctgattattaaagtaacacacacccagctctaaacattttaaactatacaatgcgtgcaaagtacccagggaaaattgcatataattccaacgcccttcacttcccagaaaaccaatgtgtagctatattcctttcttgttttgctctgttttttacacaaatgggattgtttcagaagttcccccttgaagcactttagtattttcatggccatctttccgtgtcacacacgtgggcccatatctccctgtggaaagggtgcggagcaggcgtggtgtggaggcaccgtcctttcttcagcgtgctccggaagggatgaatagcgcagggatcgcctgttccttgcggtttgatagaatctaggcaaaaaattatctgggaccaatgctttggggggcttgtatctttggtgacatttaaatagcttttagactattggtgtattcaggctttttactttttcttaagtcagcttctatcaattatactgactttctcagctcctacagttatatatccctgttctctctctctctgtctctctgtttcttccccacccccatctccctccctccccctgtatgccagaggttggcaaacgtttgcataaggagcccagtagtgaacacttcaggctttgagagcctcacgctttctgtcgcagctgcttggctctgccattgcagcttgagagccttgtaaagccttagagtgtgagctcaccgaagcatcagaagaaaactcctaatttcttacactgcctctcctacctctaaagacaccagattatgctttgggagaaaaaaatccaactggcaaaagagatgcgttcctcagtggattccgagatcggccagacggagatccgggccatgaagggcgagatccacaggatgaaggtgaggggaggagagcggcgtggcagggcctgctgggtgccagcccttgggctctggagacctggccacaccaaggcctcggctctcccggggctcctgtgggaaccacactggccacattggctggtggcaatgggtgagatttccagggagcgacccgctccagcagagtgacctgcactccagccgagcactggcaaagcgcacgtcccccttgacccagcttttaccacacgcttgcttttaatgtgcagaaatattgcagaacaacacaggacgcacacaggcacgtgcacgaacaacacgggacgcacgcaggcacgtgcacgaagaacacgggacgcgcgcaggcacgtgcacgaacaacacgggacgcgcgcgggcacgtgcacgaacaacacgggacgcgcgcaggcacgtgcacgaacaacacgggacgcgcgcaggcacgtgcacgaacaagggacgcgcgcaggcacgtgcacgaacacaggacacacacagcacgtgcatgaacaacacaggacacacacagcacgtgcatgaacaacacaggacacacacaagcacgtgcatgaacaacacaggacacacacaagcacgtgcatgtcatctcacaaaacgctgttttattcctactccatgtaatcacagcacgctggtatttttaaatgccggttgtaaccctcaaactttgtgaccctctaacgtatcccactgtgagacagtctcacaccacagaagggctcagagagcacccccatctcatccttcacagccgcgttgtctctccatggtcacaattagatttcattgcctttaaaaggctggtaattaaattgcaagtggtcatcaagctaaaggttcagggccttaaggataacagtaagagcagttcataaaataaatgggcctcactttcaccatgccatgct

SEQ ID NO: 15505 - DNA, 63972 bp, Homo sapiens
agcgtcgcctagcaacgggaaatggcggaaccgggcggcgcggcgggccggtaagccgggccgaggggcagcgggtcttggagtcgccaggccgcgctctccgttcaccgctccaggtggcccccgcgtcggctcctgcctcgccccttcgcctccactcccccttcctctcgcctgtgtcccttctctcgccattttgctggcctttcccgtccactgcgttcagcccctcacccccccgccaacccttctcacttctcccctcctgtccctttgtcctctctcggcctccctctttcccctactccaagcgcgcgactccctctaaaacccgggaccgctcactctgcagtcaccatggcaaccactctgcgtggcggtccctgcgcgcagtcctcctaagagtagagggctctgcagggcgcggggctgttggataccgcccctgaccttgctccggggccactcgctgtggccggagaccagcccggccccgcgcctccctcctgcaaggacagatcccctctcgcaggcttgggggtgacccgcgatgggaggggtccctgcggttaggcggcccgcgatagtccgcggtcaccgtcctggggcctgggtggaagcactgagcgcgcacagggagggcggctgagtgaagatccctgccaccgggcctctgctcgcttaggctctgtttaaaaggatagaaacgattggaaagagtttggcctttttaccttagacacatcggtattgtttcatttttttaaaggtgggtctgtatgtattgacatggaaagactaaaggtattattaataaaacgataggcataaatgtaaaagggtaggtatactatgatctctaattcagggtgtgtgtgtgtgtttaaaacatagaaaaatgttgaaagaatgtggtcctaaatgttatcaatgattatcttgggaaggaaagggaagatcacagggaactgtcactgtctgtctctttgaacatatctatattcctttgacagataaaaatagcttgaatctttaattttttaaaaaagatatacatatatatatatatatatatatattcctgtgctacgtaaatcgtggagaaactcagagtccccagaacacttactctgatcgcgctactttctctacgttgtatttcttttccccagttttgtcccagacacaagttatatttgaggtgacttttctggggtgatctaatcctgctgttccttcgatgttttaataattatatttttcattcattcatggagctttgcttttgtggcatctccgccacctgacaggcatgatatagtgctatggttcctgacaaacaggacaaagacgtgacaacagcctgggggtggcagagaagtaacaagtaaataaacagatgtgcagaattcaggaggggataaggaccaagaaaaagaaagctgttgcttgaaactgttcaattgtttctctaaaaccaggtcccatccggaagatggatcggcttctgagggagagaaggaagggaataatgaaagccacatggtaaaattccctatgggcagttattccgggcttatatttactaggaattaaagagaatcagagtacgggcactgtggctcacgcctgtaatcccaacactttgggaggccaaggcaggtggatcacatgaggttaggagtttgagacaagcctggccaacatggtaaaaccccatctctactaaaaatataaaaattagccgggcgtggtggtgcgcacatgtagtcccagctactcgggaggctgaggcaggacagtggcttgaactcgggagacagaggttgcagtgagccaagatcacaccattgcactccagcctgggtgaccagtgaaactctatctcaaaaataaataaataggccgggcacggtgactcacgcctgtaattccagcactttgggaggccgaggcaggcagatcacgaggtcaaaagatcgagactatcctggccaacatggtgaaaccctgtctctactaaaaatacaaaaatttgccaggcatggtggttcacgcctgtagtcccagctactcgggaggctgaggcaggagaatggcttgaacctgggagatggaggttgcagtgagccgagattgtgccactgcactcagcctggcgacagagcgagactccatctcaaaaaatagataaataaaattaaattaaaaataaataaataaagagaattaggacttggtcaagtatattgtatgatgacattatcttgcaccagaacaaactcaattcagttgaagagagactcattttcttcctaccccattctacagtgtcagtgattagtcagggatgcaaaggatgtccaactttgggttgccctgagtttttcggaactcatttcctgtaacaaaggatgcaaaaatgattatgaaaagcagagagggccaggcatggtggctcacgcctgtggtcccggcactttgggaggctgaggcggatggatctcttgaggccaggaattcaagaccagcctggccaacatggtgaaaccccatccctactaaaaatggaaaaattaactgggcatggtggtacacacctgtagtcccagctacttgggaggctgaagcaggagaatcgcttgaacccaggaggtggaagttgcagtgagccgagatcacgccaccgcactccagcctgggcagcagagtgagcccctgtcacaaaaaaaaataaaaaaagaaagaacagataaactgaagcatgaaacatgattttttttttttttgagacagagtctcactctgtctccaggctgaagttcagtggcacgatctcagctcactgcaacctctgccttccgagtttaagcaattctcctgccccagccttctaagtagctgggattacaggtgtgcaccaccatacccagctaatttttgtatttttagtagagacggggtttcaccatgttggtcaggatggtctcaatctcctgacctcgtgatctgcctgcctcagcctcccaaagtgaaacatgatctcttagtgatgctgagaagggtataaatgcagttttcccattgatataattacactataaagaataaaacctcacaaggtcctttatactttgtttcctgatttttttcctgccacacctttacaggtgtcaccaccagagaaggatgatggccagaaaggtgaagaagctgtcggtagcacagagcatcctgaggaagtcacaacccaagcggaagctgcaattgaagagggggaggtggagacagaaggggaagcagcagtggaaggggaagaggaggctgtgtcctatggagatgctgaaagcgaagaggaatattactatacagaaacttcatccccggaagggcaaatcagtgctgcagatacgacttacccgtatttcagtcctcctcaggaactgcctggagaggaggcatacgatagtgttagcggggaggctggtctccaaggcttccagcaagaggccaccggtccaccagaatccagagaaaggagggtcacctccccagagccatcccacggagtcttaggcccgtcggagcaaatgggccaggtcacctctgggccagcagtgggcagattggtgagtagccctgacttctgttttgtgccagtgtcgcacggcccacggggtttgtcaccctatgtgaggaacttgggaatacattataaatacaaattgcaatccctgttagaaatgtcttagcaaggctgggtgcggtggctcacgcctgtaatcccagcactttgggaggcgaaggtgggtgggtcacctgaggtcaggagttcgagaccagcctggccaacgtggtgaaatcctgtctctactaaatatgcaaaaattaggcaggcgtggtggcgcacgcctgtaatcccagctactcaggaggctgaggtgggagaattgcttgaacccgagaggcggaggctgcagtgagccaagatcccaccattgcactatagcctgggcaacagagtgagaccttgtctcaaaaaaaaaaaaaaaaagaaaagaaatttcttagcaagcttaggtctcaggattcacggtcaaatgctgagagatcctggactctgcttcagtctgcccaagcccaaggctgggggcctccatagccgccatccacgtaagggcatccaagttcccaggcttccagagcagcattgtccaatacggtccatcagtcacatgtggctacagagagctctccaaatgtgactagcgagctggaggaatggagcttttaactgtttaagattctaatttccatttaaatagccacctgttgccagtggctgccataatgaatagtgcagttctagataaaaacaatgacaatagctgcgttcttatattttttcatcaattttctttaaacaatcacaaagttacagaaaaaaatggagtacaataaaaaggatcttttattttcttaaacactggagagtgggttgcggatctggtcaccaaagccttcgaacgcttctgtatgtttcccacaaacagctgggacacaaccatcaaaatctagaaattgggtcgggcatggtggtgcacgcctgtaatcccagcacttcgggaggccaaggcgggtggatcacttgaggccaggagttcgataccagcctggccaacatggtgaaaccccatctctactaaaaatacaaaaattagctggacgtggtggtgcacacctgtaatcccagctactcgggaggctgaggcaggagaatcacttgaactggagaggcaggggttgccgtcagccgagatcgcacccctgtactcctgcatgggcgacagagcgagactctgtctcaaaaaaaaaaaaaaattctggaaattgccttgctccatttccaaggaatgctcaggcctcattcagggttcaccaaatgtcccaatgatgtcttttgtagcaaagagattcagttcagaatcaaatgttgccttgagtgctcatatttctgtagtctcctcagtctttccttgacaaccttgacccttgtgaaggtcataggccagctgtcttgtagagcgcccctcagcctggatttgccccgtgtttcctcatgatggggttagggtcatgaggctttagtgggactatcacggaagcgacgtggggctctcagtgcgtcccaccagggatgcaggattccagcttccaccattcctgatgatgttcacttctgtcaccaaatttaaaagcaccaagattcttcattgtgaagcgaccttttactcctttatacttaatgaagattttgtgggaaggtgcttttttcttttttggtttaagataggaaggcgaatactatttagaatgggaaaaaaattgcaacagattccaaccagttattgaggacttcttatatttgcttacaaacgtatacaggtgttatacaacttttggcagatttatccctaagtatttctcttttttttgagatgtagtctcgctctgtcacccaggctggagtgcagtggcatgatcttggttcacagcaacctctgcctcccgggttcaagcaattctcctgcctcagcctcccaagtagctgggactacaggcacacaccaccacacctggctaaaattcggtatttttagtagagatggggtttcaccatgttggccaggctggtctcgaactcctgcccacaaatgatctgcctgccgcagcttcccaaagtgttgggattacaggtgtgagccatcgctcctgcccagtatttcacatttttgatgccattataaatggtttccaattgtctgtggctagcatatagaaatacaattggtttttgtatactcacctgatattctgccacgttgctaaagtccctcactagttagactagcttgtttgtagaatcggtaggctttttcacaaagataatcatctcatctgagaaaaaagacagttaacttcttcctttcccatccagatgccttttctttctttttcttgcctgattgcattggctagaaccgccagcaccatgttgaatagaagcggtgagagcagacctcttgtcttgccctgatcttacaggaaaagcatcagtctttgactgtaaagtgccatgtttgctgtgggtgttgcagatgccctttatcaggttaaggaagttcccttgtattctcggtttgttgtatgttgttgggttgtttttttttttttaatcataaaagggtattgggttttgtcaaatccttttctgtgtctgttaagaagactgtattttcctttttagttagttgatttggtagattacattgattgattttcagatgttcaagcaaccccgcattctgagataaacacagggagccactttggagtgatgtgaatgtcggttcctctttaaactcttggtttatttatattcttacatctgcatagactcagggctctccatgtgattcactgggttataacccattactgtcattatgtattttgatgctcagtttggccagtgagggcccatttaaaccagcctttgtgtgatcggacgcacctccatccttctttgagggctttcttgctttctgccatagactgcccagccttagaatcagacatttctccaggagccctgtttctgttagtggaaaatagaatttagaagttatcacttgggtgctggggtcctcattgatgctggggtgtcactgtccccaggacctctcagcggcaggagatagggcctgtgtgcgtgtactgtacgtacttcccccacatttatacatacaccatgtacacagacattcgctcacatctatatttattggaacacacccctgcggccggccttggctcacacccctgcggccggccttggctcacaacagaacctctaattccatctcacctccataaggagtccctcctggttttctcctcttccttttttttttttttttttttgaaacagagtcttgcccaggtagctgggactgcaagcactcaccatcacgcccggctaatttttgtattttttgtacaagggggcgtcttaccatgatacccaggctggtctcgaactcctgggctcagtcaatcctccctcctcaacctcccaaagtgctgggattacaggcatgagccaccacgcccggcctcctcttccatatttgtagctcctttctccaacagggagaagcctggccccatgatccttactgtattcactgatgtggtcaatcctcctggatgtaacctgtctcccacttttactgccttggctgccccctactcccagcataccttaggtttcaattgttctgcgaggggagatgggagtatggaagggaggcagggaaagaggatgctttatacttcttagcactgactatgggatagacactgttctgtgttgtcttagaatcctgacaaccctacgaggtaggaactatgattgtgcccattgtacagatgaggaaactgagaggtgcaaggtcattgcatagtcacccagctgttgcggcaaacggtagctcttgcttcaaagccaccgttctgaaccacaaggcacccatccctcctactcccctaccctgggaaacccgaaagagtttctaaaagtcactttggagaacagcatgattcagtatttggtgagccctaattaagttttatgatcacaagtgacaaatataaaaccaaaaccaaaatcttattttaagaatttatcaacaacaacaggccaggcctagtggctcatggctgtgatcccagcactttgggaggccgatgcaggcggatcacttgaggccaggagttcgagaccagcttaaccaacatggcgagaccccatctctactaaaaatacaaaaattagccgggtgtgttggtgcacacctgtagtcccagctacttaggaggctgaggcacaagaatcgcttgagcttgggagtcagagattgcatgagccaagatcatgccactgcactccagcctgggagacagagcgagaccccatctcaaaaacaaaacaaaacaaacaaacaaaaaaaaaaatatatatatatatatatatatctcaacaacagcaaaaccagtgtcttcacctttgtttaagtgaagtctaggtcacttgttgctctgtaaacccgattttcatccttgggcctagtttctagaaaatacactgggaagtagttttcaaatatgattgaagaaagggcagggacagcccctgagcgagccttgcttcccacctcccactggctctcagtctttgggacagtgtgagtggagcttgtgtccagttgtgcacacggacacccggaaacctctcattaggagaagccactgctgcgcaccctggagatgggttttgaccctgggctcccgttaatgttgttgtggctccagatgcctcagaaataacttccagagtcaacaccatctgcggaagtgccgtgagacggtgcatgggctggagacagagacagccggcgccgaacatacctggggctgcccgtgcaaactggggcaagcccttcagcctccatgtggctgctttactatggagaacagaaatgactagaacctgacttgtggggttatggcgagggtggcatgagatgagctttgtaacaatgtgttgtttatgggcagcaaaaccctgactcattgtctgggttactaatatccaagagttcatcatcagcgataattattgtcaatagtcgtaactgcaaaagtctcttttaaagctaaaatggatgccgggcacagtggctgtaatcccaacactttgcgaggccgaggcgggtggatcacttgaggtcaggagttcgagaccggcctgggtaacatggcaaaaccccgtctctactaaaagtgcaaaaattagccaggtgtggtggcaggtgcctgtaatcccagctactcaggaggctgaggcaagagaatcacttgaacccaggaggcggagtttgcagtgagccgagatggtgccactgcactccagcctgggcgacagagcgagagtccatctcaaaaacaacaacaactacaaaaaacgctgaaaaacagagctggggaaaggcattaaggggagggcttctcataacaaaaactatcacaaaagactctgcaaaccccacaatgttgcacaaagatcatcataacctttcaaaaaaaaaaaaaacacttctgctaggacagctgccagcaactgcctgtcgaaacttggactgatgccaccctgttattgatccttacagccaaggagaattatcgcaaaacaattatgtaatcctcctcatttttcctgtgtcaactttcatcttcctttacctccccaaatacaaacataatttactatgacacccgtattcccattgcaatgccctatccccaaataaatgtcattttcctttacagaacctctctctgtttgttatttaggatgatacattgctcaaaatttaacatgattgttaaagtaataggaaatcacttggatataaaaatcatcatttgacttttgcaaatgtccaaaatggaaaacatctaactctcccccgcccagggaattcagaagtggttcccccagctcacacctgtaatcccagcactttgggaggccaaagcggaaaggctgaatgaggccaggaatttgagaccagcctaggaatcatagcaagaccctacctctaagtaaaatattaaaaaattagaccagtgtggtggtgtgcacctgtaatcccagctactctggaggctaaggagggaggatcaccggagcccagaagttgggggttgcagtgagctatgattgcagcactgcacgccagtctaggtggcagagtgagacccttactcaataataataataataataataataaaagagtggtttctgcgtgtctgcatctgtagctaagtgtaaacacccaggcacgagaatgcatgggtcctgggatcttttgctcccacatgctgagcgcctcgaggatgggaaaccacaactctgagcaccctcttcatgaaagcatgcggaaaagcctcggctcctggccagggtctcccaagaggactgtttcctcttctctcctttcaaaccagccccctttagggaaatttcaataagaaaatgtcttcccttcataaaaacacctggctcgattttaactttatttatttatttatttttgagaaggggtcttgctctgttgcccaggctggagtgcagtgctgtgatctctgctcactgcaacctctgcctcccgggttcaagcaattctccctcctcagcctcccaagtagctgggattacaggtgcccgccaccgcacccagctaatttttgtatttctggtagagacggggtttcgccatgttggccaggctggtctcgaactcctggcctcaagcgatccacccgccttggcctcccaaagtgctgggagttacaggcatgagccacgtgcccggccaggttttttaaaaaacacacaggtgactatattttgagtctgacaactttcacaaatgtaatgagttaaaattgaataacttctcagtggcaattaagccctgttgacttagttttggttgttcttgccatagacaggatccacagaggagccccaggggcaggtgctcccaatgggcgtccagcaccgcttccggctgagccacgggagcgacatcgagtcctcagacctggaggagttcgtctcgcaggagccaggtgccacccacctgctgaggtcaccctgccctggcgatgagccacctgcacaggcccttctgtgcaagggatgccactcgtttgtcatccgttacctgtttcctgagtggctgtgagctgaaagagaaaaatcttattaacagatatggataacatttattgggcatttactgttttatctcatttaatcctaacagtgaccgatgaagtaggaatccttctccatttaacagacaggttccctaaggccattaaggaactggtccgattaagtgacagaacgcggccttcaccaagattcagtgacgcccagccccatcccctgacagccatttctcacgggctcctggtctcagagcgagacgtgccgtgacagcaaccccaggcctgaatctgtctgctggctttcaaaggctttccagaacccctgtcttcttacgtagtcccagtatcccagtgttgtggacgtgggagggcagatcaggcagttgcaaattccctgtggtaccgacctgcagccggtccaaacctttcattacttgcaaatgacatgaaaacagcacgtgtctaaattagtaaaaaaacaagccgggcgcggtggctcacgcctggaatcccagccaaggccggtggatcacctgaggtcaggtgttcgagaccagtctggccaacatggtgaaacccctgtctctactaaaaatacaaaaattaccgggcgtggtggcgggtgcctgtaatccccagctgctcgggaggctgaggcaggagaatcgcttgaaccccggaggtggaggttgcagtgagccgagatcacgccactgcactccagcctgggcaacagagcaagactctgtctggggataaaaaatattgtatccaatccactagttaagtggccacctttctgttcactctttatgtgtaaagaaagcctctcaaaaataatttccttcctgcctacctttaaaacgggacgctttctctgggatgcattgagtcagggaatagaagatggggtgaatgatgtttctgacccacagaccgttgggatgcttttgctgtcactttcccatcatgctgcatgaggcatgacagcagctgtgccattgatgccccagaatagaatcactgaggcttctctccagcagctcctcaatggtgtcgctgtctctccccccagtgatccccccaggggtgcccgatgcccaccccagggaaggagacctgccagtgttccaggaccagatccagcagcccagcaccgaggagggggccatggcagagagagtggagtccgaggggagtgacgaggaagcagaagacgaagggtcccagctggtggttttggacccagaccacgtaaggaagccttcccaggttttgcttttgcctacatggatggcgaatgactcaggcccctttctctgcctgcactgtctcccactcctgaccctaaatgctgtacttgtatctcgcctgttcactgcaccgtttattggcactgattgacctgcctcttcgtagggtactctcctctgaggttggtataggtgaggcctgtgtttctcaaccccggaaccactgccccgtggggccgggtcattctgtgctgtgccttgcatggtgtggaacagcatccccgagctccccctgctacatgccaggagcaccacccccccgccttggttgtgatcatcaaaaatgtctccaggctggacgtggtagctcatgcctgtaatcccagcactttgggaggccaaggtctgtggatcacctgaggtcaggagttcgagaccagcctggccaacatggtgaaaccccatctctactaaaaatacaaaaaaaaaaaaaaattagctgggcatggtggtgagcacctgtaatccctgttactcaggaggctgaggcaggagaatcgcttaaacccaagaggcggaggttgcatgcagacagccaagatggcaccagtgcactccagcctgggcaataagagcgaaactctgtctcaaaaaaaaaaaaaaaaaaatgtctccagtcattgccaaatgttggcggtgtggggcccatcttcgcagccactgccttgagggcaccaattggatcgcagctccctgccccacccactggcaaggggaaaaggcagatgttgatttcatttacccatcaggacagctgcagagctccaggaactgccggaaggagctgggggctgcacagggaggttctctccccagaccactgctccaccccaccctctggccccagctcaccatcattttgccaaaatatgcactcagttctctgcaagtgcctcagatgagaccatgaggtgcctttaatttgtggcttccagagtaagaatcccaagcagaagcagggagcactccacacggaagtcgtctctggcccaccggagggagacctgtggccacctgggctgagccctgggtcgggcaggagggtaaccagaaaggtaaccacctgtggttttccattgttctagcccctgatggtaagattccaggctgccctgaagaactacctgaaccgacagatcgaaaagttgaagctggacctccaagagctggtgtgtatccgtccagtctcccaccctggtcggatgcctgcgtcctggtgaccctgtttctctctttggtccaggttgtggctaccaagcagagccgagcccagcggcaggagctgggggtgaatctctatgaggtgcagcagcacctggtacacctgcagaagctgctggagaagagtcacgaccgccacgcaatggcctcgagcgagcgcaggcagaaggaggaggagctgcaggccgcccgcgctctctacaccaagacctgcgcagccgccaacgaggagcgcaaaaagtgtaaggcaacccggcagccccacacgccatccggtcctggagggtttcccaggggtgtctccatgtaccatggccaggcatctagaaaagtaagatgtgtgtgcatcctggaggggttcccaccctttttaggaggggaaggcacataaatcaaatgtctttttgttgttgtttttttgagatggagtctcactctgtcacccaggctggagtgcaatggcgcgatcttggctcactgcaacctcccccttccgggatcaagccagtctcctggctgagcctcccaagtagctggtattacaggcacctgccaccatgcctggctattttttgtatttttagtagagacggggtttcaccatgttggccaggctggtctcgaactcctgacctcaggtgattcgcctgcctcggcctcccaaaatgctgggattacaggcatgagacactgcacccggttataaatatgttaaatggcacctgtcaggacaaagcagcaaatgctgaagctgctaacagccagagcgtagagattcaaaactgggagagatgggtgagctgcagaggtcccaggatagatgagaccaggaggcgagagcagaccgggggtgatggagggtttcaatagatgcgaatgcgagggtgaggccggcacgacggtcagaccatggcccagggcctgaccgccgtaggatgtgtgcggcaggtcagtgggtagctttgaatcagatgagacagtgggggctacagcacgtgctatgcaacattaccgataaagcaacgtccttgcacagagctggtcatgtaggtgaccggggacagtggcttcctcttgtgactacggagtatttcagtctttatgctttttgatgttttcaactttctcaatcaactgtgtattactcttataatggggaaatgacctacacaaacctggaggaaaacagaagcacatggctatcccagctgttctggaaagaaacattttaaaccctgagaaaagtggaagaggttctggaaatttcagagttagggtaagtgggcacttatcaagcacctctcttggctgggcgcagtggctcacgcctgtaatcctagcactttgggaggccgaggcgggcggatcacgaggtcaggagatcgagaccatcccggctaaaacggtgaaaccccgtctctactaaaaatacaaaaaattagccgggcgtagtggcgggcgcctgtagtcccagctacttgggaggctgaggcaggagaatggcgtgaacctgggagtcggagcttgcagtgagccgagatcccgccactgcactccagcctgggcgacagagcgagactccgtctcaaaaaaaaaaaaaaaaaaaaaaaaaagaaaaaagaacctctctccagttagcatcaaatgaacagaaaacagtaaaaggaaagaaagtgacatccacactgaactgaaagagccacatcctccagaagtaaccaaatttacacccacctgaaggaggacgcgtgcccctaactgctccccacacctgcagtgaggctggagccgtggagctggtgtggagcgccctccggctcccctctgctagggcttaaagagtgggtgggattccaaaaagatccaaacactctggtggactctgcttcctggagattaggagagggccagagccgaggctcttcaacccagcaaggcctgcgtcaaacagcaccgtctctgccttctcagaactgaagaatttgggcaacggtcccggccctgaccggggggcagccaccactgcacagtcccttaggtgagacgtgggtcctggcccctggagaaagcccacggtcacctgcctcatctgggagggagactgtattagggttgtctagagggacagaactaacaggatagatatatagagaaaggagagtttattcagtattgacacaggatcacaaggtcccacaataggccgtctgcaggctgaggagcaaggagagccggtctgagttccaaaaatgaagaacctggagtccagtgttcaagggcaggaagcatccagcacaggagaaagatgtaggctgggaggctacaccagtctctcttttcacatttttctgcctgcttacactctagccgcactgtcagctgatgagatggtgcccacccagattgggggtgggtctgccttttcccaggccactgactcaaatgttaatctcctttggcaacaccctcacagacacacccaggatcaatactttgtatccttcaatccaatcaagttgacactcagtattaaccatcaccgacactaaaccttcacaccaaaatgagttaccaacccgagatccccagacctgagaggagactgagccggacagacaggcaaacccagccctgattctaaaaacagagcatgcggaggcaccaactggtagtctcatgagattttagaggacgttgtatccgtaaagagaacaaagtgttaggaagaggggtacgtgaaatttaaaaatataatcatcatcccagagtgtgcagaggcgccaactggtagtctcatgagattttagaggacattgcatccataaagagaacaaagtgttaggaaaaggggtacgtgaaatttaaaaatataatcatcatccccccaaaaggcactaactagacaaatgaatgcagttgaaaactgaatttcttaactaaaaagccagttcgaggaaccttccctggaaatagagcaaaaccccaaatgattgatatcttgaggaggaggtaaaagacatggacgacagattagggaaatcgaatcagtgtccgaaagggagatttcaggagatgagaggcaatagccaatgtccaggagaacagatgcgtgagttcaggaaagacgaatctgcagatagaaagactcgtgacgggccatgcagctgaaagagaaaataaacctccgcagacatagctggtgggatttccaaataccacggcaaaagaaaaaatgctgcaggcttccaggcgggaaaacccagatggcctcttgaggccgggcctgggctacgctttcatcaaggcctccatcagctgcgccttggaggaaccagggagagctcaaaaccaccaggacctatcccagcccagatttcagattggtttgttctgggaaggaccaggcattgtttgtttctggctttctttttgacccttaagcttccagatgatgctaacttgcagccagggctgagaatcacagatcttaaatttaaatagcaggatgtcaatgcatacagaattcagaattctcttttttgtgttttttgtttgtttgtttgtttgttgagatggagtctctctctgtcgcccaggctggagtgcagtggcgtgatctcagctcactgcaacctccacctcccgggttcaagcgattctcctgcttcagcctcccaagtagctgggactacaggggcccgccaccatgcctggctaatttttgtatttttgtagataacggggtttcaccatgttggtcaggctggtcttgaacccctgacctcgtgatccgcccaccttggcctcccaatgcatacagaattctaagggagaaggatggttagcatttgacctacatgtcagttagactctggaaattaacaacaacgggaagtccacgcatgaagacttctggctgcagccaaatctgctcagacaaaacccatgacagagtttatttacatttccacaaacaagcctgaaaacagacattctattcgagaagctaaaaagagggaaataaactgaaagaagcagaaaaataaaccaataaagatcaaaagcagaagctgatgaaataaataaaaaatgaattgacttgataaataaactgctttttttttaaatgaccaataaaccttacacactgctggcttatctggcaataaaaaggagatcatgcaagtaacagtgttgggaatgaggacaacttgggggagggttttttttgttttgttttttgtttttaattgcaagaaagctatgcattgtactggtttcatcatgcaagaaattgaaaatgtcaaaaatctgttttccctaaatgcaccagtattggaagatgttatggaaggcttctagtaacctttcaaggaacaaacacttcctgtgttatcaaagctccagggcatggaagattccggaaactccccacaggctggtcctgcaatgcttagtgaaaggctggctgcaaacgctgacagcatacaagcaggaaactgtaaagcggccccacatgtgaggagtgaaaatcctgaacaaaatgttagcaaaaataagtaggatttacttccagaattcacacaggaataattcacaattaggaaatctactaattttgtgcattatatttataaattaaagaatggaggccggatgtggtggctcacgcctgtaatcccagcactttgggaggccgaggcgggcagattacctgaggtcaggagttcgagaccagcctggccaacgtggtgaaaccctgtttctactaaaagtacaaaaaattagccaggtgtggtggcaggcacctgtaatcccagctactcaggaggttgagacaggagaattgcttgagcccaggagacagaggttgcagtgagccgagactgtgccactgcactccatcctggccaacagagtgagacactgtctcaaaaaaaaaaaataaataaatcaaataaaacaaaatacaaggataaaaaaaaaaggcttcctgggtgggtgccaaatgggtatttaataaaactcatcatccatcccaaagtaggatagaaggagagttctaagtatttatcagaaactaacaagaaaatgttacccagtggaaagactagacttaaaatcaggaatgagatgaggaggcctgctagcatagcagttaccccagactgttttggaggctccagcaacgcaaagaaaacaagagaaagaaatgagatatggatctgggaatgaaatactgaaattctcaacctctactaatgaaaaataaaagccaatagaaacagtaagaaatcaataaagtagctggataccagctctgtagttttcttctacaccagtaatatagttaggaattacaatttttaaaaaagctcattcataatagctataacaacttttaaataagtccaggaagaaatccaacaaggaatgatgagcctgtctgaaaaaaaacaataaatgttatgaaaggtcataaaacagatttaaataaatggagtgcccacgttaccagctgggaagacgcatgatataaaaatgccatttccctccaaattagcaataaaaccattgcaattcccgttaccctccgtggtgagatgttttgggtgaacttaaatttattcaacataattatttacttattttggaaaagtaatgattcaaaatgcaagagctctacaactaagaggaagttttcgtctcttttccccttcccccacccagccaccagggccctccgcagaggcaacgtagattcttgtggattctttttgtttttgttttcttcgagacagcgagacgcatcttgctctgtttcccaggctggaatgcaatggcagagtagcctcgaactcccagccttaagtgatcctcacacctcagcttcccaagtagctgggactacacacacaccaccaggcctggctaattttcatatatatatatatatatatatatatatatatatatttttttttttttttggtagaaacagggtcttactgtgttgcccaggctggtctccaattcctgggctcaagtgatcctcttgcttcggcctcccaaagtcctgggattacaggcataagccactgtgttcagcccttgtggagtcttttggagattttttgcatatctaagcaaagtcacaagggtgtgtgtgtatgtgtatctctctctctctctttaacttaaatggctgcatattatacccactgctcggttcctcgcttgctgtcccttagcaacacgtgctgcggatattccacctcaaaacaaaaagcacctcgggccaggtgcggaggctcacgcctgtagtgttgacactttgggaggctgaggctggcagatcgtttgagctcaggagttcaagaccagcctgggcaatgcggcaaaaccccatctctacaaaaaatacaaaaatgagaaattggccgggcatggtggcatgtgcctggagtcccagctacttggggggctgaggtgaacccaggaggttgaagctgcggtgagctatgattgtgcgactgcactccagcctgggtgacaaagtgacaccctgtctcagaaaacaacaagaacaacaacactttattctcaacaaattgattttaaagttcatttagaagactaaatgcacaaaaatatccaagacaattttgaaaaggaaggataatgaaagaaatatttaagaataataacaagtccttagccaggcctggtggctcacgcctgtaatcccagcactttgggaggccgaggcaagcggatcacaaggtcaggagatcgagaccatcctggctaacatggtgaaaccccatctctactaaaaaaaaaaatacaattactcgggcgtggtggcgggcacctgtggtcccagctactcaggagactgaggcagaagaatggcgtgaacccgggacgcagagcttgcagtgagccgagatcaccactgcactccagcctgggcgacagagtgagactctgtctcaaaaaaaaaaaaaagaagaatagcaagtcctcaaagagaacttagaggaaattactttggaatttagctactgcaagctatattaatgcacaggttgctttttttttgagacagagtctcactttgtcacccaggctgtagtgcagtggcatgatcctcccacctcagcctcctgagtagttgggattacggacgtgcaccaacacatcctgttaatttttgtattttgagtagagacagggtttcaccatgttggctagactggtcttgaactcctggcctcaagtgatccgcccacctcggcctctcaaagtgctggggttacaggcgtgagccaccacacccagccaaaatggctttgcaagtttaagctgtatccttcgagcacacctggctccaggatgatatgcgtccagcagccttttggcctgtaattcagttttctgtttggatccagccactgaaagggagtgctctgtgcagtgagcaagcaagtactgacccacgtgtagctccctcaataaatttgcactccagctttagaaatccatctcatggccgggcgcggtggctcatgcctgtaatcccagcactttgggaggccaaggtgggtggatcaggaggttaggagatggagattatcctggctaacatggtgaaaccccgtctctactaaaaatacaaaaaattagccgggcgtggtggcgggcgcctgtagtcccagctactcgggaggctgaggcaggagaatggcgtgaaccctgggggcggagcttgcagtgagtcgagatcgcgccactgcactccagcctgggcgacagagcgagatttcgtctcaaaaaaaaaaaaagaaatccatctcatgcaagttttgttaaaggaatcagttcctcgggccttggcctcctctgagagcactgacataaatctgtcacttaacttgggacaggatggaagctgctgcctcttctagcctcgtcctctctggcctgcactgctgtgcagcggtgtcagtgcaggggcatctgtggagctcagcctgccctggatgttctcgtctcctcccaggggacttaagactccacctaaggttgccagcctttcagtggtaagacatctatgcaatcaacccgaagccttaccacctggcactacttcagtgtatccttagactaccaggaggatctctgagacttggtggggaatggaacagcttgctgcaatttgtggatgtagattccgtatatttttgtctcttccaagagactgtaaactctttgctgacaaagtctgtgtcttgatagtttaaaagcagtttcccagtcttacccaaaaatggcaggaagggtgcccagaacggctgttccctgcttcctcctgggtctctgcatgggggacgctgggacagcctccccactcactctctctctctttctcccccgccgcgccccgcagtggcggctctgcagactgagatggagaacttggccctgcatctcttctacatgcagaacatcgaccaggacatgcgtgacgacatccgcgtgatgacacaagtggtaaagaaggccgagacggagaggatccgggcagaaatcgagaagaaaaagcaggtattctgcaaactcgacacatgtttaatgatcaccagaccgtggagcttcaaaaaggggctcagctttgcctcctgcgtgaaggcttccggccggaggggtggcggccggcctgggtggcgtcaacttgtatcaagggttggtggagaacaggccctcagccacgggcacctcctgacggggctgcttctcatcctgtttcccaggacctgtatgtggaccagctcaccactcgagcccagcaactggaagaagacattgccctgtttgaggctcagtacttggcccaagctgaggacacccggattttaaggaaagcagtgagtgaggtaaaagcagtccccgcagctctcagtgttcgaccctccagtgagtgtccacgcacagggtgctggtgggtctactagactgcacctgcccgtctgctggatgagtgactgcagccagcttacatctgcaaacatcgggccctccccatggtggggccacagtagatactgacaggtggacagcccggattcctattccttccctggctagtgggtgacagaaggcctcgcagggttcaggtactctagtcgcttcatgaccgccaaggccagcttgctgcggggatgctcagcaagttccttagcctgcagggacctcttccggggaggactgaagtctttctaacaattctcacccccgtgggcagccggccttccgggtagctcctacatctctgcacctcgtggagtagggagtggagggaacgaagggggtgaaagctgctccctcttggccccagattcaggtctgtagtggtagcaccagaaaccaaagttactgcaacttaaaaaaaaaaaaaaaaaaactatgagtcaccatcttcattcacgggtgcgggaatgacacggaggaaacaattaactttttttttttttgagacagagtctcgctctgtcgcccaggctggagtgcagtggcacaatctcagctcactgcaacctccgcctcccagattcaagcaattctcctgcctcagcctccagagtggctgggactacaggcgcccacctccatgcccagctaatttttgtatttttagtaaaaacagggtttcaccatgttggccaggttggtctcaaactcctgacctcaggtgatccacccacctcggcctcccaaagtcctgggattacagtcatgagccaccgtgcccagccaatgaaaaagaaggaagaggacttgaaggaacggatgagcacgctgggctcccagggtaaagggagggcccggggctgggcgttactcagcactggtctctccagctacaaatgcaattaaagtagagcacgtcccaatcagaatctcaggaacaaacaatcccttagttaacaaaacaattctggagttttatctgaaaaataaattaggaaggctagccaagaatggttttggaagagaagattcaaacggggcaagcagccatcccagtctgctcaggactgaggggtccccaagacaagggactttccatgctaagcccagggggtcctggacacagcaggatggcagatcaccctagcatcgccgcaccaaatattaaagtatacagtaaagctctggccaggcaaggtggtgcacacctgtaatcccagcacttggggaggctgaggcaagaggatggcttgagcccagaagttcaagaccagactgggcaacatggtgagaccctgtctccacaaaaaaataataattaaaaaaaaataaaacattagcccaccatggtggtgtgcacctgtggtcccagctactcaggaggctgaggcaggaggatcacttaagcccgggaggtcaaaaaaaaaaaaagaacaacaacactttattctcaacgaattgattttaaagttcacttagaagactaaatgctcaagaatacccaagaaaattttgaaaaggaaggatcatgaaagatccttgaactatgaaagatccaatgaaatatgatcataccactgcactccagcctgggctacggagcaagaccctgtctaaaataaaacaaaaccgtaaagttctagaggctaaaataatgtgtcacaagatagacaggcaagacattgaagcctatgagagagccccaaagcaagccagagtttatataaaaacctagtagattataaattaccagagagctaatgaattatgcatccaatgatgtcgggacatttggttaatcatttgggaaaaaattaaatcttttcctcataccagacactaaaataaattccagatggaatcaagtatttaaatgggggaaaatgtgccagacgaaaacaaatgaaaatatttatataatcctgggctggggaggcctttcaaagtataacaccaaaagcaggaaccttaaaggaaaagactaggaggggccgggtaaggtggctcacgcctgtaatcccagcactttgggaggccgaggccgctggatcacctgaggtcaggagttcgagaccagcctggcccgcatggcaaaaccccatctctactgaaaatacaaaaattagctgggcgtggtggtacacgcctgtaatgccagctacttgggaggctgaggcaggagaatcgcttgaacccaggaggcagaagttgcagtgagccgagatcatgccattgcatttcagcctgggcgacagagccagaatccatctcaaaaaacaaaacaaaacaaaagactaggaggacaatcacaccctcaataaaacctttgtagattaaggacgccacaaaccagatgaaggcggggagacaggcaggagaagacaactcgcagccattagtaaatccggggttgtgaagagaggctgaaagccaaggagactcgccctgtgtgcttccacaccctggaggcaggtgggctacttggtagatgcttccttttgcacctcccgccctcccctcgatgcaacttccccagggaagggggccgcccgcacttccttcatttctcatttccagtacccagaacagtgcgggggcaacagcagggcccctgttcatcgagcgaagtcacaagtaaccaaaggacagggagtcccctacagagttggcaaagataaggagagatgagccctccctgctgtcggccatgaaaatacagattggcctttatctttatcaagatcttcatccagggcgatatgatcatatgcagccactccctccctaaccctaaccctaaccccgcaccctgttagtgcttagactccattccaaggaacctagcaaagacctatgcagataacatttttgtatgttaaaaatgataaagccaggcttggtggggtgcacctgtagtcccagctactcaggaggctgaagcaggaggagcacttgtgcccaggaagtcagggctgcagtgagctatgattgcaccactgcactccagcctgggtgacagagtgaaacccccgtctctaaagaaataaatacagtgaatagagactcatgggggagatgacgctcatcaccgtgttgtgtcatcagaaagaaagaccccaagaagaggacattagtgaaacccattttcatacacctgtgcatcagaatacactacaccaaaaagagctctactgacatggaaacctgtctcgatattaatttcttattttaattttttttaaattatactttaagttttagggtacacgtgcacgatgtgcaggtttgttacatatgtatacatgtgccatgctggtgtgctgcacccattaactcgtcatttagcattaggtatatctcctaatgctatctctcccccctccccccaccccacaacaggccccgttgtgtgacgttccccttcctgtgtccatgtgttctcattgttcaattcccacctatgagtgagaacatgcggtgtttgggtttttgtccttgcaatagtttgctgagaatgatggtagagactaagtctcactctgtcccccaggctggagtgcactggggccctcatggctcactgtagcctcaaacttctgggtccaagcaatcctcccacctcagcctctcaagtaggtaggactataagcacatgccaccacaccgtgctaatttttttattatgattattctttttgtagagacggtgtttctttttgttgcccagactggttgggaactcctggcctcaagtaatccccccgcctcagcctcccaaagtgctgggattacgggcatgagccaccgcacctggcacaatacattaatttttaatatggcggggcatggtggctcacacctgtaatcccagcactttgtgagaccgaggtcggcagatcacctgagggtcaggagttcgagaccagcctggccaacatggtgaaaccccgtctctactaaaaattcaaaaattagccaggcgtggtggcgagtgcctataatcgcagctgttcgggagactgagacaggagaattgcttgaactcaggaggcggaaattgcagtgagccaagatcgtgccattttgctccagcctgggtgacgagagtaaaagtgtctcaaaaaaaaaaattaataggagattatgaaacaatatatagaatttgatttcgcacacacacacaatcacaggtgtaagaagttagaaatggttatctctaagtgttagggttattgaattttcattttctttttgcttatttgcacattctatttgcataggctgaacacttgcctttgtgaaaaactggggtctaaatgcacaggtgactgagcccggcagccatctttccatccttatgccttgacctgcacctcagtcaaccaggctgtggccggcagcctcaggggcaccatggggaggcctcgcacaggctcagtttaaggtgcatcctggctgaatttgggtccccacctgctgcctgggccagctcccactgcccaatggcacagagcagcctccttagtgaataacttacccccatacaaaactgtgacccagcagtcccacgactgggcatttatccaaaggaaagggaatccgtgcatccaatagacacctgcacccccatggccaggctggtctcggacccctgacctcaggtgatccgtccgccttgacctcccaaagtgctggggttacaggcatgagccgccgcacctggcccagtcaacaataatttattgtacattttcagatagctagaagagagggttttgaatgttcccaactcaaagaaataacaattgctggaggtgactgatacgctaattaccttgattcaagcagtacacattgtacatgtgtcgaaatatcactctgtaccccagagatatacagctgtaacatgtcagctaaaataaaaggaaatactacagacaaaagggaagtcagtcccgggatgtacacagtgtcccttcctaggctgcccaataatcctaagtaagcgtctgtgagaggaaaaaaaagtccccctcatcgtggtatacttaattcacaccattttaggttacgtcgtaatgaatagatggttcagaaaccctcacagccaagcatggtgtctccagggcgatggcctctctcatgcccggcgctgccctcggctcccccgtgatgttctagcgcactgtggttcagtcactgtctaccaagcttgcctgggtgtcacggcgtgcaggcacttctgggacttggcgttctacaggacgccccagttggctgactcgggccgccagcttgctcaagtcacagtgcttgcattggggatgactcatcaagaatcccaaacaccactcaaaacaagaccgcgatccaggccgtgctgggcatgcaggcatcaactcacttgacccggcagccccggggtcgctcctgtacccatggaggtgccgctcctgtacccatgtcacagctggggacactgaggcacagcgggtgagattcagcccaggcagccgtaccagccttaacctctgtgccccaagcataaaggaactcccctttcccttggagtaaattcctgaaccacccccctagttttcaagcccctcccctgcatgggccaagcccttactgcaggtggcccctcactgccccccacgatgcccctagacttccagcctccgctcagcctgcctgacctgcccacccctggctgtccagttgtgcctcctcattcccagtctaggcagccctgcttcccccagctggacgagagcatccagccctggccattcttgagacaaacacctccttccatcatggcctccctacaggaagcggtgctgggcccgtcctgtgggacctcagtccgaatcaatgacaccaccaaccctgcagaggtgtttcacggatgctggccaggatcccctcctcctctccctcctcctctccctcttcctctccgtcttccccctccccctcctccctctccccctcctccctctttcatctcctccccctccctctccccctcctccctctttcatctcctccccctccctctcccccttctccctccttcatcttccccctcctccctctcctcccctctccctccttcatcttccccctcctccctcccccttcctccctctcctcccttccctcctcctcctcattcccaagcactgagcaccgcaggccctgagcaaaggctcaaagcgggtacgggttatcttgaaagctacattcaggctcgtgtttacccctctgcagatgcatgatcaaggaaagtaccggtgatagaaggaaaagaggaagatttgggaatgtgaggctctggtgttcttgggctttgctcgcaaatgaaatgagacagccattcctgccccctcccctgttggctgcaggcctgcaccgagatcgacgccatcagcgtggagaagaggcgcatcatgcagcaatgggccagcagcctggtgggcatgaagcaccgcgacgaggcgcacagggcggtgctggaggcgctcaggtactgcagggccacaggcagcgaggatgtgcgggaaccccaggggtccgtggcaggcccgccccacaccccctctctctgggtccaccggatctctgggacagagggtgcaccttgatccccgggtccgggcttccgtccggaaagctccctcattgtttggtaagatttcagcgattcttaaatcctttccaacactgcggcgctgggaggggagaggcttttctgctcagatttcctggcaggattaagtagaaacagagcagggtaaagagaaagctatctttgggaggtaaaggtgtccctttgatttgcagtatcaccacctgagtgcggaaaccccatcccttctcgattgttctgcctgagggctgcattccaaccgaaatcctattttaatctccaaaggaaggggaggaagaggcctcctctgggcatcccctcacttctggggatggatgcgtggctcagggcagggcgttggagacacaggtgctgccttcattcctaaaaccacccagggtgaccaggtctcgggacgcggaaagaaaaagccgggcactgtggtggcacgtgtctcacccgctgagctttaacttcccctccacctttcgtagtctccaccccttgtgcccagcacagagcctggcatacagcaagcgctcaagaaaggctggaccaaggaatgagggtctggctggccccacagcacccgcagccaggcagccagcagcagtcacacaaccaggagatgcttttccttttgggtgctgtgattaaagaaacaaaatgaaaccattttgtttttaaaagtttttagaccaaaacattttcaaatgaataatattggattaaccatactcatttctggccaggcgcagtggctcgcacctgtaatcccaacattttgggaggctgagacgggtgggtcacgaggccaggagttcaagaccagcctggccaagatggtgaaaccccgtctctactaaaaatacaaaaattagccaggcatggtgtgggcgcctgtaatccccgctactcgggagggtgagacagagaactgcttgaattgcggaggttgtagtgagccgagatcacgccactgcactctagcctgggagacagagcaagactctgtctcaaaaaaaataaaaataataataatactcatttccttcactcccttgagtcaacaacataaagccaaagggaacactgtggtttgatacaggcgatgtttggctgaagcttcgtttcccctgtaaagatgcaggtcgaggaaccagagccagctgtggccgggcaagggctcctctccctgtgtcaccagggttgcctgaacaccaggacgagaggacttggccatctgcccacttgggtgtctttttcctcctgccccaatgctaggacttgatacctgactgtttaattacacggctcagctgccacgggccttaagaaaagtcaaggccaggttctctctgagggtccagcacctggcctggctctccgaggctcatggcctgtgaaccctgcagcgtccccaagggaagacgtcacctccgagatggtcctgttgtccagctctcccctgcatcccagactaaccagtgtcctctctgcaaaccgtcctcattgccctcagagacatggcttccttttggttgcaaacattgtaaaaatcgtattcgatcaggtctcctcctcctcggcccgcagtcactagaaccccctcccaagacaagcaaaggcacctggttttctgggatcccctgcctaacttgtgtgcaattgcaagaaagcatatgcgttcacccggagtcttccttccctctcttgctccgtgggagcacaccacactcactgttctgcacctctttgctttttccatttaacagcgtgtccctagagcgcttcccaagtcaaaatataaacaccgctcgttcccgcctttctaccacatggcattccgctgggatacttctacggggaagcttcctgcccggggcatcgagggcgttcgcgtccgtctgttatggcggtgctgctgtagataaccggatccgcgaatgctaacgctcaccaggatgctatatagccttttttatattgcctatcaagcccggaatgtctgggtctagcgggtattgctaagtaggattgtgacagtcacgcccccggcagcggtgtttcaaagtcccctgacagctcagcatgttgtcacacttcaggactgtgccaatccgattgatgaagaaaatagataatcttgttttataaaacgtgcatgcgcagaatgttgagtgaatattttagtggactatgtacacgcacaaacacttcacaacgagtgagagagcctctgacttcacctgcagcttgccacaccaaggccccggggaggagtgaggcccaacttttatttattatatttttgtggttcttgcaatggagtctcgctctgtcccccaggctggagtgcagtggcaccatctctgctcactgcgacctccgcctcctgggttcaagcgattctcctgcctcagcctcccaagtagctgggattacaggcgtgcaccaccacgcctggctaatttttgtatttttagtagagacggggtttcaccatgtgggccaggctgatcttgaacccctacctcaggtgatccacccgtcttggcctcccaaagtgctgggattacaggcgggagccactgcgcccggccagtcttttaaaagtgcaggccgtgtagaacattgtgagaagtataaactgtaattacagagatttgctgtttgcacccagatagatttgaagaagcaacttggagacaggtttaatagatcagggccattattacagaaataaattattgcatagcttaggacttccaagctaggagtgcagtgactgaactatacctcaaatattgaccttgagatgttcagatttgtagagcatcttagaaaatggtgacattcctggctgatggtcaggatggtgcataccaggccggtaccctggtggctgtctgggcatttctggagccttcaccctgcgagatccccatggggcaggaccccctggcccagaagcttggttttgccatcacaccgagaaggcacacttgtcctggagttagtttacatgaatcgagctcaccagagcctgacgtgtaactgagtataatagcccatttatgtgcatgatgaaatataaacaccaaagaaccgaatgctccacgctcggactagcagattcttatctgtgggggaggacacaggagcggatgacacagacccctgctcagggaccggctagagggcggaatgcctgggccccggccctgtctgcttcctgcttcttccccgaagttcatggcctgtccgtccacatgggcgggaggtgtcccgcgagcagccctcaccctgaccttggctgctttctccattccattccccacccctcctccctcctgacacccatggcattttttcagataagttaatacctttgattaggttccagccaaacctcaccctttctctttccccatgcctttgtgtctctcttcgtctgatgtcgagtctacaacctaatgctttgaagacagactgacttccccgtccttggtcagggggttgctgctgcgtggggggggcggtaaccataatcttgcccccgtgtctcatacacaagctgcaagcttagctcagaagctgtgcctgtcttggctgctttttcttgctgtcttccctatttttgcaggagttttgcacacggtcataaaagttcaggagaaacatgaaacgtgttattctgtttcctgtttaagtcgacctgaggaagctgaaggggtcaggcgcggtggctcacgcctgtaatcccagctctttgggaggccgaggcgggcagatcacgagctcaggagctggagattgaaaccatcttggctaacatggtgaaaccccgtctctactaaaaatacaaaaaaacagccagacctggtggcgggcacctgtggtcccagctactcaggaggctgaggcaggagaatcgcctgaacccgggaggtggaggtggcggtgaagcaagatggtgccactgcactccagcctgggtgacagagcgagacttcgtctcaaaaaaataagaaagaaaaagaaaaaaaagagagagagagagacagagagagagagagaaaaaaagaaagaaagaaaagaaaagaaaactgagggcttgccctaatctcctagacttccttttccctcagtcctgatgatggcagagacgactcctcaaaggctcttccccttggcatggagtgctggagcctgccctagggagggaggacaggatggagcaagacactgaacgcagaattagagctaggcaacgagcgggtgatttcactgtttcctgggtaacaagccccaggctcagctcggtctggtgtagcccctcaaaggggacactgtccttgcccccagttgatggaggaggaaggagcggaaggcagtgtgggatgggttgggtgtgggcattgccacagtgtccccagcaggcctccttctagcctggggatctggcaggtgggtcccagtcaccaccaatgccccatatacccaaggacactggtgacccagcagacctgaggccacagaccaaagacagagtaacaaccccattaaaaatgtgcccccatgggcgggcatagtggctcctgcctgtaatcacagtgctttgggagactgaggcaagaggatcccttaagcccaggagttcaagaccagcccgggcaacatagtaaagtaagaccttgtctctaaaataaaatataaaaaatagccaggtgtggtggtgtgtgcctgtggtctcatctacttgggaggcagaagcaggatgatcacttgagtccaggaatttgaggctgcagtgaactgtgattgcacgaatgcactccagcctgggcaacagagcaagaccctgtctctcaaaaaatttttaattagcggggcatggtggtgtgcacctgtagacctgtagtcccacctactcgggaggctgggtgggaggattgcttgagcccaggaggtcgaggctgcagtgagccgagatggtgccactgcactccagcctgggcaacagagccagagcctgtctcaaaaaaataaaaaagtgtccccagacacaggggcatgggtgaggcctgtcaggactgctgtggtagctcatggtgtcctgtcccttcttcccaccagggaatgaccgtggctgtgggcacaccccctgtccatctgggcctgcctgtgggagctggacactgccctccccagcagccagaagtcctgaaggaaccgtgtgtgaccctcaagaccagaccgggcctgccacaccaacccttcaaagaccgcagcggtccaggcaatccaacgtgggtcccaaagctaggtgaataaccacgaggagcccacggtcagccccttcccatcacatacgcagggaaatgggtcactttcactttcagaaaacaaagcctggaccgcacttaacttggaggcagataacctaatcagaattcacacacgcctgggacttggagccaaaagcacccgtgctcttacctgcctttgtcctatttcctggcgggaaatacagagggcagacaggtcttggcccgcagccacagcccctttaccccaagatgtgactcggtcagccacacggcctcacagcctcctcccaggccctcagctgtggccacggcagccaggcaggccgacccaaggacaaaagccacgggcagtgtcctgggagagaacccggccttgaccacaggctgctggacacctcctgtgtcccccccttaatcctcagaggcacggtgcccaatgcctgggccatattccagattccatccgttctttttgtttcatttacagacagtccccgacgtcacgatttttggactttaccatggtattaaagcaacaggcaggcaacagaaactgggctttgagtcccacacaacctccctggttttcagcacggtattcaataaattacatggatgccccacactttattatcaaacaggcttcgtgtgagatgattttgcccacctgtaggctcatgggagtgtcctgagcacgtttgagggaggctgggctgagccggggtgcctggcaggaaatctgcaggaagtgcattttgggtttttcagcttttttttttttttttttttttgagatgaagtttcactcttgtcgcccaggctggagtgcaatggtgcgatctcagctcactgcaacctccacctcctgggttcaagtgattctcctgcctcagcctctcaggtagctgggattacagacatgcaccaccaccatgcccggctgattttgtatttttaaaagagacggggtttcaccatgttggccaggctggtcttgaactcctggcctcaggtgatctgcccccacttggcctctgaaagtgctgggaattacaggcgtgagccacggcaccagcctgcattttggacttaggatattttcaacttacgatgggtttgccgggctgcatccccaccgtaagctgaggagaacctgtactttctattggtgcctgctgatctacggagtttttaaagtacgatttaaaaaaataataatccttatcaaggataagtgattgcgttacaggacatttgaaaaacagagaaaaggatttaaaaataccatcgactttctctttttgtgacaagaagactcattagcatgtcagcacactctcaggcacacatttccccgagtgttaggagttctgttgcacagtttgtaactgtatctttttaaattgggcatcttatttttattgtcaaatttagacatttataaggctgctccttcctaaaaaaagaaaatgagtaacttatttacttgaagtcaggatgactggggataatttatgtacaaaattgcatacctccagccctggcaaccgctgtgccgccttctgtgcctatagctctgccatttctagaatgtcatataaatggaatcgcgcagtctgtagcttttcttgtctggcttcttccacttggcatcatgcttttgagacccacccatgttgcaagatcagtagtctgttcctttttattgttgaatagtattcccttgcacggatacatcagatgtatttgtccatccaccaactgatggacatttggcttttacctttggaataccgtgaagaaagctgctgtggctgtcctgaaaagatctttgcatggagacgtgtttccgtttctcccgggtaaatacaggcgcatctcgtttcagtgtgcctcgctttctcctactgcgtggaatcgcttttgtttgtttgtttgtttgtttgtttgtttgtttttgagatgagtttcactctgtcacccaggctggagtgcagtggggcgatcttggctcactgcaacctccacctcccgggttcaagcaattctcctgcttcagcctccagagtagctgggattacaggcacatgccaccatgccctgctaattttttgtattttttagtagagacggggtttcactgtgttagccaggatgatctcgatctcctgacctcatgatccacccgcctcagcctcccaaagtgctgggattacaggaatcgcattttttacaaattgaaggttgacggcagctccgtgtggagcaagtccaccggcaccatctctccagcggtgcgtgctcacttcctgcctctgcaccacatgttggtcgttctcataatatttcaaactttttcattgtcatcgtccgttatggtgatctgtgatgagtgacctttgatgttaactattgtaattggtttttggcaaagccacgaactgcccttgtttaagacagcaaactgaatcaagacatgtcgtgtgtgtactgactgctcgccggctggcgttcttccatttctgtccctctccttgggcctccctattctccaagactcaacagtattgaaattaggcctacaatggccactaagtgctcaagtgaaaggaagagtctcatgcctctcactttatttttattttatttatttatttttgagacactctgtcccccaggctggagggcagtggcacgatcttggctcattgcaacctctacctcccgggttcaagcgattctcctgccccagcctcccgagtggctgagattgcaggtgcctgccaccgtgcccggctaatttttgtatgttagtagagacagggtttcaccatgttggtctcgaactcctgacgtcaaatgatctgcctgcctcggcctcccaaagtgccgggattacaagtgtgagccaacgctcctggccgcctctcactttaaatcaaaagttagaaatgattaagcttcatgaggaaggcatgtcaaaagctgagataagccaaaagctaggcctcttgcaccaaagggatagccaagttgtgaacacaaaggaaaagtttttgaagaaaatttaaagtgctgctctaatgaacacacaaaagaaagggaagcagcctaattgcgcgtctggagaaagttcaggtggtatggacagaagatcaaaccttccggccgggcgcggtggctcacgcctgtaatcccagcactttggaaggcccaggcaggcggatcacgaggtcaggagatcaagaccatcctggctaacacggtgaaaccccgtctctactaaaaatacaaaaagttatccaggcatggcggcaggtgctgaggcaggagaatcacttgaacccaggaggcggaggttgcagtgagccgagatcgcgccactgcactccagcctgggcaacagagcgagactctgtctcaaaaaagagaatgcacctggtgggcatgctagctcaagtaatctcagcactttgggagggcaaggtgagagaattgcttgaggccaggagttctagaccagcctgggcaacatagcaagagcctgtctctaaaaccgaaaaaaggaaagaaagaaaatgtacctggtcacccaagagttttgatggagctggagctgtgcaagatgaatgttgtttccacacctgtaacacagcatttattctgcaacccatgggttgaggagtaatttcaactttcaagtcttactattgcagtaatacagtctgtaaagctatagctgtcatagatagtgattactctgatggatctgagcaaagtaagttgaaaaccttctggaacagactcaccattctagataacgttaaggatattcgtgattcatgagaggaggtcaaaatattactcttggtttttttgaggtggagtcttgctctgttgcccgggctggagtgctatggtacgatcttggctcactgcagcctctgcctcccggattccagtaattctcttgcctcagacttctgagtagctaggattacaggtccttaccaccacacctggctaattttttatatttttagtagagatggggtttcaaccgtgttggccaggctggtcttgaactcctaacctcaagtgatatgctcacctcagcctcccaaagtgctgggattacaggcatgagccacctcagcctcccaaagtgctgggattacaggcatgagccaccgtgcctggcccaaaatattactttttttttttttttttttgaggtggagcttctcttttgtcgcccaggctggagtgcagtggcacgatctcagctcactgaaaactccacctcccaggttcaagcaattctcctgccttagtctcccaagtggctaagattagaggcacctgccactacgcccaactaattttatttttttaaggttggaattgcttttattggggacagatgtgcaagtccccgctcatggtcaggttagtgttctgcccttgcagaggtgccagcagcctgacacctccatctgccgcccgccccgggttagtggaacatgcaaagctcagagggtggaggcaggggtggtcgctgctgaagccagacgtccagctaatttttgtatttttagtagagacgggttttcaccatgttagctaggctggtctcgaactcctgacctcaggtgatctgcctgcctcggcctcccaaagtgctgagattacaggcctgagccactgcgcccggccccaaaatatcacctttaatggcaaaactgcaattacttttgcaccaacctaatatcaacattaacagaagttgattgtaacgcctgtggatggctttgagggctcaggacttcagcgcagaaagtcactcccgatgtggtggaaacaagaactagaatgagaagtggagctgagatgggatggaattgctgtgttcatatgatcaaactttaatggatgaggagttgcttcttacggatgagcgttttcttgaggtggaatctgctcctgtgaagatgccatgcgcattgttgaaattaacaaagaatttagaatattccataaacttggttgatgaggcagcagcagggtttgagaggactgactccaattttgcaagaaggtcttgcgtgggtaaaatcctatcaaacagcatcacatactacagagaaatctttcataaaagaagagtcgatccatgtggcaatggatgtggcaggaagagtcaatccattgtcttattttaagattgccgtccaggtggggtgactcacacctgtaatcccaacactttgggaggccaaggcaggcagatgacctgagctcaggagtttgagaccagcctgggcaacatggtgagacctcatttctacaaaaaatacaaaaattagccaggtgtggtggtgtgcacttgtagtcccaggtactcgagaggctgagggaggtggtggcttgagcctaggaggctgaatttgcaataagccaagatcacaccactgcactccggcctgggtgacagagccagagtcagagcctgtctcaaaaaaaaaaaaaaaaaattgccacagccaccccagccttcagcaaccaccaccctcatcagtcagcagccagcaacatcaatgcaagaccctctaccagcatactttatcaagtatgacttgataaacacttaggtgattgttagcattttttagcaataaagtttgttttttttttcttttttaaaatagagtctcattccattacccaggctggagtgcagtggtgtgatctcagctcattgcaacctctgcctcttgggttcaagggattctcctatctcagcctcctcagtagctgggattacaggtgcccaccacgacacctggtatttttagtagaaatagggtttcaccatgttggccaggctggtctcgaatttctgacctcaggtaatctgcctgcctcagcctctctaagtgctgggattacaggtgtggaccaccacgcccagcctaaagtaagtacattctttagacatgatgctattgcacgcttgatagactacagtaaagtatgcaccttctgtatgcactggggaaccaaaaaagattgtgtgacttgctttactgtgatacttgcttaattgcggtggcctgcaactgaacctgcagtatctccaaggttccggctcaacatacattttactttataacaaatgcttgccggccgtggtggctcacacctgtaatcccagcactttgggaggctgaggcggatcacttgagctcaagagtttgagaccagcctgggcagcatggcaaaaccccatctctacccaaaaataccaaaaattagctgggtatggtggtgcatgcctgtaatcccagctacttgggtggctgaggcaggagaatcccttgagcctggtaggtggaggttgcagtgagccgagattgcgccattgcactccagcctgggtgacagagcgagactccgtctcaaaaataaacaataaaacagctgctgcggtgttttcccaagtgactggttccaatttgcattttctccagcaatttatgagagtcccagttgttccacatcctcgccaacatttggtattatcagtcatctaattttagccatcaaatatagccattagcaaatgtgtggtgcatcgccttgcggtctgagcctgcgtgtccctaatgactagcgatggtgagcatctcttccccggcttattcgctattcctgtgccttctctggtgaagcaacttctgctcatttttccgctgagtggcttatcattgagttgtaagagttcttcatatcttctggagacatcttttatcagacgtgtgctttgaaaatatttttgtcccagtctgtggctttgtcttttttacctctttacagtgtcttttgaagagcaaaagttttaaatttttgtgaagtccaacttattaaatattttctttcctgattcatgctttttatgtcttctctaagaaatctctaagggtcaggccgggcacagtgtggctcatgcctctaatcccagcactttgggaggccaaggtgggcggatcacgaggtcaggagattgagaccatcctggctaacacggtgaaaccccatctctactaaaaatacaaaaaattagccgggcgtggtggcgggcgcctgtagtcccagctacttgggagggtgaggcaggagaatggcatgaacctgggaggcggagcttgcagggagccaagatcacgccactgcactccagcctgggcaacagagcgagactctgtctcaaaaaaaaaaaaaaaaaaaggaaagaaaaagaaatgtctaagggtcacgaagattttctcccaagttttccactaaagttttccaggtctcgcttttaggcatctggtccatttcaagttcacgtttgttgtggtatgagcggggtccaggctcaggttttgtgtgtctctctctagttgtcccagcaccacttgttgaaaagactgtcctttccgtattgaaatcctgtgacacctttgtcaaagatcaatgtattgtgtgtgtgtgtctgtttccagactctctattctgttccgttgatctttttgtcattctttcaccaataccacattgtctttctaactagagctttatggaaaatcttgaaatcagatagtctgagtctttgatgttgttttacaaaattattttggttactctaggtcctttaggtttccatttaaattttaaaacttgcttgtcaatttctggggaaaaaatgccttctgggatgtaactgaaattacattgaatccatagatcagtttgaagagaattgaggccttaataatattaaatcttctgcttcatggacatggcaaatctctccagtatcagtatctttttttttttttttttttgagtcagagtcttgctctatcacctgggctggagtgcagcggaacaatctcagcttactgcaacatccgcctcctgggttcaagtgattctcatgcctcagtgtaccaagtagctgtgaacacagccacacaccaccacgcccggctaattttttttgtatttttagtagagatggggttttgtcatgtgggccaggcttcctttctctattgatagtgtcttatcctttgaataagtttttattcaaatagtcagaaagtactttcttcttggactagaataataccttccatatttttctcacatctctccccagtctttcaattctctttcccaagcaacctgttactgtttcataaaggtctttccagatagatttcgttcatacatatgcattattctcgggtgtttatctctccacttaaaaatcacccgcggccgcttagtgtgtcccgctctgcagcttggtgtttcttgtgctgtgtcttagagttattccatgtcagaacacatagaaatcaccgttgttctttgcagttctcttcacactgtgttctaaatgatgcctgtgccataatttaatcatcctcatcgatccataatgaggccctttcctgttttttggctttttctgatctcatcagtggatcaataaatatccacacacattaaaaatagatactggatcaccaggcacggtggctcatgcctgtaatcccatcactttgggaagctgaggcaggtggatcacttgaggtcaggagttcgagaccagcctggccaacagggcgaaaccctgtctctactaaaaatacaaaaaaaaaaaaaaataggcaggcatggtggcacacgcctgtggtcccagctactcaggcagctgaggcatgagaatcgcttgaacccaggaggttgcagtcagccgagatcgcgccactgtactccagcctgagtggcagagcgagactctgtctcaaaaaaaaaaatactggatggccaggcgcagtggcccacacctgtaattccaacactttgggaggccgaggcaggtggatcacttgaggtcaggagttcaagaccagcctggccaacatggtgaaaccccatctctacaaaaatacaaaaattagctgggcatggtggcacacacctgtaatcccagctacttgagtggcttgaggctgcagtgagctgagatcatgccattgcactctagcctgggtaacagagtgagagactgtctcaaaaaaaaaaaaagaaagaaaggaatgaaaggaatgtttaaagtaccgcagaacatctcagaataataggaaaacatgcctcacacacacaaaattcaaatcctcatgctgaggcgtaagaatgacttgaacccaggaggcagaggttgcagtgaggcaagatcgtgcctctgcactccaacaaatacaggatttgaatctgattatttcatttgaatcagtattttagatctgattatccgatatctgtgttttagagcttgacgttaattacaggtatctcatcgcagcatgccgaggggaaagacaatagaatttgaagtgggcccactggtgttccctcagccacgctgtttcctgcagaccttgggctagtgattgaaatgctctgagtctcaatggccacatctgtaaagctggactatttccttcctaggattattgtcatggttaaggaaggtgggcagatgagaacccctagcccaacgtctgacccatgcgtcactttccttctccccataatcacagtacaaaagagttgtcaacttgggctttcaatagataatagttctcttgatctatttgaaaataatagtcaagatttggctattggctgcaaaaatacagtgagggagaaggaacaaggcccagtgttcaatagcatgtcacagtgactacagttcacggtaagttagtgtatatttctgaatagctagaggaaaagatttggaatgttctcaacacgaaggaaggatcatgtgtgaggtgatagatggccggttcccctgatttgatcatgacatgctgtatgcttgtgtcaaaatatcgcatgtacctctcaaatatgtgccaatctatccataaaaattttttaaagatttggctgctattaaaagagttggtttcctgctgggtgcagcggctcacacctgtaatcccagcactttgggaggccaaggcaggcacattgcttgagctcaggagttggagaccagcctgggcaacacggtgaaaccccatctctacaaatagagtttaaaaattagccgggcatggtggcgcacacctgtaatcccagccactcaagaggttgaggcatgagactcgcttgaacccggcaggcggaggttgcagtgaaccgagatcgcaccactgtatttcagcctgggttacagagtgagactctgtctcaaaaaataaataaataaataaataaataagagttggcttcctaatttatttctctgtgcattgagttcgccttagtgagctccctcgtgtggggcgcagctctgtgcactggctctctgatgtctcacacgtaactggctctccccgctgcatttctacagaggatgccagcatcaagccaaatccaccgacggcgagattgaggcctataagaaatccatcatgaaggaggaagaaaagaacgagaagctggcgagcatcctgaaccggacagagacggaagccacactgctgcagaagctcaccacccagtgcctgaccaagcaggtggccctgcagagccagttcaatacctacaggctcaccctgcaggacacagaggatgccctcagccaggaccagctggtgaggccgggcccgccccacaggtcacacctggcgcacggtggtgcctcttcaggcacgtgcaccctgtggctccttgtctccaggaacaaatgatactcacggaggagttgcaggccatccgccaagccatccagggcgagctggagctcaggaggaagacggatgctgccatccgggagaagctgcaggagcacatgacctccaacaagaccaccaaatacttcaaccagctcatcctgaggctgcagaaggagaagaccaacatggtaggcccctgccccagggaggggctgtgcgaagccccctgcagcctgggcatatgagggcaagccgtcctggaggcggagagggcggagtcagtgtgagcagagggccctcctgtgctcactcctttccatggtgttcaggttgtaagggtgatacatttttactgtagaaaacctagaaataggccaggcgtgagccaccgcatggccagctgccagccaaaggctgatttccctggggggacctggagtgtgacttcgacgtccatggcagggaacccccaattgtgagctcatgttcgcatcccctgggatcttgctttatcctttatcacctgtggtgggggtggaggggacttgtgtccttagaaaaaacaattccttacttgaattgttttttctttgcctcttcccgaggggtgaccgcctccccaacaccccgcctcaagcaggcccctttggaggacccccagaggctaccacaggctccaccatttccagagcacatcctagcagtggggcctgcccaacagtccccattttagtctcagaggagggtgacagattcccgatgccaagctctgccggttttgccctcctgaggggtgggaaaggagctggccaggcagagctgaagggcgtggtgggtgtgaaggagcccatccagccgtgctgctaccagccaagtccagttcccaatccccaggcccccgggcccccgccgagcccctgtctgggcagcccgataggtcatacgtgttttgctgccagtttccagaagagggcagcaaagagtcttggaccaacacattcgtctattacgacaattttccaaccgatgccagtccagctgctgaaaagagtacccccgacacgatgtttgaactgctcaaagcctcatgggctgatagaaggtggggtggggaggcatatctgggaggaggagcaaagtgtggatgggcgggaccacccatccggagctggggtcaaccacggggtccaggcagttaatccagggatggtgtagatgcctagggggagccagggtgggctccacagagaccacaaacagccaggagtggagcgggggtgcaggcccggctgtgacggggagggactgaaggggacttggagccatagcccctgcagggcagttggggaggggggaggcagggagtccttggggggcccagatctcagggtgaacttggcagaggaggaggctgcgagctgacattgccacacaactccagatgccggaagcttccactccaggtgggcagggtctgggttccaccacctggggacattgggtctcctgggaagccgcccgtggtggccagtgagagacatggagcccacaggcgtggcgggaggagaagctcagatggccctgaggaggctggggtaggcaggagccacagtcgtgagagagccaaggccttgtgtggcaggagccgacgggcaggggtgctcagggcagacacagggcccgaggccacctgttagaaccatgccctggggaagaggaccctgtcctggtggtgacagcatctccctgttcccagagcagctttggccacaccattgcagctgtgactgccactgcctcactcctgattatcacaaacgtcctctcgataaaccccccgttgccagaagggatccaaagtctgtctaatgcctccaaagagcccacagaggaggccagcactggcggctcagacctgccggacagcaggaggggtcagaacgcatggaggaaccagtgtctaacaattgcttcttgcttcataaactatgctgcaaatgtgatagagtacagcacagccattacagcttacagagcacaggaacataagacccgacttaccagattaaaaagcaggttagcacccagtgtgtagggtgtgatcctatttttattttggagaattatatagaaaagactgggaggaaaaatggattcagatgggaatggtagctaacttgtgtcagaattgcaggcaattgaatgtgttctctgtcctggcctgtattttcacatttcctcacaatgtgtgtgctacgatttaagaagtgtgttagtctgatctcacactgctgtaggaaatacctaagactggataactgataaaggaaagaggtttaattgactgacagttctgcatggctggggaggcctcaggaaacttacaatcatggcaaaaggcgaaacaggcacctccttcacaaggcagcaggagagagagtgtgtgtgaagcaggaaccgtcaaacacacaaaaccatcagatctcatgagaactcactatcatgagaacagcatgggggtagcggcccccatggtccagtcacctcccacaggggccctcccttgacatgtgggattatggggacacaattcaagatgagatgtgagtggggacacagccaaaccacatcaataagaaaagctaataccatgatctctcttttctgtaaaaagccaacatctgggttccaacaagtaggtcccttgctgggtcctggagacagtgggaaatccagcctcctgcactcgtgactgtgcgtttggaatatctccagaggaacatcccgaccgtcagggaacggtggatcagcaaactcgtcccgggccttgggtgggggcaatattcacaggtatttcttttcatcaattcagatgacacatctttccaaaatcaacggtgacattgcccagaccaccctggacatcacacacaccagcagcaggctggacgcacaccagaagaccctggtggagctggaccaggacgtgaagaaagtcaacgagctcatcaccaacagccagagcgagatctcccggcgcacgatcctgatcgagaggaagcaagggctcatcaacttcctcaacaagcagctggagcggatggtctccgagctgggggtgaggtcccaggcagggagacgtggtccccggctgactgtggtgcctggtggggcagagccccctcagatcccccacggtcagacatgaactcctggaaggcacagaactgcctctttccctacctgctttacagacaaaatggcacgtgtgccaagcgctctaagtcacatttttctgcacaaggccagagagtattccggctttgtggccagttggtctctctggcagtgacacggctctgcctccatagcgagaaggagcataggtaaaacgtaaaggaatgggcacggctgtgtccaatcagatgttattcaaggccactgaagtctgaattccaaataattttcacccagcacgaaatattctgctgctctaagaaaagtggcctaatgcgtttgaggcctgatgccatatacgtcatccaggtccctgtactctcaaagcccctttgggttccagaggccccacccaccctgccagcgcacccaccatggggaagctagagggggctccagagccccttagccatatttcctccagcggggtctgtggcttgcggccctgctgagagctaacttgagcccctcggccttcgtccagtttcatgacctcagggttccaggccctctgcagcccactcacaaagacctttgagcccaagaaggctaattttgctttttttttttttttttttttctgagacggagtcttgctctattgcccaggctggagtgcagtggtgccatcttgctcactgcacatctgcctcctgagttcaagcgattctcctgcctcagccttccaagtagctgggaccacaggtgtgcaccagcacacctggctaatttttgtattttgggtagagacggggtttcaccctgttggccaggctggtcttgaactcctgacctcgggtgatccacccgcctcagcctcccaaagtgctggaattacaggcgtgagtcactgcgcccagccctaattttgctttttgatgaatatccggtctagggggaagaagtggggcccctggagcttgaaatcaaaaggctgagcaagctgatcgacgagcacgatggcaaggcggtccaggcccaggtgacctggctgcgcctgcagcaggagatggtcaaggtgacacaggagcaggaggagcagctggcctccctggacgcatccaagaaggagctccacatcatggagcagaagaaactacgagtagaaagtaagagccgccgtgcccggccctgcagtgatgctgagacgagctctgggacgtgggcacctcccaggggaggggcactcagtggggcacgtcgctggatttgcacgcagccttaaaagcaaataacaaacgcgcatgctccctgtattttgtaaatgtgaaccactgcctgcccagctgcccagttcgcagtcacagcgggagggttgagaaatgtcacgaaatggctccaagctcacggacttcagagctctccttgagagaggagcatggaaggttatcatccccgccaagccagggcactcaggtggaaacactggcacgggaaaagccagggtcctgccaggcaggctcctggtgctgtccccacatcacctccagttgggcttagaaaaccattccaccggggctccccaacccttctgaggcccaaggggctgccaaagcaccagggtgcctggaatgatggaggcgggcatccttcctggaccactctccacccacatgtccacctgccgagacatcccgggtcctgcccggtcttgggtcggggatccatgctggtcaggcctgcagcagagcccccatgggaaatgctgcccagacacatcatgtgcccttctcggaggtcctgctgcctctcgccctgcccttcttgggttgcccaaacccgtctgttggtgagtagcaagtcccaaaagaccctatggagctgtcagctgagtatcggtgtcccaaggcaagagctgccgaaataccatgctgtgagatggggaggatcacccatggagagggcagagagaggggctcacatgcccatgtcctggggtagtcagggcacaccatggggacagcaggaggagctggagaagccctgtgaggagtggccagcggatgaaccagctgtggcctcttgtgccctccacccatcttaacatcaagaagagctgttgttttctgcccctacccctgagcttggctggggcagggcaggggtctaagggcctccctctcctggagactcacagtgtctgagcatcaaccaggtcccggtgctccacagatttgcaagtgtctgggggagggagcctggccctcccacacgccctgcccacacctgctggctgtccccacaggcaggtcctctcagttccgttggaggaccaggctttgggagcttagcagccaaaaagagaccccctgtcctctcctctcctctgtcctggcagggacgagattcaggcaggagcgccaggaacgacaagagggaggggatgaagggagctacagggagagacaaaacctggctcacctctcggacactgctgcctgcgggcgaggacccgtaccctcctggggtctctccctgagtctctgttttctgccataggcaagattgagcaggagaagaaggagcagaaggagatcgagcaccacatgaaggacctggacaacgacctgaagaagctcaacatgttgatgaataaaaaccggtgcagctcggaggagctggagcagaacaaccgggtgacagagaatgagttcgtgcgctcgctgaaggtccggccgtgtccacgcagtcccggggctcaggacgatggagggcgggggtacggtccttgcggtgggcgttctgcaccaggatgtaatttccacacccgttcaagatgcttgtaggggtattagaaatccagcctgcagccctgccctcggtgccgggatagagggcaccagccccggcatccacaatcccatggccctccccacagctgtcccgccccctcccccatgcaggcctctgagagggagaccatcaagatgcaggacaagctgaaccagctcagcgaggagaaggcgaccctcctgaatcaactggtggaagcagagtgagtcccagtctccagccacacgtgggtcatgaaggtcactgcacctacaggcctctgtccgttgaagaccatgtaggaggccaggtgtggcagctcacacccatatcccagtgctttggtcattttttgttgttgttttgttttttgttttgttttgttttgtttttagacagtcttgctctatcccacaggctggagtgcagccgtgcgatctcagctcactgcaacctctgcctcccagcttcaagtgattttcctgcctcaacctcctgagtagctgggattacaggtgcccgccaccatgcctcactaatttttgtatttttagtagagatggggtttcaccctgttggccaggctggtcttgaactcctgatctcaggtgatctgcccacctcagcctcccaaagcgctgggattacattcatgagccaccgtgcccagcaatcccagtgctttgggatgccaaggcaggaggctcctttggggccaggagttcaagacaagacggggcaacacagtgagaccccatatctacaaaaatgttttaaattggccaggcatggtggtgcatgccggtagtcccagctactcgggaggctgaggtgggaggatcgcttgagcccaggaggtcaaggctgcagtgagctaggattgcaccactgcactccagcctgggcgacagagcgagaccctgtctctaaaagaagaaaaagaccacctgggcatgggtctggaacccaccctagtggatcccagattccccacagagtctgtctaccccccttggtggcagttcttgagccaaacgagttactgctagaaattgaagggtttcctttgtgataaagtttttaagtatccattattttatggtgtctgattattaaagtaacacacacccagctctaaacattttaaactatacaatgcgtgcaaagtacccagggaaaattgcatataattccaacgcccttcacttcccagaaaaccaatgtgtagctatattcctttcttgttttgctctgttttttacacaaatgggattgtttcagaagttcccccttgaagcactttagtattttcatggccatctttccgtgtcacacacgtgggcccatatctccctgtggaaagggtgcggagcaggcgtggtgtggaggcaccgtcctttcttcagcgtgctccggaagggatgaatagcgcagggatcgcctgttccttgcggtttgatagaatctaggcaaaaaattatctgggaccaatgctttggggggcttgtatctttggtgacatttaaatagcttttagactattggtgtattcaggctttttactttttcttaagtcagcttctatcaattatactgactttctcagctcctacagttatatatccctgttctctctctctctgtctctctgtttcttccccacccccatctccctccctccccctgtatgccagaggttggcaaacgtttgcataaggagcccagtagtgaacacttcaggctttgagagcctcacgctttctgtcgcagctgcttggctctgccattgcagcttgagagccttgtaaagccttagagtgtgagctcaccgaagcatcagaagaaaactcctaatttcttacactgcctctcctacctctaaagacaccagattatgctttgggagaaaaaaatccaactggcaaaagagatgcgttcctcagtggattccgagatcggccagacggagatccgggccatgaagggcgagatccacaggatgaaggtgaggggaggagagcggcgtggcagggcctgctgggtgccagcccttgggctctggagacctggccacaccaaggcctcggctctcccggggctcctgtgggaaccacactggccacattggctggtggcaatgggtgagatttccagggagcgacccgctccagcagagtgacctgcactccagccgagcactggcaaagcgcacgtcccccttgacccagcttttaccacacgcttgcttttaatgtgcagaaatattgcagaacaacacaggacgcacacaggcacgtgcacgaacaacacgggacgcacgcaggcacgtgcacgaagaacacgggacgcgcgcaggcacgtgcacgaacaacacgggacgcgcgcgggcacgtgcacgaacaacacgggacgcgcgcaggcacgtgcacgaacaacacgggacgcgcgcaggcacgtgcacgaacaagggacgcgcgcaggcacgtgcacgaacacaggacacacacagcacgtgcatgaacaacacaggacacacacagcacgtgcatgaacaacacaggacacacacaagcacgtgcatgaacaacacaggacacacacaagcacgtgcatgtcatctcacaaaacgctgttttattcctactccatgtaatcacagcacgctggtatttttaaatgccggttgtaaccctcaaactttgtgaccctctaacgtatcccactgtgagacagtctcacaccacagaagggctcagagagcacccccatctcatccttcacagccgcgttgtctctccatggtcacaattagatttcattgcctttaaaaggctggtaattaaattgcaagtggtcatcaagctaaaggttcagggccttaaggataacagtaagagcagttcataaaataaatgggcctcactttcaccatgccatgctaaatagaaattcctctgctgagttatttttcagatcaagtgcatatgctaataagatgttgtgtttaaaaataccaaatttaattgacttttcatattacagaagccacatgtatttgctggagcaagacaagctctcctccacagagtgggggccaaagagaaggtccgggctgctcctccctgtcccttcttccccggctccccctcctcagccagggcgactgtgtcagccgctgcagggataaggcctctcaccttctcggatctcacacaaatgcacaggcagggcttgccttggccctacatggttactaacccattctttaacagttacaatatatactatggatatttcacaatttattgatccagtcccaggttggtgaaaattcaggttgtttccaatttgttgttggtgttattgttttgtcctagacacaatgtgtgttagggttctccaaagaaacagaaccagtagactacacacacacacacacacacacacacacacacacacacacagagagagagagagagaaagaaagagagatttactatgagaattggctcttatgattatgagggccgagaagtcctagtatccggcatctaatctgcagacccaggagagcccatgattcagtcaagtctaagacctgagaaggaggcaacggtgtcatcccagcccagtgttcccccacccccaccccgtcccaccaccttcttctgccttttctcctcaggccctcaacagattggatgatgtcacccagcctggcaagagggatctttactctgttcaaatgccaatcatttccagggacaccctcacagttctacccaaaacagaaatcatgtttttccagctatccaggcattccttagcccagttaggttaacccaaaatcagccatcacacagcattataatcacatccttccttactggttcttttttttttcttctagactatgttcccaaaggtgagattactaggtcaaagggtgtataaattctgactgtaacagcctgacagattacttgtctaaaaagcacatggcggcagtcatatctgtaccttcttctcagttctggtgttatttatctatctttttttttttttaattgaggtttttcagctgagtggaagctcacagcttagggcattcagccctataaggattttctgggtttttttgttttgttttgtctgtttgttttttgttttgtctttgagacagactctctgtcattcaggctggagtgaagtggtgggatctcggctcgctgcaacctccgcctcccaagttcaagcgattctcctgcttcagcttcccaagtagctgggattacaggtgtgtgccaccatgcctggctaatttttttgtattttcagtagagacggggtttcgccattttgcctaggctggtctcaaacttctgagctcaggcaattcgcccacctcagcctcccaaagtgctgggattacaggtgtgagccactgtgcccagccagccctacaagttttgatagagacgtacaatcatgtagccactgccacatcatgatatatttcctcatcctcgaattccctcatgccctctgtagtcagctcaccgcataccccagccgccatgacagccaccagtctctctccatgcctgtcgttttggcttttccagaatgtcacataaatggatcaaatagggtgagacatattgagcctgactttccttgcttagcctcatgcatttgagattcttctgtgtggtgaagcccaattacccagtctgttctctttttttagagacagggtttcgctctgtcacccgggctggagtgcagtggtgcaatcatggctcactgcagccttgaccttgtgggctcaaaggatcctcctgcctgggcctcccaaagtgctgggattacgggcacacaccacggcacccacccctcagtctgttctttcatggatcgtttcagtagcttatctgaggagcctctgcctagctgaaggtcacgaagagcttctcttctgttttcttctagaagcttcctgcttttaggttttacatttaggtccataatgtattttgagttaatttttgtgtatggtgcaagttgtggactggggttaattttttttgcatttggatgtccactggagtcagccctgcttgcttcctgaaaagactgcccttcctccaccgaactaccgtccagtccttgttgaaatcagctgacacgtttgtgtgggttcgtttctgggctgttttgttctactgatttctgtttctgtcccttcaccaatgccctgctgtcttgatttctgtaactctatacttacgaaattcctccgacttcctttttttttaagacagagtcttgctctgttgtccagactggagtgcagtggcactcacatctcagctcgctgcaacttccacctcctgggttcgagcaattctcctgcctcagcctcctgagtagctgagactacaggcatgtgccaccacacccagctaattttttgtatttttagtagagatggggtttcaccatgttggccaggctggccttgaactcctgatctcagatgatccacctgcctcggcctcccaaagtgctgggattacaggtgtgagccactgtgcccggccagctgattttaatattaggctgttttcttatttctcttttttttttttttgaaacagtctcgctctgttgcccaggctagagagcagtggcacgatctcagctcactgcaacctctgcctcccggggttcaagtgattctcccgcctcagcctcctgagtagctgagattacaggcgtgcaccactatgcctggctaatttttgtatttttggtagagacgggatttcaccatgttggccaggttggtctcaaactcctgagctcaggtgatccaccggtttcggcctcccaaagtgctgggattacaggcgtgagccaccgcacccggcctgttttcttatttcttaacattttttaggagttccttatacattcggttattaacccctgtcttcaatacctattaaaatagtggctctgacctatcattgtctttgccctctgtttagggggtcttttgccacacagactttttagtgtttcttagtgtggctccaagtcactttatggtacattttaaacctgagtaagcttggtctcccttcaccctgcttatcttcgggattcttgcctgttttttcttttaaatcaactttaggcataactttcataagataaaatatgcttattttaaacgcagagtttgggctgggtgcggtggctcacgcctgtaatcctagcactttgggaggccgaggcgggtggatcacttgaggtcagttcaaaaccagcctggccaccacggtgaaaccctgtctctactgaaaaaaaaaaaaaaaatagccaggcgtggtggcaggtgcctgtaatcctaactacttgggaggctgaggcaggagaattgcttgaatctgggaggtggaagttgcggtgagacgagattgtgccatcgcactccagcctgggcaacagaaggagactgtgtctcaaaaaattttttttataaaaaggctgggtgcagtggcttatgcctgcaatcccagctttgggaggccaaggtgggcggatcgagaccatcttggccaacatggtgaaaccccatctctactaaaaatacaaaaattagccaggcctgggggcagatacctgtaatcctagctactcaggaggctgaggcagaagaatcacttgaacccgggaggcgaaggttgcagtgagcctagatggctccactgcactccagcctggtgacagagcaagactccgtctcaaaaaatttttaaaaaagcacagtttggtgggttctaacacgcgcacacatctacgtagccactgacgccatcaagacatagaacctttctatgactccagaaagttcctgtgcacccccgcagccaatcctcacgctacaacccagtccccagccccaggtcctccacccaagccaaggtgcattgtcacaactaagaaattaaccttcatgcaatactgctaaccaaactacaaactctaatcagatttcaccaattttctcaatgagatttttttctgctgcaggatctgaccctggcttagttgcttttagttctcacatctccttggtggcctcaggtctcggccatttctccaccttgcactgtctgcctgtggattccgggttcccacccagggctgctgcctccatgtcccttgttcctcctggcggcacaggcctcactgtttccccgccgatccccatgcgtgtcaccggaggatgagcgaggccagcgccccggccactctctctgcagctgcagctcaggcctgccccagccccagcccctctgtcctgtctcccaggtcaggctcgggcagctgctgaagcagcaggagaagatgatccgtgccatggagttggcggttgcccgcagagagaccgtcaccacccaggccgaggggcagcgcaagatggacaggaaggcgctcacccgcaccgacttccaccacaagcagcttgagctgcgccggaaaatcagggacgttcgcaaggtagggagcagcggaaaggaaacagggcgcctgctcctctctctgggattcaaggaacactccaggaaggcgtcttgctgggtccggggtgaggatgcagaggctgcagtgggggcgtgctcagcactgctaacctgctgctgggtgctgggtctggggtgaggatgcagagagaccatccccagttctgctaacctgctgctgggttcggggtcaggggtgaggatccagaggctgttagaggggcgtgctcagcactgctaacctgctgctgctacggggcctgtctgggagactgcagaatgcccgcaccggacagagctgctgacacccagagacggccgtgtttcagcccctccctgcatatcggaggtggcattgggaaggcatagagttctggggaagaggccagctcatgctggggagcccgagtgggcaccggggaccagctgatgggagcggggtgggcgcctcgagagcctgcatccgcataccccaggccatgtccactgggcctgcactgggagggcccagctggtgctgtccggtgcttaccacctcaacggttgccagccaggggccctgcactcacacttcccaggttggccccacagccccgctgacccgctgtgtgacctcggagtatgtgggccttgccagacctgcagggcctcgtctgctggggggtggaggggcagagttaaatgtgacagcaaccacagccgtgggtggggaggtggccttggggacagctgacagcatggcttggagccacgctggaccattcctgactggggcatacggtctgacctcccagagccttggtttactgacctgtgaaatgggtgcccacctctcagagtcacccagagggttccctggagagtgctgaagtcatccctgtagggaaaggctagccaaaaatggcagacatgcatgggctgctcatttggaagtaactggaagtttctggagagaggcggcagagtggcctcttctcagtccttttccactacattggctactcctgatgtccatccctccctcagcttcctagcccggcccctgaccactccttgctgccctgggcaccccctgagtcccctgccaggaccccatgcccacccctcacctcctgtctgctccaagccacactcaagttctccagccccaggccctgcgccccacacgacgccatcactgatgggtccttgtcctcacccctgccagccccaccccaaagatcttccgtgtccccagccagccctgagagtcactgtgtctcctgcatcaccccctggaccatgtcagctgccaaacactgcctgcccggcttttctttctcttaattgtgctgctttccccgaaggcggaacgaacaccacacagatggccccagcctcgctcctccctcagcagaggcccccaccctcctctctcccaggctccccagcctgcctctcggcccttacagcctcagccctgcccttggcacacggctgctgaactgtgccagtctcctgcctggggacagacccactgcacggggagccccagaaccactcaggcccccatctctctgccacacctgccttaaaggagcagtgtgcagtgtgggctggctgggcctggcatctcccaggcctcgcctctccagccctcccattcctctttgggagcctccctggatggagtgtgtggaaggtgcctggcaggtcctcccagcctgactcttccctgtccgccaagtagccgggctgcaggggcccagcatggtcctgtgattctcctaggccaccgatgagtgcaccaaaaccgtcctggaactggaagaaacacaaagaaatgtgagcagctccctcctagagaagcaggaaaagctgtcggtgattcaggcagacttcgacacactcgaggccgacctcacccggcttggggccctcaaacgacaggtaaacgtgtcccaggaggtccctggggatgacggccatggaacatgccactcacacagaggtcctgcgtcccctctgtgcgagtcacggcctctcctgatcaggtcacggcctctcctgatcccaggccagtaatagcaccaccggctgctcacatgtttgtggctttgtgatttgttccactgacaaatgttgatggagtatctgttatgggctgggctcatgttcagcgtgcgagggttacaaaatagaacacaaaaaacaaacattcctgtgctcttagaggttacctcctggggcaggaggacagatgatgagcaaaataattttaaaagatacagtgtgttgtagctaggcatggtggtacacacctgtggtgccagctactcaggaggctgaggtgggaggatcgcttgagcctgggaggtcgagactgcagtgagccaaggttgtaccactgcactccagcctgggtgacagagggagatcctgtctcaaaaagaaaagaaaagaaaagaaaagaaaagaaaagaaaagaaaagaaaagaaaaagggaaatggtgtgttaggtggtggtaaatgctttgaaggaagataaaccagagaaagaagcgtcagggtcattggggtgaactgagggattgacattttgagttagggtgatgcgggaaggccctgcggagcagacattggagtccagacctgaaggaggggacagcccacaaaaccaccccaggtggacaggacagcccggcaaggcagaagcctgagactgcgcaagggctactagaggccagtggggcaggctggggaggttagggtatgtaagacccaggcagagaggggcggcccagactgtgtgcggccttagggagagcacaatcatgactttggacttttctcttggggaggtgggcacacagaggagggcgttgggtctgagaggtgacttgggctttagcgggctcccgcgcgctctaagattgcatgtggatgaagcatggatgcggggggcacctggggctatttgcagtgcttcagggcggcccctgtggggctggcgagaagccatcaggctctgcatatgcgttatgccaacatcgcccgatgggattcctgctgggttggctgtggtgtgagcagagacggaggtggagaatggctccaaggttctggcctggccaactgagatgatgaggggaacgtgcctggcactgggcctgacacacggcaggtgtcaagaaggttgcctaagccgggcacggtggctcatgcctgtaatcccagcactttgggaggccgcagcaggtggatcacttgaggtcaggagttcgagaccagcctggccaacatggcgaaaccccatctcaactaaaaatacaaatattagccaggcatggtggcgggcgcctgtaatctcagctacccgggcgtggtggtgggggtgggtgcctgtaattccagctagttgggaggctgaggcaggtgaatcgcttgaagccgggagccagaggttgcagtgtgccaagattgtgccattgcactccagcctaggtaacagagcgagacagcctcaaaaaaaaaaaaaaaaaatgccggcgggtcacagtggctcacacctgtaatcccagcactttgggaagccgaggcaggcggatcacgaggtcaggagatcgagaccatcctggctaacacggtgaaaccctgtctctactaaaaaaaaaaaaaatacaaaaaattagccgggcctggtgacgggcatctgtagtcccagctactcaggaggctgagacaggataatggcgtgaacccgggaggcggagcttgcagtgagccgagatcgcaccgctgcactccagcctgggcgacagagcaagactccatctcaaaaaaaaaaaagaatgcctcctagatggtgatgatgggtgacccataaagcaccgacccagtgcctctcagcctcttccctgagatccaggggcgcaacaccttcacgccgtcccttttcaggcgtaggtctcgcctcctcttcggcatttcctggaatctgagtttgtggggggccagcaggtgtctttcttctggtttgcatagccctatatggagtctcttttcctacccagaacctttcagagatcgtggccctgcagacacgccttaagcacctgcaggctgtgaaggaggggcgctacgtgttcctgttccgctccaagcagtccctagtgctggagcgccagcgcctggacaagcgactggctctcatcgccaccatcctggaccgcgtgcgggacgagtacccccagttccaggaggccctgcacaaggtcagccagatgatcgccaacaagctcgagtcaccagggccctcctagggagcagcctggactccgccttgcaaggcctccaggaagagatccggaattgtgtttgtcatgagggacttggaatcttttgtgttcctaaaaaccacatgtaccctcagaagggcatcgtttaagagaaataagccagccccacccataggaatctttttagccactcagcaatttaataaaccaggtaaaatcctagcgtttcccatggcatcccatcgcaaagacagagcctgtgactgcagacccacacacccacactcccacactgggcttactcgtccaggtaacactttggtttgcagcactcccaaatctgcacgtgcctctcacaacacaacgctgccacaggtccacaagctggtgggctgagcagaggtgggaaagttaaggcagctccagccagcctggcccgggaggctggtccccccagcacttccctctactaggtgcatctgaaaacccacaaaccaccttctttaccagttttcccatccccaccccttagaactctcaggtcccttttcctgcccccatgtccccatttgagttaaattcagatccacagcttgcaggagaaagtcagtggccccagacacacgtaacagggtgagcactgaaataagagcacgctggggcgtccacaccaagggactacgccccagtctgcccacctatcttttctccatcattaacccagcgctctttctccctggacttccaagtaccaatgaccttggggcttctttgcagtttaaagggaaaatgctctacaaaataatttcactttcaaacatttcagcagaagaataaaatcttttttctgaatatctagtaa

SEQ ID NO: 15506 - DNA, 52235 bp, Homo sapiens
aacgggacgctttctctgggatgcattgagtcagggaatagaagatggggtgaatgatgtttctgacccacagaccgttgggatgcttttgctgtcactttcccatcatgctgcatgaggcatgacagcagctgtgccattgatgccccagaatagaatcactgaggcttctctccagcagctcctcaatggtgtcgctgtctctccccccagtgatccccccaggggtgcccgatgcccaccccagggaaggagacctgccagtgttccaggaccagatccagcagcccagcaccgaggagggggccatggcagagagagtggagtccgaggggagtgacgaggaagcagaagacgaagggtcccagctggtggttttggacccagaccacgtaaggaagccttcccaggttttgcttttgcctacatggatggcgaatgactcaggcccctttctctgcctgcactgtctcccactcctgaccctaaatgctgtacttgtatctcgcctgttcactgcaccgtttattggcactgattgacctgcctcttcgtagggtactctcctctgaggttggtataggtgaggcctgtgtttctcaaccccggaaccactgccccgtggggccgggtcattctgtgctgtgccttgcatggtgtggaacagcatccccgagctccccctgctacatgccaggagcaccacccccccgccttggttgtgatcatcaaaaatgtctccaggctggacgtggtagctcatgcctgtaatcccagcactttgggaggccaaggtctgtggatcacctgaggtcaggagttcgagaccagcctggccaacatggtgaaaccccatctctactaaaaatacaaaaaaaaaaaaaaattagctgggcatggtggtgagcacctgtaatccctgttactcaggaggctgaggcaggagaatcgcttaaacccaagaggcggaggttgcatgcagacagccaagatggcaccagtgcactccagcctgggcaataagagcgaaactctgtctcaaaaaaaaaaaaaaaaaaatgtctccagtcattgccaaatgttggcggtgtggggcccatcttcgcagccactgccttgagggcaccaattggatcgcagctccctgccccacccactggcaaggggaaaaggcagatgttgatttcatttacccatcaggacagctgcagagctccaggaactgccggaaggagctgggggctgcacagggaggttctctccccagaccactgctccaccccaccctctggccccagctcaccatcattttgccaaaatatgcactcagttctctgcaagtgcctcagatgagaccatgaggtgcctttaatttgtggcttccagagtaagaatcccaagcagaagcagggagcactccacacggaagtcgtctctggcccaccggagggagacctgtggccacctgggctgagccctgggtcgggcaggagggtaaccagaaaggtaaccacctgtggttttccattgttctagcccctgatggtaagattccaggctgccctgaagaactacctgaaccgacagatcgaaaagttgaagctggacctccaagagctggtgtgtatccgtccagtctcccaccctggtcggatgcctgcgtcctggtgaccctgtttctctctttggtccaggttgtggctaccaagcagagccgagcccagcggcaggagctgggggtgaatctctatgaggtgcagcagcacctggtacacctgcagaagctgctggagaagagtcacgaccgccacgcaatggcctcgagcgagcgcaggcagaaggaggaggagctgcaggccgcccgcgctctctacaccaagacctgcgcagccgccaacgaggagcgcaaaaagtgtaaggcaacccggcagccccacacgccatccggtcctggagggtttcccaggggtgtctccatgtaccatggccaggcatctagaaaagtaagatgtgtgtgcatcctggaggggttcccaccctttttaggaggggaaggcacataaatcaaatgtctttttgttgttgtttttttgagatggagtctcactctgtcacccaggctggagtgcaatggcgcgatcttggctcactgcaacctcccccttccgggatcaagccagtctcctggctgagcctcccaagtagctggtattacaggcacctgccaccatgcctggctattttttgtatttttagtagagacggggtttcaccatgttggccaggctggtctcgaactcctgacctcaggtgattcgcctgcctcggcctcccaaaatgctgggattacaggcatgagacactgcacccggttataaatatgttaaatggcacctgtcaggacaaagcagcaaatgctgaagctgctaacagccagagcgtagagattcaaaactgggagagatgggtgagctgcagaggtcccaggatagatgagaccaggaggcgagagcagaccgggggtgatggagggtttcaatagatgcgaatgcgagggtgaggccggcacgacggtcagaccatggcccagggcctgaccgccgtaggatgtgtgcggcaggtcagtgggtagctttgaatcagatgagacagtgggggctacagcacgtgctatgcaacattaccgataaagcaacgtccttgcacagagctggtcatgtaggtgaccggggacagtggcttcctcttgtgactacggagtatttcagtctttatgctttttgatgttttcaactttctcaatcaactgtgtattactcttataatggggaaatgacctacacaaacctggaggaaaacagaagcacatggctatcccagctgttctggaaagaaacattttaaaccctgagaaaagtggaagaggttctggaaatttcagagttagggtaagtgggcacttatcaagcacctctcttggctgggcgcagtggctcacgcctgtaatcctagcactttgggaggccgaggcgggcggatcacgaggtcaggagatcgagaccatcccggctaaaacggtgaaaccccgtctctactaaaaatacaaaaaattagccgggcgtagtggcgggcgcctgtagtcccagctacttgggaggctgaggcaggagaatggcgtgaacctgggagtcggagcttgcagtgagccgagatcccgccactgcactccagcctgggcgacagagcgagactccgtctcaaaaaaaaaaaaaaaaaaaaaaaaaagaaaaaagaacctctctccagttagcatcaaatgaacagaaaacagtaaaaggaaagaaagtgacatccacactgaactgaaagagccacatcctccagaagtaaccaaatttacacccacctgaaggaggacgcgtgcccctaactgctccccacacctgcagtgaggctggagccgtggagctggtgtggagcgccctccggctcccctctgctagggcttaaagagtgggtgggattccaaaaagatccaaacactctggtggactctgcttcctggagattaggagagggccagagccgaggctcttcaacccagcaaggcctgcgtcaaacagcaccgtctctgccttctcagaactgaagaatttgggcaacggtcccggccctgaccggggggcagccaccactgcacagtcccttaggtgagacgtgggtcctggcccctggagaaagcccacggtcacctgcctcatctgggagggagactgtattagggttgtctagagggacagaactaacaggatagatatatagagaaaggagagtttattcagtattgacacaggatcacaaggtcccacaataggccgtctgcaggctgaggagcaaggagagccggtctgagttccaaaaatgaagaacctggagtccagtgttcaagggcaggaagcatccagcacaggagaaagatgtaggctgggaggctacaccagtctctcttttcacatttttctgcctgcttacactctagccgcactgtcagctgatgagatggtgcccacccagattgggggtgggtctgccttttcccaggccactgactcaaatgttaatctcctttggcaacaccctcacagacacacccaggatcaatactttgtatccttcaatccaatcaagttgacactcagtattaaccatcaccgacactaaaccttcacaccaaaatgagttaccaacccgagatccccagacctgagaggagactgagccggacagacaggcaaacccagccctgattctaaaaacagagcatgcggaggcaccaactggtagtctcatgagattttagaggacgttgtatccgtaaagagaacaaagtgttaggaagaggggtacgtgaaatttaaaaatataatcatcatcccagagtgtgcagaggcgccaactggtagtctcatgagattttagaggacattgcatccataaagagaacaaagtgttaggaaaaggggtacgtgaaatttaaaaatataatcatcatccccccaaaaggcactaactagacaaatgaatgcagttgaaaactgaatttcttaactaaaaagccagttcgaggaaccttccctggaaatagagcaaaaccccaaatgattgatatcttgaggaggaggtaaaagacatggacgacagattagggaaatcgaatcagtgtccgaaagggagatttcaggagatgagaggcaatagccaatgtccaggagaacagatgcgtgagttcaggaaagacgaatctgcagatagaaagactcgtgacgggccatgcagctgaaagagaaaataaacctccgcagacatagctggtgggatttccaaataccacggcaaaagaaaaaatgctgcaggcttccaggcgggaaaacccagatggcctcttgaggccgggcctgggctacgctttcatcaaggcctccatcagctgcgccttggaggaaccagggagagctcaaaaccaccaggacctatcccagcccagatttcagattggtttgttctgggaaggaccaggcattgtttgtttctggctttctttttgacccttaagcttccagatgatgctaacttgcagccagggctgagaatcacagatcttaaatttaaatagcaggatgtcaatgcatacagaattcagaattctcttttttgtgttttttgtttgtttgtttgtttgttgagatggagtctctctctgtcgcccaggctggagtgcagtggcgtgatctcagctcactgcaacctccacctcccgggttcaagcgattctcctgcttcagcctcccaagtagctgggactacaggggcccgccaccatgcctggctaatttttgtatttttgtagataacggggtttcaccatgttggtcaggctggtcttgaacccctgacctcgtgatccgcccaccttggcctcccaatgcatacagaattctaagggagaaggatggttagcatttgacctacatgtcagttagactctggaaattaacaacaacgggaagtccacgcatgaagacttctggctgcagccaaatctgctcagacaaaacccatgacagagtttatttacatttccacaaacaagcctgaaaacagacattctattcgagaagctaaaaagagggaaataaactgaaagaagcagaaaaataaaccaataaagatcaaaagcagaagctgatgaaataaataaaaaatgaattgacttgataaataaactgctttttttttaaatgaccaataaaccttacacactgctggcttatctggcaataaaaaggagatcatgcaagtaacagtgttgggaatgaggacaacttgggggagggttttttttgttttgttttttgtttttaattgcaagaaagctatgcattgtactggtttcatcatgcaagaaattgaaaatgtcaaaaatctgttttccctaaatgcaccagtattggaagatgttatggaaggcttctagtaacctttcaaggaacaaacacttcctgtgttatcaaagctccagggcatggaagattccggaaactccccacaggctggtcctgcaatgcttagtgaaaggctggctgcaaacgctgacagcatacaagcaggaaactgtaaagcggccccacatgtgaggagtgaaaatcctgaacaaaatgttagcaaaaataagtaggatttacttccagaattcacacaggaataattcacaattaggaaatctactaattttgtgcattatatttataaattaaagaatggaggccggatgtggtggctcacgcctgtaatcccagcactttgggaggccgaggcgggcagattacctgaggtcaggagttcgagaccagcctggccaacgtggtgaaaccctgtttctactaaaagtacaaaaaattagccaggtgtggtggcaggcacctgtaatcccagctactcaggaggttgagacaggagaattgcttgagcccaggagacagaggttgcagtgagccgagactgtgccactgcactccatcctggccaacagagtgagacactgtctcaaaaaaaaaaaataaataaatcaaataaaacaaaatacaaggataaaaaaaaaaggcttcctgggtgggtgccaaatgggtatttaataaaactcatcatccatcccaaagtaggatagaaggagagttctaagtatttatcagaaactaacaagaaaatgttacccagtggaaagactagacttaaaatcaggaatgagatgaggaggcctgctagcatagcagttaccccagactgttttggaggctccagcaacgcaaagaaaacaagagaaagaaatgagatatggatctgggaatgaaatactgaaattctcaacctctactaatgaaaaataaaagccaatagaaacagtaagaaatcaataaagtagctggataccagctctgtagttttcttctacaccagtaatatagttaggaattacaatttttaaaaaagctcattcataatagctataacaacttttaaataagtccaggaagaaatccaacaaggaatgatgagcctgtctgaaaaaaaacaataaatgttatgaaaggtcataaaacagatttaaataaatggagtgcccacgttaccagctgggaagacgcatgatataaaaatgccatttccctccaaattagcaataaaaccattgcaattcccgttaccctccgtggtgagatgttttgggtgaacttaaatttattcaacataattatttacttattttggaaaagtaatgattcaaaatgcaagagctctacaactaagaggaagttttcgtctcttttccccttcccccacccagccaccagggccctccgcagaggcaacgtagattcttgtggattctttttgtttttgttttcttcgagacagcgagacgcatcttgctctgtttcccaggctggaatgcaatggcagagtagcctcgaactcccagccttaagtgatcctcacacctcagcttcccaagtagctgggactacacacacaccaccaggcctggctaattttcatatatatatatatatatatatatatatatatatatttttttttttttttggtagaaacagggtcttactgtgttgcccaggctggtctccaattcctgggctcaagtgatcctcttgcttcggcctcccaaagtcctgggattacaggcataagccactgtgttcagcccttgtggagtcttttggagattttttgcatatctaagcaaagtcacaagggtgtgtgtgtatgtgtatctctctctctctctttaacttaaatggctgcatattatacccactgctcggttcctcgcttgctgtcccttagcaacacgtgctgcggatattccacctcaaaacaaaaagcacctcgggccaggtgcggaggctcacgcctgtagtgttgacactttgggaggctgaggctggcagatcgtttgagctcaggagttcaagaccagcctgggcaatgcggcaaaaccccatctctacaaaaaatacaaaaatgagaaattggccgggcatggtggcatgtgcctggagtcccagctacttggggggctgaggtgaacccaggaggttgaagctgcggtgagctatgattgtgcgactgcactccagcctgggtgacaaagtgacaccctgtctcagaaaacaacaagaacaacaacactttattctcaacaaattgattttaaagttcatttagaagactaaatgcacaaaaatatccaagacaattttgaaaaggaaggataatgaaagaaatatttaagaataataacaagtccttagccaggcctggtggctcacgcctgtaatcccagcactttgggaggccgaggcaagcggatcacaaggtcaggagatcgagaccatcctggctaacatggtgaaaccccatctctactaaaaaaaaaaatacaattactcgggcgtggtggcgggcacctgtggtcccagctactcaggagactgaggcagaagaatggcgtgaacccgggacgcagagcttgcagtgagccgagatcaccactgcactccagcctgggcgacagagtgagactctgtctcaaaaaaaaaaaaaagaagaatagcaagtcctcaaagagaacttagaggaaattactttggaatttagctactgcaagctatattaatgcacaggttgctttttttttgagacagagtctcactttgtcacccaggctgtagtgcagtggcatgatcctcccacctcagcctcctgagtagttgggattacggacgtgcaccaacacatcctgttaatttttgtattttgagtagagacagggtttcaccatgttggctagactggtcttgaactcctggcctcaagtgatccgcccacctcggcctctcaaagtgctggggttacaggcgtgagccaccacacccagccaaaatggctttgcaagtttaagctgtatccttcgagcacacctggctccaggatgatatgcgtccagcagccttttggcctgtaattcagttttctgtttggatccagccactgaaagggagtgctctgtgcagtgagcaagcaagtactgacccacgtgtagctccctcaataaatttgcactccagctttagaaatccatctcatggccgggcgcggtggctcatgcctgtaatcccagcactttgggaggccaaggtgggtggatcaggaggttaggagatggagattatcctggctaacatggtgaaaccccgtctctactaaaaatacaaaaaattagccgggcgtggtggcgggcgcctgtagtcccagctactcgggaggctgaggcaggagaatggcgtgaaccctgggggcggagcttgcagtgagtcgagatcgcgccactgcactccagcctgggcgacagagcgagatttcgtctcaaaaaaaaaaaaagaaatccatctcatgcaagttttgttaaaggaatcagttcctcgggccttggcctcctctgagagcactgacataaatctgtcacttaacttgggacaggatggaagctgctgcctcttctagcctcgtcctctctggcctgcactgctgtgcagcggtgtcagtgcaggggcatctgtggagctcagcctgccctggatgttctcgtctcctcccaggggacttaagactccacctaaggttgccagcctttcagtggtaagacatctatgcaatcaacccgaagccttaccacctggcactacttcagtgtatccttagactaccaggaggatctctgagacttggtggggaatggaacagcttgctgcaatttgtggatgtagattccgtatatttttgtctcttccaagagactgtaaactctttgctgacaaagtctgtgtcttgatagtttaaaagcagtttcccagtcttacccaaaaatggcaggaagggtgcccagaacggctgttccctgcttcctcctgggtctctgcatgggggacgctgggacagcctccccactcactctctctctctttctcccccgccgcgccccgcagtggcggctctgcagactgagatggagaacttggccctgcatctcttctacatgcagaacatcgaccaggacatgcgtgacgacatccgcgtgatgacacaagtggtaaagaaggccgagacggagaggatccgggcagaaatcgagaagaaaaagcaggtattctgcaaactcgacacatgtttaatgatcaccagaccgtggagcttcaaaaaggggctcagctttgcctcctgcgtgaaggcttccggccggaggggtggcggccggcctgggtggcgtcaacttgtatcaagggttggtggagaacaggccctcagccacgggcacctcctgacggggctgcttctcatcctgtttcccaggacctgtatgtggaccagctcaccactcgagcccagcaactggaagaagacattgccctgtttgaggctcagtacttggcccaagctgaggacacccggattttaaggaaagcagtgagtgaggtaaaagcagtccccgcagctctcagtgttcgaccctccagtgagtgtccacgcacagggtgctggtgggtctactagactgcacctgcccgtctgctggatgagtgactgcagccagcttacatctgcaaacatcgggccctccccatggtggggccacagtagatactgacaggtggacagcccggattcctattccttccctggctagtgggtgacagaaggcctcgcagggttcaggtactctagtcgcttcatgaccgccaaggccagcttgctgcggggatgctcagcaagttccttagcctgcagggacctcttccggggaggactgaagtctttctaacaattctcacccccgtgggcagccggccttccgggtagctcctacatctctgcacctcgtggagtagggagtggagggaacgaagggggtgaaagctgctccctcttggccccagattcaggtctgtagtggtagcaccagaaaccaaagttactgcaacttaaaaaaaaaaaaaaaaaaactatgagtcaccatcttcattcacgggtgcgggaatgacacggaggaaacaattaactttttttttttttgagacagagtctcgctctgtcgcccaggctggagtgcagtggcacaatctcagctcactgcaacctccgcctcccagattcaagcaattctcctgcctcagcctccagagtggctgggactacaggcgcccacctccatgcccagctaatttttgtatttttagtaaaaacagggtttcaccatgttggccaggttggtctcaaactcctgacctcaggtgatccacccacctcggcctcccaaagtcctgggattacagtcatgagccaccgtgcccagccaatgaaaaagaaggaagaggacttgaaggaacggatgagcacgctgggctcccagggtaaagggagggcccggggctgggcgttactcagcactggtctctccagctacaaatgcaattaaagtagagcacgtcccaatcagaatctcaggaacaaacaatcccttagttaacaaaacaattctggagttttatctgaaaaataaattaggaaggctagccaagaatggttttggaagagaagattcaaacggggcaagcagccatcccagtctgctcaggactgaggggtccccaagacaagggactttccatgctaagcccagggggtcctggacacagcaggatggcagatcaccctagcatcgccgcaccaaatattaaagtatacagtaaagctctggccaggcaaggtggtgcacacctgtaatcccagcacttggggaggctgaggcaagaggatggcttgagcccagaagttcaagaccagactgggcaacatggtgagaccctgtctccacaaaaaaataataattaaaaaaaaataaaacattagcccaccatggtggtgtgcacctgtggtcccagctactcaggaggctgaggcaggaggatcacttaagcccgggaggtcaaaaaaaaaaaaagaacaacaacactttattctcaacgaattgattttaaagttcacttagaagactaaatgctcaagaatacccaagaaaattttgaaaaggaaggatcatgaaagatccttgaactatgaaagatccaatgaaatatgatcataccactgcactccagcctgggctacggagcaagaccctgtctaaaataaaacaaaaccgtaaagttctagaggctaaaataatgtgtcacaagatagacaggcaagacattgaagcctatgagagagccccaaagcaagccagagtttatataaaaacctagtagattataaattaccagagagctaatgaattatgcatccaatgatgtcgggacatttggttaatcatttgggaaaaaattaaatcttttcctcataccagacactaaaataaattccagatggaatcaagtatttaaatgggggaaaatgtgccagacgaaaacaaatgaaaatatttatataatcctgggctggggaggcctttcaaagtataacaccaaaagcaggaaccttaaaggaaaagactaggaggggccgggtaaggtggctcacgcctgtaatcccagcactttgggaggccgaggccgctggatcacctgaggtcaggagttcgagaccagcctggcccgcatggcaaaaccccatctctactgaaaatacaaaaattagctgggcgtggtggtacacgcctgtaatgccagctacttgggaggctgaggcaggagaatcgcttgaacccaggaggcagaagttgcagtgagccgagatcatgccattgcatttcagcctgggcgacagagccagaatccatctcaaaaaacaaaacaaaacaaaagactaggaggacaatcacaccctcaataaaacctttgtagattaaggacgccacaaaccagatgaaggcggggagacaggcaggagaagacaactcgcagccattagtaaatccggggttgtgaagagaggctgaaagccaaggagactcgccctgtgtgcttccacaccctggaggcaggtgggctacttggtagatgcttccttttgcacctcccgccctcccctcgatgcaacttccccagggaagggggccgcccgcacttccttcatttctcatttccagtacccagaacagtgcgggggcaacagcagggcccctgttcatcgagcgaagtcacaagtaaccaaaggacagggagtcccctacagagttggcaaagataaggagagatgagccctccctgctgtcggccatgaaaatacagattggcctttatctttatcaagatcttcatccagggcgatatgatcatatgcagccactccctccctaaccctaaccctaaccccgcaccctgttagtgcttagactccattccaaggaacctagcaaagacctatgcagataacatttttgtatgttaaaaatgataaagccaggcttggtggggtgcacctgtagtcccagctactcaggaggctgaagcaggaggagcacttgtgcccaggaagtcagggctgcagtgagctatgattgcaccactgcactccagcctgggtgacagagtgaaacccccgtctctaaagaaataaatacagtgaatagagactcatgggggagatgacgctcatcaccgtgttgtgtcatcagaaagaaagaccccaagaagaggacattagtgaaacccattttcatacacctgtgcatcagaatacactacaccaaaaagagctctactgacatggaaacctgtctcgatattaatttcttattttaattttttttaaattatactttaagttttagggtacacgtgcacgatgtgcaggtttgttacatatgtatacatgtgccatgctggtgtgctgcacccattaactcgtcatttagcattaggtatatctcctaatgctatctctcccccctccccccaccccacaacaggccccgttgtgtgacgttccccttcctgtgtccatgtgttctcattgttcaattcccacctatgagtgagaacatgcggtgtttgggtttttgtccttgcaatagtttgctgagaatgatggtagagactaagtctcactctgtcccccaggctggagtgcactggggccctcatggctcactgtagcctcaaacttctgggtccaagcaatcctcccacctcagcctctcaagtaggtaggactataagcacatgccaccacaccgtgctaatttttttattatgattattctttttgtagagacggtgtttctttttgttgcccagactggttgggaactcctggcctcaagtaatccccccgcctcagcctcccaaagtgctgggattacgggcatgagccaccgcacctggcacaatacattaatttttaatatggcggggcatggtggctcacacctgtaatcccagcactttgtgagaccgaggtcggcagatcacctgagggtcaggagttcgagaccagcctggccaacatggtgaaaccccgtctctactaaaaattcaaaaattagccaggcgtggtggcgagtgcctataatcgcagctgttcgggagactgagacaggagaattgcttgaactcaggaggcggaaattgcagtgagccaagatcgtgccattttgctccagcctgggtgacgagagtaaaagtgtctcaaaaaaaaaaattaataggagattatgaaacaatatatagaatttgatttcgcacacacacacaatcacaggtgtaagaagttagaaatggttatctctaagtgttagggttattgaattttcattttctttttgcttatttgcacattctatttgcataggctgaacacttgcctttgtgaaaaactggggtctaaatgcacaggtgactgagcccggcagccatctttccatccttatgccttgacctgcacctcagtcaaccaggctgtggccggcagcctcaggggcaccatggggaggcctcgcacaggctcagtttaaggtgcatcctggctgaatttgggtccccacctgctgcctgggccagctcccactgcccaatggcacagagcagcctccttagtgaataacttacccccatacaaaactgtgacccagcagtcccacgactgggcatttatccaaaggaaagggaatccgtgcatccaatagacacctgcacccccatggccaggctggtctcggacccctgacctcaggtgatccgtccgccttgacctcccaaagtgctggggttacaggcatgagccgccgcacctggcccagtcaacaataatttattgtacattttcagatagctagaagagagggttttgaatgttcccaactcaaagaaataacaattgctggaggtgactgatacgctaattaccttgattcaagcagtacacattgtacatgtgtcgaaatatcactctgtaccccagagatatacagctgtaacatgtcagctaaaataaaaggaaatactacagacaaaagggaagtcagtcccgggatgtacacagtgtcccttcctaggctgcccaataatcctaagtaagcgtctgtgagaggaaaaaaaagtccccctcatcgtggtatacttaattcacaccattttaggttacgtcgtaatgaatagatggttcagaaaccctcacagccaagcatggtgtctccagggcgatggcctctctcatgcccggcgctgccctcggctcccccgtgatgttctagcgcactgtggttcagtcactgtctaccaagcttgcctgggtgtcacggcgtgcaggcacttctgggacttggcgttctacaggacgccccagttggctgactcgggccgccagcttgctcaagtcacagtgcttgcattggggatgactcatcaagaatcccaaacaccactcaaaacaagaccgcgatccaggccgtgctgggcatgcaggcatcaactcacttgacccggcagccccggggtcgctcctgtacccatggaggtgccgctcctgtacccatgtcacagctggggacactgaggcacagcgggtgagattcagcccaggcagccgtaccagccttaacctctgtgccccaagcataaaggaactcccctttcccttggagtaaattcctgaaccacccccctagttttcaagcccctcccctgcatgggccaagcccttactgcaggtggcccctcactgccccccacgatgcccctagacttccagcctccgctcagcctgcctgacctgcccacccctggctgtccagttgtgcctcctcattcccagtctaggcagccctgcttcccccagctggacgagagcatccagccctggccattcttgagacaaacacctccttccatcatggcctccctacaggaagcggtgctgggcccgtcctgtgggacctcagtccgaatcaatgacaccaccaaccctgcagaggtgtttcacggatgctggccaggatcccctcctcctctccctcctcctctccctcttcctctccgtcttccccctccccctcctccctctccccctcctccctctttcatctcctccccctccctctccccctcctccctctttcatctcctccccctccctctcccccttctccctccttcatcttccccctcctccctctcctcccctctccctccttcatcttccccctcctccctcccccttcctccctctcctcccttccctcctcctcctcattcccaagcactgagcaccgcaggccctgagcaaaggctcaaagcgggtacgggttatcttgaaagctacattcaggctcgtgtttacccctctgcagatgcatgatcaaggaaagtaccggtgatagaaggaaaagaggaagatttgggaatgtgaggctctggtgttcttgggctttgctcgcaaatgaaatgagacagccattcctgccccctcccctgttggctgcaggcctgcaccgagatcgacgccatcagcgtggagaagaggcgcatcatgcagcaatgggccagcagcctggtgggcatgaagcaccgcgacgaggcgcacagggcggtgctggaggcgctcaggtactgcagggccacaggcagcgaggatgtgcgggaaccccaggggtccgtggcaggcccgccccacaccccctctctctgggtccaccggatctctgggacagagggtgcaccttgatccccgggtccgggcttccgtccggaaagctccctcattgtttggtaagatttcagcgattcttaaatcctttccaacactgcggcgctgggaggggagaggcttttctgctcagatttcctggcaggattaagtagaaacagagcagggtaaagagaaagctatctttgggaggtaaaggtgtccctttgatttgcagtatcaccacctgagtgcggaaaccccatcccttctcgattgttctgcctgagggctgcattccaaccgaaatcctattttaatctccaaaggaaggggaggaagaggcctcctctgggcatcccctcacttctggggatggatgcgtggctcagggcagggcgttggagacacaggtgctgccttcattcctaaaaccacccagggtgaccaggtctcgggacgcggaaagaaaaagccgggcactgtggtggcacgtgtctcacccgctgagctttaacttcccctccacctttcgtagtctccaccccttgtgcccagcacagagcctggcatacagcaagcgctcaagaaaggctggaccaaggaatgagggtctggctggccccacagcacccgcagccaggcagccagcagcagtcacacaaccaggagatgcttttccttttgggtgctgtgattaaagaaacaaaatgaaaccattttgtttttaaaagtttttagaccaaaacattttcaaatgaataatattggattaaccatactcatttctggccaggcgcagtggctcgcacctgtaatcccaacattttgggaggctgagacgggtgggtcacgaggccaggagttcaagaccagcctggccaagatggtgaaaccccgtctctactaaaaatacaaaaattagccaggcatggtgtgggcgcctgtaatccccgctactcgggagggtgagacagagaactgcttgaattgcggaggttgtagtgagccgagatcacgccactgcactctagcctgggagacagagcaagactctgtctcaaaaaaaataaaaataataataatactcatttccttcactcccttgagtcaacaacataaagccaaagggaacactgtggtttgatacaggcgatgtttggctgaagcttcgtttcccctgtaaagatgcaggtcgaggaaccagagccagctgtggccgggcaagggctcctctccctgtgtcaccagggttgcctgaacaccaggacgagaggacttggccatctgcccacttgggtgtctttttcctcctgccccaatgctaggacttgatacctgactgtttaattacacggctcagctgccacgggccttaagaaaagtcaaggccaggttctctctgagggtccagcacctggcctggctctccgaggctcatggcctgtgaaccctgcagcgtccccaagggaagacgtcacctccgagatggtcctgttgtccagctctcccctgcatcccagactaaccagtgtcctctctgcaaaccgtcctcattgccctcagagacatggcttccttttggttgcaaacattgtaaaaatcgtattcgatcaggtctcctcctcctcggcccgcagtcactagaaccccctcccaagacaagcaaaggcacctggttttctgggatcccctgcctaacttgtgtgcaattgcaagaaagcatatgcgttcacccggagtcttccttccctctcttgctccgtgggagcacaccacactcactgttctgcacctctttgctttttccatttaacagcgtgtccctagagcgcttcccaagtcaaaatataaacaccgctcgttcccgcctttctaccacatggcattccgctgggatacttctacggggaagcttcctgcccggggcatcgagggcgttcgcgtccgtctgttatggcggtgctgctgtagataaccggatccgcgaatgctaacgctcaccaggatgctatatagccttttttatattgcctatcaagcccggaatgtctgggtctagcgggtattgctaagtaggattgtgacagtcacgcccccggcagcggtgtttcaaagtcccctgacagctcagcatgttgtcacacttcaggactgtgccaatccgattgatgaagaaaatagataatcttgttttataaaacgtgcatgcgcagaatgttgagtgaatattttagtggactatgtacacgcacaaacacttcacaacgagtgagagagcctctgacttcacctgcagcttgccacaccaaggccccggggaggagtgaggcccaacttttatttattatatttttgtggttcttgcaatggagtctcgctctgtcccccaggctggagtgcagtggcaccatctctgctcactgcgacctccgcctcctgggttcaagcgattctcctgcctcagcctcccaagtagctgggattacaggcgtgcaccaccacgcctggctaatttttgtatttttagtagagacggggtttcaccatgtgggccaggctgatcttgaacccctacctcaggtgatccacccgtcttggcctcccaaagtgctgggattacaggcgggagccactgcgcccggccagtcttttaaaagtgcaggccgtgtagaacattgtgagaagtataaactgtaattacagagatttgctgtttgcacccagatagatttgaagaagcaacttggagacaggtttaatagatcagggccattattacagaaataaattattgcatagcttaggacttccaagctaggagtgcagtgactgaactatacctcaaatattgaccttgagatgttcagatttgtagagcatcttagaaaatggtgacattcctggctgatggtcaggatggtgcataccaggccggtaccctggtggctgtctgggcatttctggagccttcaccctgcgagatccccatggggcaggaccccctggcccagaagcttggttttgccatcacaccgagaaggcacacttgtcctggagttagtttacatgaatcgagctcaccagagcctgacgtgtaactgagtataatagcccatttatgtgcatgatgaaatataaacaccaaagaaccgaatgctccacgctcggactagcagattcttatctgtgggggaggacacaggagcggatgacacagacccctgctcagggaccggctagagggcggaatgcctgggccccggccctgtctgcttcctgcttcttccccgaagttcatggcctgtccgtccacatgggcgggaggtgtcccgcgagcagccctcaccctgaccttggctgctttctccattccattccccacccctcctccctcctgacacccatggcattttttcagataagttaatacctttgattaggttccagccaaacctcaccctttctctttccccatgcctttgtgtctctcttcgtctgatgtcgagtctacaacctaatgctttgaagacagactgacttccccgtccttggtcagggggttgctgctgcgtggggggggcggtaaccataatcttgcccccgtgtctcatacacaagctgcaagcttagctcagaagctgtgcctgtcttggctgctttttcttgctgtcttccctatttttgcaggagttttgcacacggtcataaaagttcaggagaaacatgaaacgtgttattctgtttcctgtttaagtcgacctgaggaagctgaaggggtcaggcgcggtggctcacgcctgtaatcccagctctttgggaggccgaggcgggcagatcacgagctcaggagctggagattgaaaccatcttggctaacatggtgaaaccccgtctctactaaaaatacaaaaaaacagccagacctggtggcgggcacctgtggtcccagctactcaggaggctgaggcaggagaatcgcctgaacccgggaggtggaggtggcggtgaagcaagatggtgccactgcactccagcctgggtgacagagcgagacttcgtctcaaaaaaataagaaagaaaaagaaaaaaaagagagagagagagacagagagagagagagaaaaaaagaaagaaagaaaagaaaagaaaactgagggcttgccctaatctcctagacttccttttccctcagtcctgatgatggcagagacgactcctcaaaggctcttccccttggcatggagtgctggagcctgccctagggagggaggacaggatggagcaagacactgaacgcagaattagagctaggcaacgagcgggtgatttcactgtttcctgggtaacaagccccaggctcagctcggtctggtgtagcccctcaaaggggacactgtccttgcccccagttgatggaggaggaaggagcggaaggcagtgtgggatgggttgggtgtgggcattgccacagtgtccccagcaggcctccttctagcctggggatctggcaggtgggtcccagtcaccaccaatgccccatatacccaaggacactggtgacccagcagacctgaggccacagaccaaagacagagtaacaaccccattaaaaatgtgcccccatgggcgggcatagtggctcctgcctgtaatcacagtgctttgggagactgaggcaagaggatcccttaagcccaggagttcaagaccagcccgggcaacatagtaaagtaagaccttgtctctaaaataaaatataaaaaatagccaggtgtggtggtgtgtgcctgtggtctcatctacttgggaggcagaagcaggatgatcacttgagtccaggaatttgaggctgcagtgaactgtgattgcacgaatgcactccagcctgggcaacagagcaagaccctgtctctcaaaaaatttttaattagcggggcatggtggtgtgcacctgtagacctgtagtcccacctactcgggaggctgggtgggaggattgcttgagcccaggaggtcgaggctgcagtgagccgagatggtgccactgcactccagcctgggcaacagagccagagcctgtctcaaaaaaataaaaaagtgtccccagacacaggggcatgggtgaggcctgtcaggactgctgtggtagctcatggtgtcctgtcccttcttcccaccagggaatgaccgtggctgtgggcacaccccctgtccatctgggcctgcctgtgggagctggacactgccctccccagcagccagaagtcctgaaggaaccgtgtgtgaccctcaagaccagaccgggcctgccacaccaacccttcaaagaccgcagcggtccaggcaatccaacgtgggtcccaaagctaggtgaataaccacgaggagcccacggtcagccccttcccatcacatacgcagggaaatgggtcactttcactttcagaaaacaaagcctggaccgcacttaacttggaggcagataacctaatcagaattcacacacgcctgggacttggagccaaaagcacccgtgctcttacctgcctttgtcctatttcctggcgggaaatacagagggcagacaggtcttggcccgcagccacagcccctttaccccaagatgtgactcggtcagccacacggcctcacagcctcctcccaggccctcagctgtggccacggcagccaggcaggccgacccaaggacaaaagccacgggcagtgtcctgggagagaacccggccttgaccacaggctgctggacacctcctgtgtcccccccttaatcctcagaggcacggtgcccaatgcctgggccatattccagattccatccgttctttttgtttcatttacagacagtccccgacgtcacgatttttggactttaccatggtattaaagcaacaggcaggcaacagaaactgggctttgagtcccacacaacctccctggttttcagcacggtattcaataaattacatggatgccccacactttattatcaaacaggcttcgtgtgagatgattttgcccacctgtaggctcatgggagtgtcctgagcacgtttgagggaggctgggctgagccggggtgcctggcaggaaatctgcaggaagtgcattttgggtttttcagcttttttttttttttttttttttgagatgaagtttcactcttgtcgcccaggctggagtgcaatggtgcgatctcagctcactgcaacctccacctcctgggttcaagtgattctcctgcctcagcctctcaggtagctgggattacagacatgcaccaccaccatgcccggctgattttgtatttttaaaagagacggggtttcaccatgttggccaggctggtcttgaactcctggcctcaggtgatctgcccccacttggcctctgaaagtgctgggaattacaggcgtgagccacggcaccagcctgcattttggacttaggatattttcaacttacgatgggtttgccgggctgcatccccaccgtaagctgaggagaacctgtactttctattggtgcctgctgatctacggagtttttaaagtacgatttaaaaaaataataatccttatcaaggataagtgattgcgttacaggacatttgaaaaacagagaaaaggatttaaaaataccatcgactttctctttttgtgacaagaagactcattagcatgtcagcacactctcaggcacacatttccccgagtgttaggagttctgttgcacagtttgtaactgtatctttttaaattgggcatcttatttttattgtcaaatttagacatttataaggctgctccttcctaaaaaaagaaaatgagtaacttatttacttgaagtcaggatgactggggataatttatgtacaaaattgcatacctccagccctggcaaccgctgtgccgccttctgtgcctatagctctgccatttctagaatgtcatataaatggaatcgcgcagtctgtagcttttcttgtctggcttcttccacttggcatcatgcttttgagacccacccatgttgcaagatcagtagtctgttcctttttattgttgaatagtattcccttgcacggatacatcagatgtatttgtccatccaccaactgatggacatttggcttttacctttggaataccgtgaagaaagctgctgtggctgtcctgaaaagatctttgcatggagacgtgtttccgtttctcccgggtaaatacaggcgcatctcgtttcagtgtgcctcgctttctcctactgcgtggaatcgcttttgtttgtttgtttgtttgtttgtttgtttgtttttgagatgagtttcactctgtcacccaggctggagtgcagtggggcgatcttggctcactgcaacctccacctcccgggttcaagcaattctcctgcttcagcctccagagtagctgggattacaggcacatgccaccatgccctgctaattttttgtattttttagtagagacggggtttcactgtgttagccaggatgatctcgatctcctgacctcatgatccacccgcctcagcctcccaaagtgctgggattacaggaatcgcattttttacaaattgaaggttgacggcagctccgtgtggagcaagtccaccggcaccatctctccagcggtgcgtgctcacttcctgcctctgcaccacatgttggtcgttctcataatatttcaaactttttcattgtcatcgtccgttatggtgatctgtgatgagtgacctttgatgttaactattgtaattggtttttggcaaagccacgaactgcccttgtttaagacagcaaactgaatcaagacatgtcgtgtgtgtactgactgctcgccggctggcgttcttccatttctgtccctctccttgggcctccctattctccaagactcaacagtattgaaattaggcctacaatggccactaagtgctcaagtgaaaggaagagtctcatgcctctcactttatttttattttatttatttatttttgagacactctgtcccccaggctggagggcagtggcacgatcttggctcattgcaacctctacctcccgggttcaagcgattctcctgccccagcctcccgagtggctgagattgcaggtgcctgccaccgtgcccggctaatttttgtatgttagtagagacagggtttcaccatgttggtctcgaactcctgacgtcaaatgatctgcctgcctcggcctcccaaagtgccgggattacaagtgtgagccaacgctcctggccgcctctcactttaaatcaaaagttagaaatgattaagcttcatgaggaaggcatgtcaaaagctgagataagccaaaagctaggcctcttgcaccaaagggatagccaagttgtgaacacaaaggaaaagtttttgaagaaaatttaaagtgctgctctaatgaacacacaaaagaaagggaagcagcctaattgcgcgtctggagaaagttcaggtggtatggacagaagatcaaaccttccggccgggcgcggtggctcacgcctgtaatcccagcactttggaaggcccaggcaggcggatcacgaggtcaggagatcaagaccatcctggctaacacggtgaaaccccgtctctactaaaaatacaaaaagttatccaggcatggcggcaggtgctgaggcaggagaatcacttgaacccaggaggcggaggttgcagtgagccgagatcgcgccactgcactccagcctgggcaacagagcgagactctgtctcaaaaaagagaatgcacctggtgggcatgctagctcaagtaatctcagcactttgggagggcaaggtgagagaattgcttgaggccaggagttctagaccagcctgggcaacatagcaagagcctgtctctaaaaccgaaaaaaggaaagaaagaaaatgtacctggtcacccaagagttttgatggagctggagctgtgcaagatgaatgttgtttccacacctgtaacacagcatttattctgcaacccatgggttgaggagtaatttcaactttcaagtcttactattgcagtaatacagtctgtaaagctatagctgtcatagatagtgattactctgatggatctgagcaaagtaagttgaaaaccttctggaacagactcaccattctagataacgttaaggatattcgtgattcatgagaggaggtcaaaatattactcttggtttttttgaggtggagtcttgctctgttgcccgggctggagtgctatggtacgatcttggctcactgcagcctctgcctcccggattccagtaattctcttgcctcagacttctgagtagctaggattacaggtccttaccaccacacctggctaattttttatatttttagtagagatggggtttcaaccgtgttggccaggctggtcttgaactcctaacctcaagtgatatgctcacctcagcctcccaaagtgctgggattacaggcatgagccacctcagcctcccaaagtgctgggattacaggcatgagccaccgtgcctggcccaaaatattactttttttttttttttttttgaggtggagcttctcttttgtcgcccaggctggagtgcagtggcacgatctcagctcactgaaaactccacctcccaggttcaagcaattctcctgccttagtctcccaagtggctaagattagaggcacctgccactacgcccaactaattttatttttttaaggttggaattgcttttattggggacagatgtgcaagtccccgctcatggtcaggttagtgttctgcccttgcagaggtgccagcagcctgacacctccatctgccgcccgccccgggttagtggaacatgcaaagctcagagggtggaggcaggggtggtcgctgctgaagccagacgtccagctaatttttgtatttttagtagagacgggttttcaccatgttagctaggctggtctcgaactcctgacctcaggtgatctgcctgcctcggcctcccaaagtgctgagattacaggcctgagccactgcgcccggccccaaaatatcacctttaatggcaaaactgcaattacttttgcaccaacctaatatcaacattaacagaagttgattgtaacgcctgtggatggctttgagggctcaggacttcagcgcagaaagtcactcccgatgtggtggaaacaagaactagaatgagaagtggagctgagatgggatggaattgctgtgttcatatgatcaaactttaatggatgaggagttgcttcttacggatgagcgttttcttgaggtggaatctgctcctgtgaagatgccatgcgcattgttgaaattaacaaagaatttagaatattccataaacttggttgatgaggcagcagcagggtttgagaggactgactccaattttgcaagaaggtcttgcgtgggtaaaatcctatcaaacagcatcacatactacagagaaatctttcataaaagaagagtcgatccatgtggcaatggatgtggcaggaagagtcaatccattgtcttattttaagattgccgtccaggtggggtgactcacacctgtaatcccaacactttgggaggccaaggcaggcagatgacctgagctcaggagtttgagaccagcctgggcaacatggtgagacctcatttctacaaaaaatacaaaaattagccaggtgtggtggtgtgcacttgtagtcccaggtactcgagaggctgagggaggtggtggcttgagcctaggaggctgaatttgcaataagccaagatcacaccactgcactccggcctgggtgacagagccagagtcagagcctgtctcaaaaaaaaaaaaaaaaaattgccacagccaccccagccttcagcaaccaccaccctcatcagtcagcagccagcaacatcaatgcaagaccctctaccagcatactttatcaagtatgacttgataaacacttaggtgattgttagcattttttagcaataaagtttgttttttttttcttttttaaaatagagtctcattccattacccaggctggagtgcagtggtgtgatctcagctcattgcaacctctgcctcttgggttcaagggattctcctatctcagcctcctcagtagctgggattacaggtgcccaccacgacacctggtatttttagtagaaatagggtttcaccatgttggccaggctggtctcgaatttctgacctcaggtaatctgcctgcctcagcctctctaagtgctgggattacaggtgtggaccaccacgcccagcctaaagtaagtacattctttagacatgatgctattgcacgcttgatagactacagtaaagtatgcaccttctgtatgcactggggaaccaaaaaagattgtgtgacttgctttactgtgatacttgcttaattgcggtggcctgcaactgaacctgcagtatctccaaggttccggctcaacatacattttactttataacaaatgcttgccggccgtggtggctcacacctgtaatcccagcactttgggaggctgaggcggatcacttgagctcaagagtttgagaccagcctgggcagcatggcaaaaccccatctctacccaaaaataccaaaaattagctgggtatggtggtgcatgcctgtaatcccagctacttgggtggctgaggcaggagaatcccttgagcctggtaggtggaggttgcagtgagccgagattgcgccattgcactccagcctgggtgacagagcgagactccgtctcaaaaataaacaataaaacagctgctgcggtgttttcccaagtgactggttccaatttgcattttctccagcaatttatgagagtcccagttgttccacatcctcgccaacatttggtattatcagtcatctaattttagccatcaaatatagccattagcaaatgtgtggtgcatcgccttgcggtctgagcctgcgtgtccctaatgactagcgatggtgagcatctcttccccggcttattcgctattcctgtgccttctctggtgaagcaacttctgctcatttttccgctgagtggcttatcattgagttgtaagagttcttcatatcttctggagacatcttttatcagacgtgtgctttgaaaatatttttgtcccagtctgtggctttgtcttttttacctctttacagtgtcttttgaagagcaaaagttttaaatttttgtgaagtccaacttattaaatattttctttcctgattcatgctttttatgtcttctctaagaaatctctaagggtcaggccgggcacagtgtggctcatgcctctaatcccagcactttgggaggccaaggtgggcggatcacgaggtcaggagattgagaccatcctggctaacacggtgaaaccccatctctactaaaaatacaaaaaattagccgggcgtggtggcgggcgcctgtagtcccagctacttgggagggtgaggcaggagaatggcatgaacctgggaggcggagcttgcagggagccaagatcacgccactgcactccagcctgggcaacagagcgagactctgtctcaaaaaaaaaaaaaaaaaaaggaaagaaaaagaaatgtctaagggtcacgaagattttctcccaagttttccactaaagttttccaggtctcgcttttaggcatctggtccatttcaagttcacgtttgttgtggtatgagcggggtccaggctcaggttttgtgtgtctctctctagttgtcccagcaccacttgttgaaaagactgtcctttccgtattgaaatcctgtgacacctttgtcaaagatcaatgtattgtgtgtgtgtgtctgtttccagactctctattctgttccgttgatctttttgtcattctttcaccaataccacattgtctttctaactagagctttatggaaaatcttgaaatcagatagtctgagtctttgatgttgttttacaaaattattttggttactctaggtcctttaggtttccatttaaattttaaaacttgcttgtcaatttctggggaaaaaatgccttctgggatgtaactgaaattacattgaatccatagatcagtttgaagagaattgaggccttaataatattaaatcttctgcttcatggacatggcaaatctctccagtatcagtatctttttttttttttttttttgagtcagagtcttgctctatcacctgggctggagtgcagcggaacaatctcagcttactgcaacatccgcctcctgggttcaagtgattctcatgcctcagtgtaccaagtagctgtgaacacagccacacaccaccacgcccggctaattttttttgtatttttagtagagatggggttttgtcatgtgggccaggcttcctttctctattgatagtgtcttatcctttgaataagtttttattcaaatagtcagaaagtactttcttcttggactagaataataccttccatatttttctcacatctctccccagtctttcaattctctttcccaagcaacctgttactgtttcataaaggtctttccagatagatttcgttcatacatatgcattattctcgggtgtttatctctccacttaaaaatcacccgcggccgcttagtgtgtcccgctctgcagcttggtgtttcttgtgctgtgtcttagagttattccatgtcagaacacatagaaatcaccgttgttctttgcagttctcttcacactgtgttctaaatgatgcctgtgccataatttaatcatcctcatcgatccataatgaggccctttcctgttttttggctttttctgatctcatcagtggatcaataaatatccacacacattaaaaatagatactggatcaccaggcacggtggctcatgcctgtaatcccatcactttgggaagctgaggcaggtggatcacttgaggtcaggagttcgagaccagcctggccaacagggcgaaaccctgtctctactaaaaatacaaaaaaaaaaaaaaataggcaggcatggtggcacacgcctgtggtcccagctactcaggcagctgaggcatgagaatcgcttgaacccaggaggttgcagtcagccgagatcgcgccactgtactccagcctgagtggcagagcgagactctgtctcaaaaaaaaaaatactggatggccaggcgcagtggcccacacctgtaattccaacactttgggaggccgaggcaggtggatcacttgaggtcaggagttcaagaccagcctggccaacatggtgaaaccccatctctacaaaaatacaaaaattagctgggcatggtggcacacacctgtaatcccagctacttgagtggcttgaggctgcagtgagctgagatcatgccattgcactctagcctgggtaacagagtgagagactgtctcaaaaaaaaaaaaagaaagaaaggaatgaaaggaatgtttaaagtaccgcagaacatctcagaataataggaaaacatgcctcacacacacaaaattcaaatcctcatgctgaggcgtaagaatgacttgaacccaggaggcagaggttgcagtgaggcaagatcgtgcctctgcactccaacaaatacaggatttgaatctgattatttcatttgaatcagtattttagatctgattatccgatatctgtgttttagagcttgacgttaattacaggtatctcatcgcagcatgccgaggggaaagacaatagaatttgaagtgggcccactggtgttccctcagccacgctgtttcctgcagaccttgggctagtgattgaaatgctctgagtctcaatggccacatctgtaaagctggactatttccttcctaggattattgtcatggttaaggaaggtgggcagatgagaacccctagcccaacgtctgacccatgcgtcactttccttctccccataatcacagtacaaaagagttgtcaacttgggctttcaatagataatagttctcttgatctatttgaaaataatagtcaagatttggctattggctgcaaaaatacagtgagggagaaggaacaaggcccagtgttcaatagcatgtcacagtgactacagttcacggtaagttagtgtatatttctgaatagctagaggaaaagatttggaatgttctcaacacgaaggaaggatcatgtgtgaggtgatagatggccggttcccctgatttgatcatgacatgctgtatgcttgtgtcaaaatatcgcatgtacctctcaaatatgtgccaatctatccataaaaattttttaaagatttggctgctattaaaagagttggtttcctgctgggtgcagcggctcacacctgtaatcccagcactttgggaggccaaggcaggcacattgcttgagctcaggagttggagaccagcctgggcaacacggtgaaaccccatctctacaaatagagtttaaaaattagccgggcatggtggcgcacacctgtaatcccagccactcaagaggttgaggcatgagactcgcttgaacccggcaggcggaggttgcagtgaaccgagatcgcaccactgtatttcagcctgggttacagagtgagactctgtctcaaaaaataaataaataaataaataaataagagttggcttcctaatttatttctctgtgcattgagttcgccttagtgagctccctcgtgtggggcgcagctctgtgcactggctctctgatgtctcacacgtaactggctctccccgctgcatttctacagaggatgccagcatcaagccaaatccaccgacggcgagattgaggcctataagaaatccatcatgaaggaggaagaaaagaacgagaagctggcgagcatcctgaaccggacagagacggaagccacactgctgcagaagctcaccacccagtgcctgaccaagcaggtggccctgcagagccagttcaatacctacaggctcaccctgcaggacacagaggatgccctcagccaggaccagctggtgaggccgggcccgccccacaggtcacacctggcgcacggtggtgcctcttcaggcacgtgcaccctgtggctccttgtctccaggaacaaatgatactcacggaggagttgcaggccatccgccaagccatccagggcgagctggagctcaggaggaagacggatgctgccatccgggagaagctgcaggagcacatgacctccaacaagaccaccaaatacttcaaccagctcatcctgaggctgcagaaggagaagaccaacatggtaggcccctgccccagggaggggctgtgcgaagccccctgcagcctgggcatatgagggcaagccgtcctggaggcggagagggcggagtcagtgtgagcagagggccctcctgtgctcactcctttccatggtgttcaggttgtaagggtgatacatttttactgtagaaaacctagaaataggccaggcgtgagccaccgcatggccagctgccagccaaaggctgatttccctggggggacctggagtgtgacttcgacgtccatggcagggaacccccaattgtgagctcatgttcgcatcccctgggatcttgctttatcctttatcacctgtggtgggggtggaggggacttgtgtccttagaaaaaacaattccttacttgaattgttttttctttgcctcttcccgaggggtgaccgcctccccaacaccccgcctcaagcaggcccctttggaggacccccagaggctaccacaggctccaccatttccagagcacatcctagcagtggggcctgcccaacagtccccattttagtctcagaggagggtgacagattcccgatgccaagctctgccggttttgccctcctgaggggtgggaaaggagctggccaggcagagctgaagggcgtggtgggtgtgaaggagcccatccagccgtgctgctaccagccaagtccagttcccaatccccaggcccccgggcccccgccgagcccctgtctgggcagcccgataggtcatacgtgttttgctgccagtttccagaagagggcagcaaagagtcttggaccaacacattcgtctattacgacaattttccaaccgatgccagtccagctgctgaaaagagtacccccgacacgatgtttgaactgctcaaagcctcatgggctgatagaaggtggggtggggaggcatatctgggaggaggagcaaagtgtggatgggcgggaccacccatccggagctggggtcaaccacggggtccaggcagttaatccagggatggtgtagatgcctagggggagccagggtgggctccacagagaccacaaacagccaggagtggagcgggggtgcaggcccggctgtgacggggagggactgaaggggacttggagccatagcccctgcagggcagttggggaggggggaggcagggagtccttggggggcccagatctcagggtgaacttggcagaggaggaggctgcgagctgacattgccacacaactccagatgccggaagcttccactccaggtgggcagggtctgggttccaccacctggggacattgggtctcctgggaagccgcccgtggtggccagtgagagacatggagcccacaggcgtggcgggaggagaagctcagatggccctgaggaggctggggtaggcaggagccacagtcgtgagagagccaaggccttgtgtggcaggagccgacgggcaggggtgctcagggcagacacagggcccgaggccacctgttagaaccatgccctggggaagaggaccctgtcctggtggtgacagcatctccctgttcccagagcagctttggccacaccattgcagctgtgactgccactgcctcactcctgattatcacaaacgtcctctcgataaaccccccgttgccagaagggatccaaagtctgtctaatgcctccaaagagcccacagaggaggccagcactggcggctcagacctgccggacagcaggaggggtcagaacgcatggaggaaccagtgtctaacaattgcttcttgcttcataaactatgctgcaaatgtgatagagtacagcacagccattacagcttacagagcacaggaacataagacccgacttaccagattaaaaagcaggttagcacccagtgtgtagggtgtgatcctatttttattttggagaattatatagaaaagactgggaggaaaaatggattcagatgggaatggtagctaacttgtgtcagaattgcaggcaattgaatgtgttctctgtcctggcctgtattttcacatttcctcacaatgtgtgtgctacgatttaagaagtgtgttagtctgatctcacactgctgtaggaaatacctaagactggataactgataaaggaaagaggtttaattgactgacagttctgcatggctggggaggcctcaggaaacttacaatcatggcaaaaggcgaaacaggcacctccttcacaaggcagcaggagagagagtgtgtgtgaagcaggaaccgtcaaacacacaaaaccatcagatctcatgagaactcactatcatgagaacagcatgggggtagcggcccccatggtccagtcacctcccacaggggccctcccttgacatgtgggattatggggacacaattcaagatgagatgtgagtggggacacagccaaaccacatcaataagaaaagctaataccatgatctctcttttctgtaaaaagccaacatctgggttccaacaagtaggtcccttgctgggtcctggagacagtgggaaatccagcctcctgcactcgtgactgtgcgtttggaatatctccagaggaacatcccgaccgtcagggaacggtggatcagcaaactcgtcccgggccttgggtgggggcaatattcacaggtatttcttttcatcaattcagatgacacatctttccaaaatcaacggtgacattgcccagaccaccctggacatcacacacaccagcagcaggctggacgcacaccagaagaccctggtggagctggaccaggacgtgaagaaagtcaacgagctcatcaccaacagccagagcgagatctcccggcgcacgatcctgatcgagaggaagcaagggctcatcaacttcctcaacaagcagctggagcggatggtctccgagctgggggtgaggtcccaggcagggagacgtggtccccggctgactgtggtgcctggtggggcagagccccctcagatcccccacggtcagacatgaactcctggaaggcacagaactgcctctttccctacctgctttacagacaaaatggcacgtgtgccaagcgctctaagtcacatttttctgcacaaggccagagagtattccggctttgtggccagttggtctctctggcagtgacacggctctgcctccatagcgagaaggagcataggtaaaacgtaaaggaatgggcacggctgtgtccaatcagatgttattcaaggccactgaagtctgaattccaaataattttcacccagcacgaaatattctgctgctctaagaaaagtggcctaatgcgtttgaggcctgatgccatatacgtcatccaggtccctgtactctcaaagcccctttgggttccagaggccccacccaccctgccagcgcacccaccatggggaagctagagggggctccagagccccttagccatatttcctccagcggggtctgtggcttgcggccctgctgagagctaacttgagcccctcggccttcgtccagtttcatgacctcagggttccaggccctctgcagcccactcacaaagacctttgagcccaagaaggctaattttgctttttttttttttttttttttctgagacggagtcttgctctattgcccaggctggagtgcagtggtgccatcttgctcactgcacatctgcctcctgagttcaagcgattctcctgcctcagccttccaagtagctgggaccacaggtgtgcaccagcacacctggctaatttttgtattttgggtagagacggggtttcaccctgttggccaggctggtcttgaactcctgacctcgggtgatccacccgcctcagcctcccaaagtgctggaattacaggcgtgagtcactgcgcccagccctaattttgctttttgatgaatatccggtctagggggaagaagtggggcccctggagcttgaaatcaaaaggctgagcaagctgatcgacgagcacgatggcaaggcggtccaggcccaggtgacctggctgcgcctgcagcaggagatggtcaaggtgacacaggagcaggaggagcagctggcctccctggacgcatccaagaaggagctccacatcatggagcagaagaaactacgagtagaaagtaagagccgccgtgcccggccctgcagtgatgctgagacgagctctgggacgtgggcacctcccaggggaggggcactcagtggggcacgtcgctggatttgcacgcagccttaaaagcaaataacaaacgcgcatgctccctgtattttgtaaatgtgaaccactgcctgcccagctgcccagttcgcagtcacagcgggagggttgagaaatgtcacgaaatggctccaagctcacggacttcagagctctccttgagagaggagcatggaaggttatcatccccgccaagccagggcactcaggtggaaacactggcacgggaaaagccagggtcctgccaggcaggctcctggtgctgtccccacatcacctccagttgggcttagaaaaccattccaccggggctccccaacccttctgaggcccaaggggctgccaaagcaccagggtgcctggaatgatggaggcgggcatccttcctggaccactctccacccacatgtccacctgccgagacatcccgggtcctgcccggtcttgggtcggggatccatgctggtcaggcctgcagcagagcccccatgggaaatgctgcccagacacatcatgtgcccttctcggaggtcctgctgcctctcgccctgcccttcttgggttgcccaaacccgtctgttggtgagtagcaagtcccaaaagaccctatggagctgtcagctgagtatcggtgtcccaaggcaagagctgccgaaataccatgctgtgagatggggaggatcacccatggagagggcagagagaggggctcacatgcccatgtcctggggtagtcagggcacaccatggggacagcaggaggagctggagaagccctgtgaggagtggccagcggatgaaccagctgtggcctcttgtgccctccacccatcttaacatcaagaagagctgttgttttctgcccctacccctgagcttggctggggcagggcaggggtctaagggcctccctctcctggagactcacagtgtctgagcatcaaccaggtcccggtgctccacagatttgcaagtgtctgggggagggagcctggccctcccacacgccctgcccacacctgctggctgtccccacaggcaggtcctctcagttccgttggaggaccaggctttgggagcttagcagccaaaaagagaccccctgtcctctcctctcctctgtcctggcagggacgagattcaggcaggagcgccaggaacgacaagagggaggggatgaagggagctacagggagagacaaaacctggctcacctctcggacactgctgcctgcgggcgaggacccgtaccctcctggggtctctccctgagtctctgttttctgccataggcaagattgagcaggagaagaaggagcagaaggagatcgagcaccacatgaaggacctggacaacgacctgaagaagctcaacatgttgatgaataaaaaccggtgcagctcggaggagctggagcagaacaaccgggtgacagagaatgagttcgtgcgctcgctgaaggtccggccgtgtccacgcagtcccggggctcaggacgatggagggcgggggtacggtccttgcggtgggcgttctgcaccaggatgtaatttccacacccgttcaagatgcttgtaggggtattagaaatccagcctgcagccctgccctcggtgccgggatagagggcaccagccccggcatccacaatcccatggccctccccacagctgtcccgccccctcccccatgcaggcctctgagagggagaccatcaagatgcaggacaagctgaaccagctcagcgaggagaaggcgaccctcctgaatcaactggtggaagcagagtgagtcccagtctccagccacacgtgggtcatgaaggtcactgcacctacaggcctctgtccgttgaagaccatgtaggaggccaggtgtggcagctcacacccatatcccagtgctttggtcattttttgttgttgttttgttttttgttttgttttgttttgtttttagacagtcttgctctatcccacaggctggagtgcagccgtgcgatctcagctcactgcaacctctgcctcccagcttcaagtgattttcctgcctcaacctcctgagtagctgggattacaggtgcccgccaccatgcctcactaatttttgtatttttagtagagatggggtttcaccctgttggccaggctggtcttgaactcctgatctcaggtgatctgcccacctcagcctcccaaagcgctgggattacattcatgagccaccgtgcccagcaatcccagtgctttgggatgccaaggcaggaggctcctttggggccaggagttcaagacaagacggggcaacacagtgagaccccatatctacaaaaatgttttaaattggccaggcatggtggtgcatgccggtagtcccagctactcgggaggctgaggtgggaggatcgcttgagcccaggaggtcaaggctgcagtgagctaggattgcaccactgcactccagcctgggcgacagagcgagaccctgtctctaaaagaagaaaaagaccacctgggcatgggtctggaacccaccctagtggatcccagattccccacagagtctgtctaccccccttggtggcagttcttgagccaaacgagttactgctagaaattgaagggtttcctttgtgataaagtttttaagtatccattattttatggtgtctgattattaaagtaacacacacccagctctaaacattttaaactatacaatgcgtgcaaagtacccagggaaaattgcatataattccaacgcccttcacttcccagaaaaccaatgtgtagctatattcctttcttgttttgctctgttttttacacaaatgggattgtttcagaagttcccccttgaagcactttagtattttcatggccatctttccgtgtcacacacgtgggcccatatctccctgtggaaagggtgcggagcaggcgtggtgtggaggcaccgtcctttcttcagcgtgctccggaagggatgaatagcgcagggatcgcctgttccttgcggtttgatagaatctaggcaaaaaattatctgggaccaatgctttggggggcttgtatctttggtgacatttaaatagcttttagactattggtgtattcaggctttttactttttcttaagtcagcttctatcaattatactgactttctcagctcctacagttatatatccctgttctctctctctctgtctctctgtttcttccccacccccatctccctccctccccctgtatgccagaggttggcaaacgtttgcataaggagcccagtagtgaacacttcaggctttgagagcctcacgctttctgtcgcagctgcttggctctgccattgcagcttgagagccttgtaaagccttagagtgtgagctcaccgaagcatcagaagaaaactcctaatttcttacactgcctctcctacctctaaagacaccagattatgctttgggagaaaaaaatccaactggcaaaagagatgcgttcctcagtggattccgagatcggccagacggagatccgggccatgaagggcgagatccacaggatgaaggtgaggggaggagagcggcgtggcagggcctgctgggtgccagcccttgggctctggagacctggccacaccaaggcctcggctctcccggggctcctgtgggaaccacactggccacattggctggtggcaatgggtgagatttccagggagcgacccgctccagcagagtgacctgcactccagccgagcactggcaaagcgcacgtcccccttgacccagcttttaccacacgcttgcttttaatgtgcagaaatattgcagaacaacacaggacgcacacaggcacgtgcacgaacaacacgggacgcacgcaggcacgtgcacgaagaacacgggacgcgcgcaggcacgtgcacgaacaacacgggacgcgcgcgggcacgtgcacgaacaacacgggacgcgcgcaggcacgtgcacgaacaacacgggacgcgcgcaggcacgtgcacgaacaagggacgcgcgcaggcacgtgcacgaacacaggacacacacagcacgtgcatgaacaacacaggacacacacagcacgtgcatgaacaacacaggacacacacaagcacgtgcatgaacaacacaggacacacacaagcacgtgcatgtcatctcacaaaacgctgttttattcctactccatgtaatcacagcacgctggtatttttaaatgccggttgtaaccctcaaactttgtgaccctctaacgtatcccactgtgagacagtctcacaccacagaagggctcagagagcacccccatctcatccttcacagccgcgttgtctctccatggtcacaattagatttcattgcctttaaaaggctggtaattaaattgcaagtggtcatcaagctaaaggttcagggccttaaggataacagtaagagcagttcataaaataaatgggcctcactttcaccatgccatgctaaatagaaattcctctgctgagttatttttcagatcaagtgcatatgctaataagatgttgtgtttaaaaataccaaatttaattgacttttcatattacagaagccacatgtatttgctggagcaagacaagctctcctccacagagtgggggccaaagagaaggtccgggctgctcctccctgtcccttcttccccggctccccctcctcagccagggcgactgtgtcagccgctgcagggataaggcctctcaccttctcggatctcacacaaatgcacaggcagggcttgccttggccctacatggttactaacccattctttaacagttacaatatatactatggatatttcacaatttattgatccagtcccaggttggtgaaaattcaggttgtttccaatttgttgttggtgttattgttttgtcctagacacaatgtgtgttagggttctccaaagaaacagaaccagtagactacacacacacacacacacacacacacacacacacacacacagagagagagagagagaaagaaagagagatttactatgagaattggctcttatgattatgagggccgagaagtcctagtatccggcatctaatctgcagacccaggagagcccatgattcagtcaagtctaagacctgagaaggaggcaacggtgtcatcccagcccagtgttcccccacccccaccccgtcccaccaccttcttctgccttttctcctcaggccctcaacagattggatgatgtcacccagcctggcaagagggatctttactctgttcaaatgccaatcatttccagggacaccctcacagttctacccaaaacagaaatcatgtttttccagctatccaggcattccttagcccagttaggttaacccaaaatcagccatcacacagcattataatcacatccttccttactggttcttttttttttcttctagactatgttcccaaaggtgagattactaggtcaaagggtgtataaattctgactgtaacagcctgacagattacttgtctaaaaagcacatggcggcagtcatatctgtaccttcttctcagttctggtgttatttatctatctttttttttttttaattgaggtttttcagctgagtggaagctcacagcttagggcattcagccctataaggattttctgggtttttttgttttgttttgtctgtttgttttttgttttgtctttgagacagactctctgtcattcaggctggagtgaagtggtgggatctcggctcgctgcaacctccgcctcccaagttcaagcgattctcctgcttcagcttcccaagtagctgggattacaggtgtgtgccaccatgcctggctaatttttttgtattttcagtagagacggggtttcgccattttgcctaggctggtctcaaacttctgagctcaggcaattcgcccacctcagcctcccaaagtgctgggattacaggtgtgagccactgtgcccagccagccctacaagttttgatagagacgtacaatcatgtagccactgccacatcatgatatatttcctcatcctcgaattccctcatgccctctgtagtcagctcaccgcataccccagccgccatgacagccaccagtctctctccatgcctgtcgttttggcttttccagaatgtcacataaatggatcaaatagggtgagacatattgagcctgactttccttgcttagcctcatgcatttgagattcttctgtgtggtgaagcccaattacccagtctgttctctttttttagagacagggtttcgctctgtcacccgggctggagtgcagtggtgcaatcatggctcactgcagccttgaccttgtgggctcaaaggatcctcctgcctgggcctcccaaagtgctgggattacgggcacacaccacggcacccacccctcagtctgttctttcatggatcgtttcagtagcttatctgaggagcctctgcctagctgaaggtcacgaagagcttctcttctgttttcttctagaagcttcctgcttttaggttttacatttaggtccataatgtattttgagttaatttttgtgtatggtgcaagttgtggactggggttaattttttttgcatttggatgtccactggagtcagccctgcttgcttcctgaaaagactgcccttcctccaccgaactaccgtccagtccttgttgaaatcagctgacacgtttgtgtgggttcgtttctgggctgttttgttctactgatttctgtttctgtcccttcaccaatgccctgctgtcttgatttctgtaactctatacttacgaaattcctccgacttcctttttttttaagacagagtcttgctctgttgtccagactggagtgcagtggcactcacatctcagctcgctgcaacttccacctcctgggttcgagcaattctcctgcctcagcctcctgagtagctgagactacaggcatgtgccaccacacccagctaattttttgtatttttagtagagatggggtttcaccatgttggccaggctggccttgaactcctgatctcagatgatccacctgcctcggcctcccaaagtgctgggattacaggtgtgagccactgtgcccggccagctgattttaatattaggctgttttcttatttctcttttttttttttttgaaacagtctcgctctgttgcccaggctagagagcagtggcacgatctcagctcactgcaacctctgcctcccggggttcaagtgattctcccgcctcagcctcctgagtagctgagattacaggcgtgcaccactatgcctggctaatttttgtatttttggtagagacgggatttcaccatgttggccaggttggtctcaaactcctgagctcaggtgatccaccggtttcggcctcccaaagtgctgggattacaggcgtgagccaccgcacccggcctgttttcttatttcttaacattttttaggagttccttatacattcggttattaacccctgtcttcaatacctattaaaatagtggctctgacctatcattgtctttgccctctgtttagggggtcttttgccacacagactttttagtgtttcttagtgtggctccaagtcactttatggtacattttaaacctgagtaagcttggtctcccttcaccctgcttatcttcgggattcttgcctgttttttcttttaaatcaactttaggcataactttcataagataaaatatgcttattttaaacgcagagtttgggctgggtgcggtggctcacgcctgtaatcctagcactttgggaggccgaggcgggtggatcacttgaggtcagttcaaaaccagcctggccaccacggtgaaaccctgtctctactgaaaaaaaaaaaaaaaatagccaggcgtggtggcaggtgcctgtaatcctaactacttgggaggctgaggcaggagaattgcttgaatctgggaggtggaagttgcggtgagacgagattgtgccatcgcactccagcctgggcaacagaaggagactgtgtctcaaaaaattttttttataaaaaggctgggtgcagtggcttatgcctgcaatcccagctttgggaggccaaggtgggcggatcgagaccatcttggccaacatggtgaaaccccatctctactaaaaatacaaaaattagccaggcctgggggcagatacctgtaatcctagctactcaggaggctgaggcagaagaatcacttgaacccgggaggcgaaggttgcagtgagcctagatggctccactgcactccagcctggtgacagagcaagactccgtctcaaaaaatttttaaaaaagcacagtttggtgggttctaacacgcgcacacatctacgtagccactgacgccatcaagacatagaacctttctatgactccagaaagttcctgtgcacccccgcagccaatcctcacgctacaacccagtccccagccccaggtcctccacccaagccaaggtgcattgtcacaactaagaaattaaccttcatgcaatactgctaaccaaactacaaactctaatcagatttcaccaattttctcaatgagatttttttctgctgcaggatctgaccctggcttagttgcttttagttctcacatctccttggtggcctcaggtctcggccatttctccaccttgcactgtctgcctgtggattccgggttcccacccagggctgctgcctccatgtcccttgttcctcctggcggcacaggcctcactgtttccccgccgatccccatgcgtgtcaccggaggatgagcgaggccagcgccccggccactctctctgcagctgcagctcaggcctgccccagccccagcccctctgtcctgtctcccaggtcaggctcgggcagctgctgaagcagcaggagaagatgatccgtgccatggagttggcggttgcccgcagagagaccgtcaccacccaggccgaggggcagcgcaagatggacaggaaggcgctcacccgcaccgacttccaccacaagcagcttgagctgcgccggaaaatcagggacgttcgcaaggtagggagcagcggaaaggaaacagggcgcctgctcctctctctgggattcaaggaacactccaggaaggcgtcttgctgggtccggggtgaggatgcagaggctgcagtgggggcgtgctcagcactgctaacctgctgctgggtgctgggtctggggtgaggatgcagagagaccatccccagttctgctaacctgctgctgggttcggggtcaggggtgaggatccagaggctgttagaggggcgtgctcagcactgctaacctgctgctgctacggggcctgtctgggagactgcagaatgcccgcaccggacagagctgctgacacccagagacggccgtgtttcagcccctccctgcatatcggaggtggcattgggaaggcatagagttctggggaagaggccagctcatgctggggagcccgagtgggcaccggggaccagctgatgggagcggggtgggcgcctcgagagcctgcatccgcataccccaggccatgtccactgggcctgcactgggagggcccagctggtgctgtccggtgcttaccacctcaacggttgccagccaggggccctgcactcacacttcccaggttggccccacagccccgctgacccgctgtgtgacctcggagtatgtgggccttgccagacctgcagggcctcgtctgctggggggtggaggggcagagttaaatgtgacagcaaccacagccgtgggtggggaggtggccttggggacagctgacagcatggcttggagccacgctggaccattcctgactggggcatacggtctgacctcccagagccttggtttactgacctgtgaaatgggtgcccacctctcagagtcacccagagggttccctggagagtgctgaagtcatccctgtagggaaaggctagccaaaaatggcagacatgcatgggctgctcatttggaagtaactggaagtttctggagagaggcggcagagtggcctcttctcagtccttttccactacattggctactcctgatgtccatccctccctcagcttcctagcccggcccctgaccactccttgctgccctgggcaccccctgagtcccctgccaggaccccatgcccacccctcacctcctgtctgctccaagccacactcaagttctccagccccaggccctgcgccccacacgacgccatcactgatgggtccttgtcctcacccctgccagccccaccccaaagatcttccgtgtccccagccagccctgagagtcactgtgtctcctgcatcaccccctggaccatgtcagctgccaaacactgcctgcccggcttttctttctcttaattgtgctgctttccccgaaggcggaacgaacaccacacagatggccccagcctcgctcctccctcagcagaggcccccaccctcctctctcccaggctccccagcctgcctctcggcccttacagcctcagccctgcccttggcacacggctgctgaactgtgccagtctcctgcctggggacagacccactgcacggggagccccagaaccactcaggcccccatctctctgccacacctgccttaaaggagcagtgtgcagtgtgggctggctgggcctggcatctcccaggcctcgcctctccagccctcccattcctctttgggagcctccctggatggagtgtgtggaaggtgcctggcaggtcctcccagcctgactcttccctgtccgccaagtagccgggctgcaggggcccagcatggtcctgtgattctcctaggccaccgatgagtgcaccaaaaccgtcctggaactggaagaaacacaaagaaatgtgagcagctccctcctagagaagcaggaaaagctgtcggtgattcaggcagacttcgacacactcgaggccgacctcacccggcttggggccctcaaacgacaggtaaacgtgtcccaggaggtccctggggatgacggccatggaacatgccactcacacagaggtcctgcgtcccctctgtgcgagtcacggcctctcctgatcaggtcacggcctctcctgatcccaggccagtaatagcaccaccggctgctcacatgtttgtggctttgtgatttgttccactgacaaatgttgatggagtatctgttatgggctgggctcatgttcagcgtgcgagggttacaaaatagaacacaaaaaacaaacattcctgtgctcttagaggttacctcctggggcaggaggacagatgatgagcaaaataattttaaaagatacagtgtgttgtagctaggcatggtggtacacacctgtggtgccagctactcaggaggctgaggtgggaggatcgcttgagcctgggaggtcgagactgcagtgagccaaggttgtaccactgcactccagcctgggtgacagagggagatcctgtctcaaaaagaaaagaaaagaaaagaaaagaaaagaaaagaaaagaaaagaaaagaaaaagggaaatggtgtgttaggtggtggtaaatgctttgaaggaagataaaccagagaaagaagcgtcagggtcattggggtgaactgagggattgacattttgagttagggtgatgcgggaaggccctgcggagcagacattggagtccagacctgaaggaggggacagcccacaaaaccaccccaggtggacaggacagcccggcaaggcagaagcctgagactgcgcaagggctactagaggccagtggggcaggctggggaggttagggtatgtaagacccaggcagagaggggcggcccagactgtgtgcggccttagggagagcacaatcatgactttggacttttctcttggggaggtgggcacacagaggagggcgttgggtctgagaggtgacttgggctttagcgggctcccgcgcgctctaagattgcatgtggatgaagcatggatgcggggggcacctggggctatttgcagtgcttcagggcggcccctgtggggctggcgagaagccatcaggctctgcatatgcgttatgccaacatcgcccgatgggattcctgctgggttggctgtggtgtgagcagagacggaggtggagaatggctccaaggttctggcctggccaactgagatgatgaggggaacgtgcctggcactgggcctgacacacggcaggtgtcaagaaggttgcctaagccgggcacggtggctcatgcctgtaatcccagcactttgggaggccgcagcaggtggatcacttgaggtcaggagttcgagaccagcctggccaacatggcgaaaccccatctcaactaaaaatacaaatattagccaggcatggtggcgggcgcctgtaatctcagctacccgggcgtggtggtgggggtgggtgcctgtaattccagctagttgggaggctgaggcaggtgaatcgcttgaagccgggagccagaggttgcagtgtgccaagattgtgccattgcactccagcctaggtaacagagcgagacagcctcaaaaaaaaaaaaaaaaaatgccggcgggtcacagtggctcacacctgtaatcccagcactttgggaagccgaggcaggcggatcacgaggtcaggagatcgagaccatcctggctaacacggtgaaaccctgtctctactaaaaaaaaaaaaaatacaaaaaattagccgggcctggtgacgggcatctgtagtcccagctactcaggaggctgagacaggataatggcgtgaacccgggaggcggagcttgcagtgagccgagatcgcaccgctgcactccagcctgggcgacagagcaagactccatctcaaaaaaaaaaaagaatgcctcctagatggtgatgatgggtgacccataaagcaccgacccagtgcctctcagcctcttccctgagatccaggggcgcaacaccttcacgccgtcccttttcaggcgtaggtctcgcctcctcttcggcatttcctggaatctgagtttgtggggggccagcaggtgtctttcttctggtttgcatagccctatatggagtctcttttcctacccagaacctttcagagatcgtggccctgcagacacgccttaagcacctgcaggctgtgaaggaggggcgctacgtgttcctgttccgctccaagcagtccctagtgctggagcgccagcgcctggacaagcgactggctctcatcgccaccatcctggaccgcgtgcgggacgagtacccccagttccaggaggccctgcacaaggtcagccagatgatcgccaacaagctcgagtcaccagggccctcctagggagcagcctggactccgccttgcaaggcctccaggaagagatccggaattgtgtttgtcatgagggacttggaatcttttgtgttcctaaaaaccacatgtaccctcagaagggcatcgtttaagagaaataagccagccccacccataggaatctttttagccactcagcaatttaataaaccaggtaaaatcctagcgtttcccatggcatcccatcgcaaagacagagcctgtgactgcagacccacacacccacactcccacactgggcttactcgtccaggtaacactttggtttgcagcactcccaaatctgcacgtgcctctcacaacacaacgctgccacaggtccacaagctggtgggctgagcagaggtgggaaagttaaggcagctccagccagcctggcccgggaggctggtccccccagcacttccctctactaggtgcatctgaaaacccacaaaccaccttctttaccagttttcccatccccaccccttagaactctcaggtcccttttcctgcccccatgtccccatttgagttaaattcagatccacagcttgcaggagaaagtcagtggccccagacacacgtaacagggtgagcactgaaataagagcacgctggggcgtccacaccaagggactacgccccagtctgcccacctatcttttctccatcattaacccagcgctctttctccctggacttccaagtaccaatgaccttggggcttctttgcagtttaaagggaaaatgctctacaaaataatttcactttcaaacatttcagcagaagaataaaatcttttttctgaat

SEQ ID NO: 15507 - DNA, 31272 bp, Homo sapiens
  modified_base (11775)..(11775): a, c, t, g, unknown or other
  modified_base (12011)..(12011): a, c, t, g, unknown or other
ctctcttcatttaagcacgactctgcagaaggaacaaagcaccctccccactgggctcctggttgcagagctccaagtcctcacacagatacgcctgtttgagaagcagcgggcaagaaagacgcaagcccagaggtaaggtggtcagactcggcttccttccccggagctgagagggaggggaacgtggggcagatgcacaggaatgtgctctgcccagttgtctgcccacagctctggccaccttctcttgcatttctcttggaactggtcatgagcagcgatttcccactggaactgtgagcttccagaggtcagagactgtgctagactcctctctgcagccccagcgtgcacagctcagtgtccagagcaatgggtgctccttagaggagtagtgacctaaatagcaagatcagagagggagtgaagactggagactatcccaggctgggaaaggcgtggaaggcaactagtcgtgggcagttgaggggagaagactggaagaggggaaaagaggagaaaaagagtgaagaaggggagggaaaaaattagaaagaataaataaatataaggtgggaggaaacctataaaaaagaaatgatgaggaaaaacataaaaacaagaaaaagagcaaaagaagtggaatctagtctagagaaaattcttgcaaaaccaattttccttaacgggacaatctccaaaaattgacaccaaatatcatacttgcagcatttcataagtcgcatgatctatgtaatagtctcttttaactaccttttgtgtttctgtgtgtatttttaaatttttgtctgcttctttgctcttttaagatttttgaacaatgtctaaaggcacttctactctagttagctttaaaatgattcatgaaataggaaagctaaaattctcagaaagtgttgaaactgagcttttgcgtatgaattgccctaaaagttgcagatacatatctttagataaatatgtcatttaagaaacggattcgaaaagaattggtggtaggggtctcatgaggccgggagagttacagaaggatgtgcagcccctcctgggcctggcagggtgtgagggagagtgaggactcactgtccctcctgaagggaagccctgtgccatctcagcctttccgccctcagacctttccagcccctgagacctcatggccttgaagccgtgctatccccagtgtcctctgctttcccctcataggcttcttctgggagagaggtttcctggggtacgttctgatccctcaaaacggaaaggccctgttctcaataattcaaagatttcactctgagtgggatagtgcttcctgaatgccctgctcttgtggtggacatttttatcggggcaaggctaagagcagggcctgatgggggaagtcactgctacttcacattttgaccaataattccttgtgctgtatcagatgctgtaggctgatacaaaatggccgccgccctcaaagtcagatgaaagagcccctgaggacagcgttagagacactcgggagatgatttccctctttcaatgtgggagcacttacataggagaggtctatatctagataaaaactcctcccaccactggtgctagacagagcttgggggcagccctaggctctgaccctggccgtaatggcggggtggtgctgagggcaattggctagaccaattgtcttgcacgttttattttttattattatttttgagacggagtctcgctctcttgcccaggctggagtgcaatgacgtgatctccactcactgcagcctccacctcctgggttcaagcgattctcctgcctcagcctcttgagtagctgggattacaggagcccaacaccacgcccggctactttttgtatttttagtagagaccaggtttcactatgttggacaggctggcctcaaactcctggcctcaaatgatccgcccgccttggcctcccaaagtgctggcattacagacgtgagccaccatactgggccagtcttgcacattttagacactcaataaatgtttgttgaatgaaatacctgtgatgggccgggcgtggtggcccacaccagtaatcccagccctttgagaggccgaggcaggaggatggcttgaacctgggagtttgagaccagcctgggcaacatggtgaaacccccatctctacaaaccccacaaaagttagctgggcatggtagtgtgtgcctgtggttccagctacttgggaagctgaggtgggaggattgcttgagcctgggagacggaggctgcagtgaggcctgactgtgccactgcactccagcctgggcgagagtgaggccctgtctcaaaataactttgatgaaggtggggaatcagaagtaggtgggcaggggtctgggtttgcaaggctctgagtttgagctctgttctgtacctttgaggggatgagggaaggagggtgggcacggttcccccgatgtgggtgtctgaggcgaagaagaggatggcggaggttgcagccaccaaccacaagagttccttagaggggtcacagtctctaggaagtttataggaagctagtcagcagtagagagggtgaacgcggtggggcacatcccgcggctgggcttgagtgggctgcttgggggttatggggagaagataaaagtgcctgtgggaccacagactctcgctgtggtggagctgggccctcttaccctcccaagcctcgcccctcatcccatccctgggggccaggggtgagggcggcaggaacctcaaggctctgagaaagtgcgtggtgtgtgttgccattttggtctcttctctttctcagtctctctttgcctcactttggatctatgctctgtgcatctgtcttgcttctcagaatttcttcttttcctctttttttgtactaccctgcgctttgtgtgtgattgtggattgtgtgtgcatagctgttgctttaacaagctgctccaggtctctctctcccacatctttccctcccctcctcccttgaggctctgtgcattctggggaactctgtccatttccctttgtccatgtgtccctcccaccctgcagccggctccctcacatccaccctgggctgcaggcgtgctcggcaggctccccacagatcaaagcttgtccagggtctgcattgctgccaaaggccaggaggactgtgtacagaccggaaggagctagagcttagtggcagcctgagaggggaagctgaaaaaggagaagaggcaaggggcattccaggggagcccgggagagccagcacggccgcctggtatatgaggcaaagaggaagacagacacagacacagggagctgcaggctgggggcataagctgggggctgggaagcatagatacagaaatgcacagatgtgagctgagaagcaaggagggagagagagagacagaaagagagagagagacgtgccagggcttgagggaccagagagccctcccagcctctctcggagtgctggtatacaggatgctaccgtactagggtaagacacctctggggacgctgagtatgggaatcaaaggccagatctctggggtggcagcggaagcccaaagcaccaaagcaagcatgctggaaacccacagcctcctccacttagcagagccttggggtgagatgaggcagaacagggagctggaggcagggaggtggctgtctgcacatacctcaggaccatggagctgggggagtcaaaacagccaccatatggggaagggtcaagaatgcctctagtcttccccaggcatcttatcagggtaagctgaatttggaccccagagaagggatatcgtttatggagacttcccctctttcatcccctgctcaccaaggacccagtcagtctgggatgggggacagtgggaaccactctttggtatgaggctactcctattctactcttctcactgcagccttcccctagatgcctcccatctgcatgctaacctgtaaacacttcaccatcactggtggctagtctcccttcctcctttttcagaaacctccttcctgacctcttttcttcctacttccccggtttaaacaaaattgtatctatctatcatctatctatctatctatctatctatctatctatctatctatctatctatctatcttttttttttttgagacaaaatctcactctgtcgcccaggctgtagtgcagtggcactacaagtaatcccaagtagctgagattacaggcgcccgccaccatccccagctaatttttttgtatttttagtagacacgggggtttcatgatgttggccaggctggtctcaaactcctggcctcaagtgatctgcctgcctcggcctcccaaggtgctggattataggtatgagccaccacacacgacacccggcttctatctatctatatctatctatctatctatctatctatctatctatcacctatctatctaatctatctatatctgtctatctatctttatgtatctatcttatctattgatctatctatctttttttttttttgagacagagtcactctgtcacccaggctggagtgcagtggcacgatctcggctcactgcaacctccgcctcccgggttcaagcgattctcctacctcagcctcctcagtagctgggactacccaccaccactcctggctaatttttgtattttcagtagagatagggtttcactatgttggccaggctggtctccaactcctgacctaaagtgatccacccaccttggtttcccaaagtgctgggattacaggcgtgagccaccgtgcctggacatatatctatcttttttttttttgagatggagtctcgctctgttgcccaggctggagtgcagtggcgtgatttcggctcactgcaacctccgcctcccgggttcaagtgattctcctgcctcagcctcccaagtagctgagattacagacgtgcgtcaccatgcccagctaatttttgtatttttagtagagatgggatttcactatgttggccaggctggtctcgtactcccgacctcaggtgatccacttgccttggcctcccaaagtgctggaattacaggtgtgagccactgcatccggccttatatatctatcttgtctgtctgactgtctaatctaattcatctattttatctgtttatcttatctatcatctatttatctaatctatctgtctgtatgtctgttttttttttgttttttttttttttttgagatagagtcttgctctgtcgccgaggctggagtgcggtggcgcgatctcagctcactgctgaacctccgcctcctgggttctaagcgattctcctgcctcaatctttggagtagctgggattacaggcccgtaccactgtgcccggctaattttgtatttttagtagagaagggtttcaccatgttggtcaggcttgtattgaactcctgacctcaggtgatctacccgcctaagcctcccaaagtgctgggagtacaggtgtgagccactgtgtctgtccctaaatgtctgtctctatctatctatctatctatctatctatctatctatctaatctatctttctgtctaacctaatctattttatctatcttattcatcatctatctaatctgtctgtatgtttatctaatctatttacctaatctatcaatctatcatctaatctatctaatctgtctatctaatctattttatctatctatctatctgtccatccatctatctacctacctgtctatctcaagcacctaccacgtattaagccctggctacctcctcttccaggcagatggagtaactggaggcagctaacaaagatggagtcacttttcttatcttctcctaaaccaccgtaagaggaccaagcccccacaccttctgagtgccccattcctctccacagattgtgtcttagtgcccagcaggaaacacagtccacctcccatggttcaagagattgtagaaagggggttattcacataggttaagggaatcaatcaatttgaagcacagacactattaacagcaggaagagtcctgaagaagtgaaaatggtgtttctggaacccagagagtgcttgcactctggataaggggccaccccacagaagctgtggaggggcagggctgcaggtgaggatgaacacacagctattgacagaaaatatgcccagggcagggatagagtaggaaaaatatcccagcttctttcccccacccttccatctcatctctgaaaggcacttcccactggccagccccgactggtgctggagggcaagagagcctatgagccatgtgtggctgtcagccccttggtggagagccacagacaggatggagagtggctggcagggccccgtggggatgaacagcttggattggggcgactgggcttcatccaggctgggctggatgtgtgcatacatttcagtgacccgttttagaaacagaattaatatggtgaatagagaaagaagaaatcagtgactttcgctcctccatacaattcaatttggcttaagttagccaaagccataccaagtcctctctctatgtctcagctgctgccaggcttgtggtggccacacagctggctagactgtcatctctgtcctcaaggggctcaagctagaggaggagagttgagaaaccaaatcactatacacaaagtagaaggtggaacacacccaggagcatgtcaacggggtgctgtgggacttcagagtaggcagatcgtcaccaagcttcaacggcaaagatgccactgggggaaagaaggaccaagcttggaagacagagtaagtctggaggcaagatcttgtctcaccagcaggggccaggtccatggtgacaccttccccaggcagtcacctctctgagcccactttatatcctaggcctggattcaaagacacttgagccctgctccagccttcctttgaggtgctatcttggtgcctttcctataatcactgctccagtcccatgtcatctggtccccagttaccacatcaagcttcccgaagctccacacagaccatgccacatctttaccaaaaaatcagcagtgggtcccctcacctccaggacaaagctccagctcttcgacctgcctgtcaatatttgcaatcactgcctgcacaaattagctgggtgttgtcatgaaaggatcacttgagcccaggagttccaggctgcaatgacctatgattgaaccactgcactctggcctgggtgacagagtggatctaaactaaaaataaaaagatttacagtcaagcctcaaaggcttttcccataccttcttccaccatcacctccctgagccctctctttcctccgaagcctcctcgcacatccctaccacctttgcacacctcagaatggggacacctctcccctttcctctccatctaacttatggttttcaaacttgagcgtgatcagttacctggagatttgtgaaaacccagatgactagacccacccccagtttctgattcagcaggtctggggtggggccgaggatctgcatttctaacaagttcccaggtcatgttgccgctgctactgatccaggactttgggaatcgctcctctaatctacagctgtccattccccatggtccattcagagcctctctgccctgcccccaccacccccagtctcgcctgtctgccaagcgcacaggaaactctccttcatccaaaccctggaccaacgccttctgcttggcccactcagaggccttgtagggttggtctgatattggacagagaaatggccctctgctctttctcccctgacctctctgaagggggcctgcccctccacacctgtgggtatttctcgcaaggtggagacaagagactgagaaaagaaataagacacagagaaagtatagaggaataaaagtgggcccaggggaccggcgctcagcaagtgaggacctgcaccggtgctggtctctgagttccctcagtatttattgatcactatctttactatctccgcgaggggaatgtggtggggctatagggtgaaggtgaggagagggtcagcagaaaaacatatgagcaaagactctgtgtcataaataagtttaaggaaaggtgctgtgcctggatgtgctagatttatgtttaactttacacaaacatctcagtgtagtaaagagtaacagagcagtattgccgccatgatgtctcgcctccagacataaggcagttttctcctctctcaaaatagaatgtatgatcggttttacaccgggtcattccattcccagggacgagcaggagacagatgccttcctcttatctcaaccgaatagaggccttcctccttcactaatcctcctcagcacagaccctttacgggtgtcgggctggggggctgtaaggtctttcccttcccatgaggccatatctcaggctgtctcagtggggggaaacctggacaatacctaggctttctcgggcaggggttcctgcggccttccacagtgtattgtgtctctggttaatagagaacggagaatggtgatgactttcaccaagcacactgcctgcaagaacttttctttttttttttttttgagacagagtcttgctctgtcgcccaggctggagtgcagtggcgcgatctcggctcactgccacctctgcctcccgggttcacgccattctcctgcctcagcctcccgagtagctgggactacaggcgcccgccaccacgcccggctaatttttttgtatttttttagtagagatggggtttcaccgtgttcaccaggatggtctcgatctcctgacctcatgatccgcccgccttggcctcccaaaatgctgggattacacgtgtgaggcaagaactttttaaaagtgcatcttgcgcagccctagatccattaaaccttgattcaatacaggacatgtttttgtgagcacagggttgggacaaaagttacagattaacagcatctcaaagcagaacaatttttcttagtacagatcaaaatggagtttcttatgtcttcctttttctacatagacacagtaacaatctgatctctctttcttttccccatacctctcacgctgtatcaggccccaattcttgggaacgtcaccttagaactgtcccacacatttctacagccacttggctcaggccctttgctgaccaggatggttgcagttctgcctttggtgcctcgcctcctccagttctttcactcagcagctgcaggggtccacgtggcaaatctaataatcttcttctctatagaaaatcctctgctggctctctagtgcccaggatccagtcccagcatctcagcacggccttcaagcatttccacgtcctggcctggctccatggtctccccgccaatttgccaccttctccatgcatccttttctgatcccctcctcactcatcccagcaaagaaccccctcctggcctgagcatagcatttcgtggtgtgtatctcagagcatccagttaggggtgtgcaagtttactttgttactggctgatgttgtgaagtcccaagttgttggtgccgcaaacaaaaaattggacatgacacacacaaatagcaaagcagcaaaagtttattaagcacagtacgatccactatggatcaaggatgacctgcgaatggtatcagcatcactttgctatatttcatggccttttctatgtgttttttttctctttttcctcaagctgcctaagctttagccagcatgtgccttttggttgacaggtgggttgcttagtttcttggcctctgtgtgtttacgtgtcatttccttcccatagttttaagtacatgcatgatatgcactctgtaggcatgaaccttaagtagctaattactatacggggtcattttgaggatatcttttctctgtagtacatgtgcatctttttttgcagtggtgcaatcttggctcactgcaacctcctcctccctggttcaagtgattctcctgcctcagcttcctaagcacctgagactacaggtgcatgccaccacgcccggctaatttttgtatttttagtagagatggggtttcaccatgttggccaggctgatctcgaactcctgaccgcaagtgatccacccacctcggcctcccaaagcactgggattacaggcatgagccaccgcacccagcctagtatatgcccatctcttaggagctgctcctaactggtttggtttggatctagccagccatggggctccttattcacttatttatcttctgtttttgctcacctgcctctttctcttgcttctgctcctactcattccttccttaatccaacctccaattccctctgctattctcctgcctcaagttcactaggctggctgcaagggtcctgagggagaggttgtgtatcgcccctgtatactccaggtccagtaaatgtttgctgactaatgattggcatttccctcaggccctgccatttctgtgggctcaggtccctactggctcaggcccctgcctccctcggcaaggccacaatgaaccggggagtcccttttaggcacttgcttctggtgctgcaactgggtaagttctcagacctggggtctcaatgcagatgacgtgggaggaaaggcaaaggtggaggatggggtagagggggacagcggcgacattgagacctgactcctttcttttccacttagcgctcctcccagcagccactcagggaaagaaagtggtgctgggcaaaaaaggggatacagtggaactgacctgtacagcttcccagaagaagagcatacaattccactggaaaaactccaaccagataaagattctgggaaatcagggctccttcttaactaaaggtagggttgcctggctccccatccagggaggaaaacacactatggagtgaaagcctttggtgtctgagatctggtcttagttaaactctgggatcccagagggcttgggttgacagaaactcagtggcattcttatccagagtttctctacaccaactgctggtggcccagggaaaggtggtatgtgaatttcaatattttaatatttaatattcatgaacttattttagtgagttttagaacaatcactatcacttaaaacccgtgatttcttgagtattgttgctacagacctatgtagataatactttgcacagtgactcatatgtataatcctagcactgtgggaggctgaggccggaggattgcttgagtccaggagttcaagaccagcctgaacaacatagtgagactctgtctctatgaaaaaaaatatatatatattttttttggagacaaggtctagttctatcacccaggctccagtgcagtggtgtgatctcggctcactgcaatctccacctcccaggctcaagtcatcatcccacctcagcctcccaagtagctgggactacaggcatgcaccaccatgccaggctaatttttgtattttttatagagacagggtttcaccatgttggccaggctggtctcgaactcatgagctcaagtgatccactcaccttggcctctcagagtgctggaattacaggtgtgtgtcactatgcctagccaaaaaaaatttttttaattaaaaaaaaaaaggccggctgtagtggctcacacctgtaatccagaactttgggagtttgaggtgggcagatcaccggnggtcaggagttcaagaccagtctggccaacatggtgaaacccggtctctactaaaaatacaaaaattagccaggtgtgggggtgcagtcctgtacttccagctactcaggaggctgaggcaggagactcgcttgaacctgggaggcaaaggctgcagtgagctgagattgcaccactgcactccagcctgggtgacagagcaagacttcatctcaaaaaaaaaaaaaaagctgcanatttattattattattattagtttatttatttatttttttgagacagagtctcgttctgtcgcccaggctggagtgcggtggcgtgatcttggctcattgcaacctccacctcccgggttcaagtgattctcctgcctcagcctcccgagtagctgggactacaggcgtatgccaccatgcctggctaattttttgtacttttagtagagacagagtttcacggtgttagccaggctggtcttgatctcctgacctcgtgatttaccctccttggcctcccaaagtgctgggattacaggcgtgagtcactgtgcccggcccagaatcatttttttctacttttttttttttgaggcaaactctcgatctgttgcccaggctggagtgcagtgggcatgatcttggctcactgcaagctctgcctcccaggttcaagcaattctcctgcctcagcctcctgagtagctgggactacaggcgtgtgccaccatgcccggctaatttgcgtatttttagtagagaccggttttcatcatattggccaggctggtcttgaactcctgacctcaagtgattctcccaccttagcctcccaaagtgctgggattacaggcatgagctactgcacttggccttttctcctggttttaaaactattatatgctcattacaaaatatttggtcaatgaagaaaagaatatggaagaaaatcaaatgcatgcatacttctatcactcagagatatcctctgctaacattttgattgattttcttccaatctttttttttttttttctttttgagacagggtctcactctgctgcccaggctggagtacagtggcatgaccacaacacatcacagcctcaagtgatcttcccacttcagccttcccagtagctgggactacaggtgcacgccaccatgttcacctaattttttactttttgtagagatgagacttcaccatgttgctcaggctggtcttgaattcctaggctcaagtgatcttcccgctttggcctcccaaagtgctgggattataggtatgagccactgcatgtggcctattttcttccactgttgttcggcgtggagaatattatatacataattacgtaaatgatatcatactgtatataccttttttcctactccttccttaagttatatcataatgagactaccaattattagactttttttcttttttttgagacggagtctcggtctgtcacctaggctggagtgcaatggcgcgatctcagctcgctgcaacctctgcctcccaggttcaagcaattctgcctcagcctcccgagtagctgggactacagacacgtgccaccatgcccagctaacttttttatttttttattagagacagggttccaccatgctagcaggatggtctcaatctctcgacttcgtgatcagcccggcttggcctcccaaagtgctgggagtacaggtgtgagccaccgcactcggcctagactaactatttaaagtaatctggcaatgtttaacgaatacaaaactctaaaacccttggacctaataatagctattttggaaagtctacttgacagaaataaaattgtgaatattcttttttgttgtttttttgagacagagtctcatttggacgcctaggctggagtgcagtggcatgatctcggctaactgcaacctccacctcctgggttcaagtgattctcctgcctcagcctcctgagcagctgggattacaggtgtgcaccaccatgtctggctaatttttgcatttttagtagatggggtttcaccatgttgaccagggtggtctggaacttctaccctcaagtgatctacccaccttggcctcccaaagtgctgggattacaggtgtgagccaccacgcctgaccagtgaacacttaataatatctatggaaaggtgttattataagaattgcttgtggggccgggcgtggtggctcacgcctgtaatcccagcactttgggaggctgtggcaggcggatcacgaggtcaggagatcaagatcatcctggctaacacggtgaaaccccgtctctactaaaaataccaaaaaattagccaggcgtggtggcgggcacttgtaatcccagctatccaggaggctgaggcaggagaattgcgtgaacccaggaggcggaggtcgcagtgagctgagaccgtgccattgcactccagcctgagtgacagagtgagactccatcacaaaaaataaataaataaataaataaaatataaataagtaaataaaggtcaggagtggtggctcacgcctgtaatcccagcactttgggaggccgaggtggacagatcatgaggtcatgagatcaagaccatcctggctaacacagtgaaaccctgcctctactaaaaatacaaaaagtcatccaggtgtggtggcacacacctatagtcccagctacttgggaggctgaggcaggagaatcacttgaacccaggaggcagaggttgcagtgagctgagatcgcgccactacactccagcctaggcgacagagcaagactctgtctcaaaataaataaataaataaataaataaataaataaataaataaaataaaaagcacacacacacacacacacacacacacacaatgcaaaagacccaccctactacaactaacattatatttaatggtgaaaaactgaattctttctccctaagtgcaggaataagacaaagatgtctgctcttactactcttattcaacataatactgcaatcccttgccagtgcaataaggcaagaaaaatgaaataaaaggaaaactgatcagaaagaaagaaataaaactgttcctatttgtggatgacatgattacatagaaaatctcaaagaatctgtaagaaacttcttagaattaataaatgaattcatcaaggttgcagaatataagataaacataaaaaatctattgtatttctatatattagcaaggaacatgtgtacacagaaattaaaactacaataccatttataattgctcaaaaaggccaggcatggtggctcacacctgtaattcctgcactttgggaggccaaggtgggaagattgcttaagcccaggagttcaagaccagcccgggcaacatagtgagaccttgtctctacaaaaagtaaaaaattagctgagcatggccgggtgcagtggctcactcctgtaaccccaacactttgggaggctgaggcgggcggatcatgaggtcaggagatcgagaccatcctggctaacacggtgaaaccctgtctctactaaaaacacaaaaaattagctggatgtggtggcaggcgcctgtagacccagctactcgggaagctgaggcaggagaatggcgtgaacctgggaggcggagcttgcagtgagctgagattgtgccactgcactccagcctgggtgacacagtgagactacgtctcaaaaaaaaaaaaaaaaaaattagctgagcattatggtgtatgcctgtagtcccagctactggggaggctgaggtgggaggattgcttgagccctaggagggcaaggctgcagtgagccatgatcacaccactgctttccagcctcggtaggagagcaagaccctatctcaaaaaaaaaaaaaaaaaaaaaagaaaagaaaagaaaagaaaagaaaaagaaagagagaaagaaatacttaggtgtaaatctaaaaaacatgcgtagggccaggtgcagtggctcatgcctgtaatcccagcactttgggaagttgaggctggcggatcacttgaagtcgggagtttgagaccagcctggccaacatggtgaaaccccgtctctactaaaaatgcaaaaattaggcaggtgttgtggcgcatgcctgatcccagctactttggaggctgaggcaggagaattgcttcaacccgggaggcagaggttgcagtgagccaagactgttccactgcactccagcctgggcaacagagtaagagtctgtctcccgaaaaaaaaaaaaagaaaaaagaaagcattgaattgtatgctaaaaactacacgatgctgattaaagaagtcaaagaagatctaaatatatggagagacatgctgtactcatggattgatggattggaagactcaacataagaaagatatcaattttccccaaattaatatacaagtttaatccaattcctataaaaataccagcaagattttttgtagatataaacaagttggccaggtgtagtggcttacacctgtaatcctagcactttgggaggctgaggtgggaagatcgcttgagcccaggtgttcacgactgcagtgagctatgattgtgtcactgcattccagctggcactccagcctaagtgacaaagggagaccctgtctcaaaaacaaaaacaaaaccaaaataattttgctctgcaaaatccctattaagaagaagaaaagaggctgggcacagtggctcaccgctgtaatcccagcacgttgggaggctgaggcaggctgatcacttcagcccagaagtttgagatcagcctgggcaacatgaggaaaccccgtctctaccaaaaaaaaaaaaaggtacatacacacacacacacacacacacacacatacacaagtatatacacatatatatacacatacaggtgaatagatgtatatacatctatttattgtgaatatacatctatacacacacgtgtgtgtacacatatatttaaaatttatttttatttatttatttatttttgagacagagtcttgctctgtcacccaggctgggtgcacctgtattcccaacgacacaggaggctgaggtgggagaatcactgagccagggaggcagaggttgcagtgagccaagatgttgcctggttgcctgggcaacagagcgagaccctatatcaaaaaagaagaataataagaaaagacagtttacagaatataagaaaatatattcacaatccacatacttagcaaaggactggtatctagaatatgataaacaactctcaaaactcaaaaccaaaaaaatgaacaattcaattagaaaacaggccgaaaaggacatacagttggcaaataagcacatgaaaagttgttcaacatcattaatcattagggatatgtacattaaaaccacaataggctatcactaaacctatcagaatggctaaatacaaaattggaacaccaccaaatgctgatgaggatgtggagaaactgggtcattcttccaatattggtgggaggctaaaatggcaaagccactctggaaaacagtttgatagtttcttataaaacaaaacatgcggccgggcgcggtagctcacgcctgtaatcccagcactttgggaggccgaggcgggtggatcacgaggtcaggagatcgagaccatcctggctaacacggtgaaaccctgtctctactaaaaatacaaaaaattagccgggcgtggtggcgggcgcctgtagtcccagctactcgggaggctgaggcaggagaatggtgtgaacccgggaggcggagcttgcagtgagccgagatcgcgccattgcactccaacctgggagacggagggagactccgtctcaaaaaaacaaaaacaaacaaacaaaaaacatgcaacaatccagcaatattgcacccctaggcatttatcctagagcaatgaagacttatgcccacacaaaaagctgcacacaaatgttcatagcagctttattcatggtagccaacaattagaaacaatctagatgtccttcaactggtgaatgattacatccataccacgaaatacttttcagcaataaaaaggatgaatcatagtacacaccacaacctggatgaatctccagggaattatgctgagtgaaaaaaagccaatctcaaaaggtaatatactgtattaatccatttatataacattcttaaaataactaattatagaaatggagaacagatgagtgattgccaggggttaaggggctcagggatggggaggggaaggggtatggctacaaaaagcaacaaccttatggcgccggaaatgttctgtattctgattgtgtcaatgtgagcatactggttgagatatagtgctacagttttgcaagttattaccatcagagtaaactggatagagggcacataggatttctctgtattacttcttacaactgcaagtgaatctacaattatctcaaaataataagtttagtttaatgctaggcgtggtggctcacatctgtaatctcagctctttgggaggctgagacgggtggatggcttgagtccaggagttcgagaccagcctggccaacatggcaaaaccggtctctactaaaaatacaaaaattagctgggcgtggtggcaagtgcctgtagtcccagctactcgggaggctgaggcaggagaattgcttgaacccgggaggtggaggttgcagtgagccgagatcacgccactacactgtagcttgggcgacagagtgaggctctttctcaaaaaaaaaaaaaaaaaaaaaaaagcaggcaggcagggccaggaaagcgtataatttttgtagttcaaatgactaacctaaaaagtgaagattggccaggcgcagtggctcacgcctgtaatcccagcactttgggaggccaaggcgggtggatcacgaggtcaggagattgagccactctggctaacacagtgaaaccccgtctctactaaaatacaaaaaattagctgggcgtggtggcacccgcctgtagttgcagctacttgggaggctgaggcaggagaatcacttgaacccaggaggcgaagttgcagcgagccgagatcacactactgcactccagcctgggtgacaaagtgagattctgtctcaaaaaaaaaaaaaaaaaaaaaaaaaaaaaaaagtgaagtttacctttttttttaaatttttcttcttttccttccctactttgtgagataattttcttctttttaaaaagccaagagcttacttctgtaagtaaagattatcttaagacaacttagaaatgtatattattagtattttctatttcattgtaagttatttgtaaatattggttttggtgctaacctagaattccatcaaattaattgtcccctaatatatggccattatcattttgtctaacattgtatcctattaacaatgctgtaagtattatttttgtagctaaattatggtttgcattttaaaattattgttttaaggataaagttccagaaatgaaattaaggatatgaactttttgagcacatcttgtcagcactgagtagtattatttaaaacttttggggggggcaattttataattgaaaaatatatcattgttttaatttgcatttctttcactgcctatgagattaaaacaatgcactactttccaaaaattcttaagtcttttgtgttgatgcttttgttctgtttctatggatctcatcttccttcagaacagctccccttcccaacttcctgatttctaacaataacagtatcaccctccttgttctcccaatttctgaaacacagagtcatgtttttttctctgcttcaatccctggtttcctatcgtcatcaattatgacctttccttgctttgaaagtgttttgggccgggcatgatgtctgccacctattgtaatcctagcactttgggaggctgaggcggctggatgacttgacctgaggatttcgagaccagcctgggcaacagggcgaaacctcgtctctacaaaaaatacaaaagttagtcgggagtggtggcacatgcttgtagtcccagttacttggggggctgaggtggcaggatctcttgagcccacgaggtagatgttgcagtgagccgtgattgcgccactgcaccccagcctaggtgacagagtgagaccctgtctcaaaaaaaaaaaaatgttctagtttcttcctcttctttgttcccatgggaatgccaccatcaccagccaaggctcacatacctcccacctggattacagtgagcttccaggtaatttggtctgctactagtctcgcctacttggatttcccttccccctgctgcagcattgccttccaaagccatgctttgcacatgccacatcctagcccattagactaagcctagaagcctctgcaggacgttcaccctctcagcgccactgctcagtttcccagtggaaacctctgcacccaggaggtttccccacagcttgcctgtgctgcctctctggagcttttctcccttcctgtaatgtccttgctgctccccgtctctagtccattgcctatacctctttttttttttttttttgagatggagtctctctctctcatccaggctggagtgcagtggcgcgatctcggctcactgcaacctttgtctcctgggttcaagggattctcctgcctcagcctcccgagtaactgggattacaggcgtgcaccaccattcctggctaatttttgtatttttagtaaagactgggtttcaccatgttggccaggctggtcttgaactcctgccctcaggtgatccacctgcctcggcctcccagagtgctgggattacaggcgtgagccaccgcacctgccacaggcccatacctcttttaagtcttcattcaataccagttgtcccatgaatttgtcccagactcactcatatgcttagacctttcatattatcttgccatagctttttcaaagtatgggacagcatggacaagcaggccatggttttcttttgaagagaagcaaggaggcagagttattttaggaggagggttatacatttcattttgaaccaattgcgtttggggtgatggcaggatattaacataaacttatttcttggaccattggaaatgtgtgcctagaactgaggagagaggtcagggctggcagtaacaacttggccacaatctgcagagctgactggggatgaggtggaatttagaatgtctgtagaaacggggaagagaaccaaagacagagtctgggacaacacctaaatgtagatgtcagagcaagagttcaagacgaagaaaaacgaatcatacttagaaatggaggggaggaacaaaagaggcggagcaaagtggggcagaaccagagtaggccacgcttttaagaagtttggtaaaggaactgtgaaaggaatgtagttgaatttcagggtaagctggggaattaaagcagtgtgtagatccagggcaaacagcaagtagggcaggaaccactgaaggaacaaataaagggggaggttgggtccaggttgtcttgagtagggaagtttttttaaaaagtgtgaaactgaaggtgtggggtggattgggtgcctgccgtgctctgaggaagcttggggcaactgtgtgctgaggctgtgaggttgtctggaaggggctcctggacagtaagagctgagcagtggggaagaggactgtgtggtctggaagaggagagaaaggagagtgagtgactgaactggtatccaggctcccacaccaaggcagaaagagggagaggacctgggcatctcagggaggcagaggcagtaccaagcagggtgagaggctttagtcttagccacctttgccccattcctccaaatatacattctaagtaaaaacaaaacaaaacagaactgtttgctatgtaaatttagcttctaaagccctgttctacagagattttggagcttccactgcacccagaaaatgcacagctaaagagaaaacttcccttggtgatggttattagattttacaagaagaggccaaaggagacacatacttatgccagaagaactttccagagatagcattgcatagcgaaatagcctgaattatttttattttttaaaacattttttcttttcttttttcttttctttttctttttttttttttttttttgagacagagtctcactctgtcacccaggctggagtgcagtggcgtgatcttggctcactgcaatctccacctcccgggttcaagccattctcctccctcagcctcccaagtagctgggattacaggcatgcgtcactatgctctggctaattttttttttctttttttttttggtatttttagtagagatggggtttcaccatgttggccaggctggtcttgaactcctgacctcaagtgatccaccgccttggcctcccaaagtgctgggatttcaggcgtgagccaccgcacccggccaaaaatttcttttctttaagatgaggcctcactctgttgcccaggctggagtgcagtgttacaatcatagctcactgtaactttgaactcctgggctcaagtgatcctcctgcttcagcctctcaagtagctgggattacaggcatgtgccaccacacccagctaattttttttaaaataattttttttagagacgagggtctcgattggctgcctaggttggtcccagactcctgacgggctgcattttaatcctagctccaccacttacgggagtcaaaattcaaaagatagaaaagggcatataggctgggtgcagtggctcacacctgcaatcccagcaatttgggaggctgaggtgggcgggttgcttgaggtcaggagttcgagatcagcctgggcaacatggcaaaacttgtatctactaaaaatacaaaaattagccagatgtggtggtgtacacctgtaatcccagctactccgaaggctgaggcaagagaatcccttgaactcaggaggcagaggttacaatgagcagagatcgaacactcgactccataaaaacaaacaaacaaaaaaagaaagcaggctgggtgtggtggctcacgcctgtaaccccagcacttcgggaggccaaggcgagcggatcacctgaggttgggcattcgagaccagcctgaccaacaaggagaaaccctgtctctactgaaaatacaaaattagccgggcttggttgcgcatgcctgtaatctcagctactcgggaggcagaggcaagataattgcttgaacccgggaggcggaggttgcggtgagccaagatcatgccattgcactccaacctgggcaacaatagcgaaactccatctcaaaaaaaaaaaagcaaagggcatatagtgaaaagctttcttcctacacatgagtattcacttcctcttcctagaggcaaccaaggttatttttgtgtgtgtgtgtgtgtgtgtgtgtgtgtgtgtgtgttttgggacagtctcactctctcaccaaggctggaatgcagtggtgcgatctcactgcaaactctgcctcccagtctcaagcgatcttgtgcctcagcctcccagtttttttttcttttaaatggggtctcattctgtcgcccagggtggagtgcagtggcatgatcatagctcactgcagcctcgacctcctgggtcaggttatcctcccacctcagcctccggcatagctggggctactggcatgcaccaccacactcagttaattttttttcttttttgagacagagtctcactctgtcacctagactggagtgcagtggtgccatctcatttgtttcactgcaacctttgacttctgggctcaagtgattctcccacctcagcctcccaaggcggctaattaaaaaaaatttttttttttttttttttagagatggggtttcgccatgttgcccaggctgatctcgaactcctgggcacaaacaatctttccacctcgatctttcaaagagctgggatgagagatttccaccatgcctggcctcattttcttttttaatttttttttagacattatagctctttttaatggcctcattttcttatgtttaattcgagaattattcttttcatatacaaagaatatattttctccacctttaaaaacaaatagtagactgtttaacatctcgctttattcagttagtgatgtttcttagatacgggtccaaattagtacacaaagcacttcctcattcctctcttacggctgcatagcagtccactgaatgggtgagctatgatctatttaacctattctttattgatggacatttggttttgtatatacatttgtaattctgtatagattacaaatcaccatccaaagaaattgtactggtttattctcctacaatgtgtgagagttgggtaattacttaatctcaatatgtgagagtttaggcagttacctaatctctctgagtctcagtttctctatctgcaaaataaacaaaacagtgttgacagtatctatttctcggaattattgtggagattactgagatgatgcctgtaaagtatttggcatgtaggagttggtgctctccaaataaggatatgattttatttgtatttgtgagctactgtcccagccaggtaaatggatatgatgagacctccttgccagaccgggtttctctgattagaacgaggagcagatgttgcaggaaattagcaactgatatcagaagagccgtgggcattctcttgccagaggtgccctgtctccagggcgcctcagtccccccccatatgtcttctgctcccaggtccatccaagctgaatgatcgcgctgactcaagaagaagcctttgggaccaaggaaactttcccctgatcatcaagaatcttaagatagaagactcagatacttacatctgtgaagtggaggaccagaaggaggaggtgcaattgctagtgttcggatgtgagtggggcaggtggggatgaggatacctcctgcctggttcccttccccactactcccacccctgcaccaaatccagcctgagctggtgataccgcagcagccccaagaggaccaggctgtcaaactggcctccaaatgtcttaaaacccttcttgatcaggtgagggatgctggtgggcggaggagggaagaggccttgggaaaaggaaagaaaagggaaggaggcaagggaaggagggagagagactggggaagagaggatgaggggagaggaggaaagaagagagagaggaggggagagggaaaccctatcttggctgggggtgcgcagctgggtgctgggaggaaggagatgttgggacggcgataatggagagatgttgttggtttcctgttgtctgcccttctccttggggatggtatgtgtgtgacacagctggcctttccctccacagtgactgccaactctgacacccacctgcttcaggggcagagcctgaccctgaccttggagagcccccctggtagtagcccctcagtgcaatgtaggagtccaaggggtaaaaacatacagggggggaagaccctctccgtgtctcagctggagctccaggatagtggcacctggacatgcactgtcttgcagaaccagaagaaggtggagttcaaaatagacatcgtggtgctaggtaagggaagcccctcttcgcgcagtctcctccctgccccaggggctgacagcccctccctctgctctgactgccctgtttctggttctggtgctgggaggtcaggagtggagaagactaggtcccctagagctgaggcctgtcttgaaggactcactggggccctcatcctcagggggctgattggcagccacccctcagtgtggtggacatggagaaaggaaaggctggggaaggtaaggatgctagaggcccgagtctcctttggaggccccaaaggaggaatgtcagggagcttactttctttgttgcctcagctccacacccctaccaagttggcaaatccacttactcagggacactaacaccagtaagccaaccctgatgatgttctatgttgtacctctggacctctaagccaggccactgtggggagaccaaggtcctaccccagatcctgtcccctgggtgcttatgtgacttaaggtagacataaggtagtgtgccagtttagtgcatgtacgctgattgaaatcctggttctgccacaaccatgtgaccttgggtgagttactaaacctctctgcaccttggtttcagcctctgtgaaatggggatgatgttaactgccatagtgactacctcgtattaagttgaggactgatatacgtaaggcactgaaaatggtgcctggcacagagtaagccctagttaagtgttcgctgttattttgtgaagggtgatgaatacgcctctaaggagtggaggccaaatggcttctgtggtccaggaatcctaaggacagcaaggatcccctgtggctgggctgctctgtgatggcttccgggaggagggaggtggcctgctgtaggaaaatgctgggtggaagaagggagagaaggctggagaggtaggaaggaactgaagtatctgaagtgacaaggtgggtgtctggactcgtcgggtccccttccatctccctgctgcctccacatgccaaccccactcgtgcaccctcatcttcctatctcctcacccagggtctctcccttcccacctccagctttccagaaggcctccagcatagtctataagaaagagggggaacaggtggagttctccttcccactcgcctttacagttgaaaagctgacgggcagtggcgagctgtggtggcaggcggagagggcttcctcctccaagtcttggatcacctttgacctgaagaacaaggaagtgtctgtaaaacgggttacccaggaccctaagctccagatgggcaagaagctcccgctccacctcaccctgccccaggccttgcctcagtatgctggctctggaaacctcaccctggcccttgaagcgaaaacaggaaagttgcatcaggaagtgaacctggtggtgatgagaggtgaggggccaggccagggaggggtgggcaggggaaggagttggaggggcctggcccagggctccctctgaggcaagccaggccccaagaggggatgcctaggccctggtcacctggatgaagtgagggagggccctctgggtttggggctggttttgaactgagacatccatgagccagcctggggctggcttcactgaagatccccaaagcacttgggctaagaaccagggttccagttcttcctataaccaaccctctgtgaccctggctaagccccctcccactgcaggcctgcttcctgacctgtctaataaggataatgaaatctgctctctgtgtgatagtaatgatgataatgtcaagctccaaattgagtttctggcttccttatctccttatcatcataacgactctgcaaatagtaatggctaacacttgatgctcagcacgtgtcgggccccatccaaacactttacatgtatgcctgcctttagtactatctgggtgcaggttgttaagtcacttgcccagagacacacagctgctaagcagtggagctgggattcaaatccaataccactggaccccaaacgctgtttttcctcgtaggactgcatgaaaacctgctctaaaaggctaaaagaaggtcacccatatagagtatcattttaattgttctactgaatctcaggcctttgatctcagcctctcgttcctctgcagccactcagctccagaaaaatttgacctgtgaggtgtggggacccacctcccctaagctgatgctgagtttgaaactggagaacaaggaggcaaaggtctcgaagcgggagaaggcggtgtgggtgctgaaccctgaggcggggatgtggcagtgtctgctgagtgactcgggacaggtcctgctggaatccaacatcaagggtaaggacccaggttccaaggcctctgcctcctgggctgcgggaccttcctgtggttggcagagaccacccagagtcccggcctcccaatgcctgagttggggggttatgggtatggtgtcctctgtggtcccagggtgctttggaggccccaaaaggaggcatagaagtgatgaagtgaggtgggttgtggtcctgggctctaggctgccagttgtaattctacaagttcccactccctcaggtctacagcctagggatggggtccacctgaccgagagcccccctccctggctcctggcttttctccaaatccagacgcacttacacacacactcacacacatacactctcacacacatgcacacactcccatacactctcacacacgcacacacatcactcacacactcgcacacactcatacacacactacacacacatccacactcacacccacactctcaccccatgtactcacacccatgcactcacacactgtcacacactcatacacacacatgtactcacacatgcatgcacacacacacttacacattcacgcacatactctcacccacacactgtcgtacacgtacactcacacacttatacactcacatccgcacacgcattattcacacatgtgcacacacgcgcgcgcacatgcatgcagtcacgcacacacattcatacacgcacacaggcacacattcacacacatgcacacacgcacacacattcacacatggactcacacgcgcacacgcgcgcacacacacacattcacaccattcacacacgcacacacatgcacacactcacacatgcacacacacatgcactcacacacacagcccaggagccagaccacagcttctctctctccagagtgccctggatatggatatgcccaaacataaaaccgattccccagcactggcggcctttgagagcccccaggcacccctcccctctcccccaaccccagggtcaaaccagagactggccaggagggattgcagggcagtcctcagtcccctggcccgtggaggagggcggtgcattgagcacatttctctcccttgcagttctgcccacatggtccaccccggtgcagccaatggccctgattgtgctggggggcgtcgccggcctcctgcttttcattgggctaggcatcttcttctgtgtcaggtgccggcaccgaagggtgagtaaccccacacctggtccccacaaggccctcaaacccctgagtcctctaccaggagatcctgtatatgggaactgattttggcccagctccctctgcccactcgtaagttcccttgctgccctgtcccagatcccactcaagggagagacaggaaggagcagagagttaattccaggatagatggcctgggccatgtaactgcttctcctgtcgcagcttcccccactccccccaccaaggggcacctcccttctggaggcctgggaccctcgtgactccctttcttgtccctggacagcgccaagcagagcggatgtctcagatcaagagactcctcagtgagaagaagacctgccagtgtcctcagtaaggatctgggaggaggggttgagagaggggaaagggggagggggagggagttagagaggagggggaggaaggggagcaaaggggggcaggaagggaggatggagaggaggaaggagttgaggaggaagagctgggaggggtggaggtgaggagatgggggctaaaggggtgtggtggagaggatagaggggtgggaaaagatggccaggagctagaaggaggcagaagtgggaggatggagctgaaggagcagcaggccaggaaaggccctgctggaaagccactggagctgtgctgcgctggaaaggccattggaggtgctagaacgcaaaggggttgcagtggggacagacctgctccccttcttctttgttcctgcagccggtttcagaagacatgtagccccatttgaggcacgaggccaggcagatcccacttgcagcctccccaggtgtctgccccgcgtttcctgcctgcggaccagatgaatgtagcagatccccagcctctggcctcctgttcgcctcctctacaatttgccattgtttctcctgggttaggccccggcttcactggttgagtgttgctctctagtttccagaggcttaatcacaccgtcctccacgccatttccttttccttcaagcctagcccttctctcattatttctctctgaccctctccccactgctcatttggatcccaggggagtgttcagggccagccctggctggcatggagggtgaggctgggtgtctggaagcatggagcatgggactgttcttttacaagacaggaccctgggaccacagagggcaggaacttgcacaaaatcacacagccaagccagtcaaggatggatgcagatccagaggtttctggcagccagtacctcctgccccatgctgcccgcttctcaccctatgtgggtgggaccacagactcacatcctgaccttgcacaaacagcccctctggacacagccccatgtacacggcctcaagggatgtctcacatcctctgtctatttgagacttagaaaaatcctacaaggctggcagtgacagaactaagatgatcatctccagtttatagaccagaaccagagctcagagaggctagatgattgattaccaagtgccggactagcaagtgctggagtcgggactaacccaggtcccttgtcccaagttccactgctgcctcttgaatgcagggacaaatgccacacggctctcaccagtggctagtggtgggtactcaatgtgtacttttgggttcacagaagcacagcacccatgggaagggtccatctcagagaatttacgagcagggatgaaggcctccctgtctaaaatccctccttcatcccccgctggtggcagaatctgttaccagaggacaaagcctttggctcttctaatcagagcgcaagctgggagcacaggcactgcaggagagaatgcccagtgaccagtcactgaccctgtgcagaacctcctggaagcgagctttgctgggagagggggtagctagcctgagagggaaccctctaagggacctcaaaggtgattgtgccaggctctgcgcctgccccacaccctcccttaccctcctccagaccattcaggacacagggaaatcagggttacaaatcttcttgatccacttctctcaggatcccctctcttcctacccttcctcaccacttccctcagtcccaactccttttccctatttccttctcctcctgtctttaaagcctgcctcttccaggaagacccccctattgctgctggggctccccatttgcttactttgcatttgtgcccactctccacccctgctcccctgagctgaaataaaaatacaataaacttac

SEQ ID NO: 15508 - DNA, 30296 bp, Homo sapiens
  modified_base (11767)..(11767): a, c, t, g, unknown or other
  modified_base (12003)..(12003): a, c, t, g, unknown or other
atttaagcacgactctgcagaaggaacaaagcaccctccccactgggctcctggttgcagagctccaagtcctcacacagatacgcctgtttgagaagcagcgggcaagaaagacgcaagcccagaggtaaggtggtcagactcggcttccttccccggagctgagagggaggggaacgtggggcagatgcacaggaatgtgctctgcccagttgtctgcccacagctctggccaccttctcttgcatttctcttggaactggtcatgagcagcgatttcccactggaactgtgagcttccagaggtcagagactgtgctagactcctctctgcagccccagcgtgcacagctcagtgtccagagcaatgggtgctccttagaggagtagtgacctaaatagcaagatcagagagggagtgaagactggagactatcccaggctgggaaaggcgtggaaggcaactagtcgtgggcagttgaggggagaagactggaagaggggaaaagaggagaaaaagagtgaagaaggggagggaaaaaattagaaagaataaataaatataaggtgggaggaaacctataaaaaagaaatgatgaggaaaaacataaaaacaagaaaaagagcaaaagaagtggaatctagtctagagaaaattcttgcaaaaccaattttccttaacgggacaatctccaaaaattgacaccaaatatcatacttgcagcatttcataagtcgcatgatctatgtaatagtctcttttaactaccttttgtgtttctgtgtgtatttttaaatttttgtctgcttctttgctcttttaagatttttgaacaatgtctaaaggcacttctactctagttagctttaaaatgattcatgaaataggaaagctaaaattctcagaaagtgttgaaactgagcttttgcgtatgaattgccctaaaagttgcagatacatatctttagataaatatgtcatttaagaaacggattcgaaaagaattggtggtaggggtctcatgaggccgggagagttacagaaggatgtgcagcccctcctgggcctggcagggtgtgagggagagtgaggactcactgtccctcctgaagggaagccctgtgccatctcagcctttccgccctcagacctttccagcccctgagacctcatggccttgaagccgtgctatccccagtgtcctctgctttcccctcataggcttcttctgggagagaggtttcctggggtacgttctgatccctcaaaacggaaaggccctgttctcaataattcaaagatttcactctgagtgggatagtgcttcctgaatgccctgctcttgtggtggacatttttatcggggcaaggctaagagcagggcctgatgggggaagtcactgctacttcacattttgaccaataattccttgtgctgtatcagatgctgtaggctgatacaaaatggccgccgccctcaaagtcagatgaaagagcccctgaggacagcgttagagacactcgggagatgatttccctctttcaatgtgggagcacttacataggagaggtctatatctagataaaaactcctcccaccactggtgctagacagagcttgggggcagccctaggctctgaccctggccgtaatggcggggtggtgctgagggcaattggctagaccaattgtcttgcacgttttattttttattattatttttgagacggagtctcgctctcttgcccaggctggagtgcaatgacgtgatctccactcactgcagcctccacctcctgggttcaagcgattctcctgcctcagcctcttgagtagctgggattacaggagcccaacaccacgcccggctactttttgtatttttagtagagaccaggtttcactatgttggacaggctggcctcaaactcctggcctcaaatgatccgcccgccttggcctcccaaagtgctggcattacagacgtgagccaccatactgggccagtcttgcacattttagacactcaataaatgtttgttgaatgaaatacctgtgatgggccgggcgtggtggcccacaccagtaatcccagccctttgagaggccgaggcaggaggatggcttgaacctgggagtttgagaccagcctgggcaacatggtgaaacccccatctctacaaaccccacaaaagttagctgggcatggtagtgtgtgcctgtggttccagctacttgggaagctgaggtgggaggattgcttgagcctgggagacggaggctgcagtgaggcctgactgtgccactgcactccagcctgggcgagagtgaggccctgtctcaaaataactttgatgaaggtggggaatcagaagtaggtgggcaggggtctgggtttgcaaggctctgagtttgagctctgttctgtacctttgaggggatgagggaaggagggtgggcacggttcccccgatgtgggtgtctgaggcgaagaagaggatggcggaggttgcagccaccaaccacaagagttccttagaggggtcacagtctctaggaagtttataggaagctagtcagcagtagagagggtgaacgcggtggggcacatcccgcggctgggcttgagtgggctgcttgggggttatggggagaagataaaagtgcctgtgggaccacagactctcgctgtggtggagctgggccctcttaccctcccaagcctcgcccctcatcccatccctgggggccaggggtgagggcggcaggaacctcaaggctctgagaaagtgcgtggtgtgtgttgccattttggtctcttctctttctcagtctctctttgcctcactttggatctatgctctgtgcatctgtcttgcttctcagaatttcttcttttcctctttttttgtactaccctgcgctttgtgtgtgattgtggattgtgtgtgcatagctgttgctttaacaagctgctccaggtctctctctcccacatctttccctcccctcctcccttgaggctctgtgcattctggggaactctgtccatttccctttgtccatgtgtccctcccaccctgcagccggctccctcacatccaccctgggctgcaggcgtgctcggcaggctccccacagatcaaagcttgtccagggtctgcattgctgccaaaggccaggaggactgtgtacagaccggaaggagctagagcttagtggcagcctgagaggggaagctgaaaaaggagaagaggcaaggggcattccaggggagcccgggagagccagcacggccgcctggtatatgaggcaaagaggaagacagacacagacacagggagctgcaggctgggggcataagctgggggctgggaagcatagatacagaaatgcacagatgtgagctgagaagcaaggagggagagagagagacagaaagagagagagagacgtgccagggcttgagggaccagagagccctcccagcctctctcggagtgctggtatacaggatgctaccgtactagggtaagacacctctggggacgctgagtatgggaatcaaaggccagatctctggggtggcagcggaagcccaaagcaccaaagcaagcatgctggaaacccacagcctcctccacttagcagagccttggggtgagatgaggcagaacagggagctggaggcagggaggtggctgtctgcacatacctcaggaccatggagctgggggagtcaaaacagccaccatatggggaagggtcaagaatgcctctagtcttccccaggcatcttatcagggtaagctgaatttggaccccagagaagggatatcgtttatggagacttcccctctttcatcccctgctcaccaaggacccagtcagtctgggatgggggacagtgggaaccactctttggtatgaggctactcctattctactcttctcactgcagccttcccctagatgcctcccatctgcatgctaacctgtaaacacttcaccatcactggtggctagtctcccttcctcctttttcagaaacctccttcctgacctcttttcttcctacttccccggtttaaacaaaattgtatctatctatcatctatctatctatctatctatctatctatctatctatctatctatctatctatcttttttttttttgagacaaaatctcactctgtcgcccaggctgtagtgcagtggcactacaagtaatcccaagtagctgagattacaggcgcccgccaccatccccagctaatttttttgtatttttagtagacacgggggtttcatgatgttggccaggctggtctcaaactcctggcctcaagtgatctgcctgcctcggcctcccaaggtgctggattataggtatgagccaccacacacgacacccggcttctatctatctatatctatctatctatctatctatctatctatctatcacctatctatctaatctatctatatctgtctatctatctttatgtatctatcttatctattgatctatctatctttttttttttttgagacagagtcactctgtcacccaggctggagtgcagtggcacgatctcggctcactgcaacctccgcctcccgggttcaagcgattctcctacctcagcctcctcagtagctgggactacccaccaccactcctggctaatttttgtattttcagtagagatagggtttcactatgttggccaggctggtctccaactcctgacctaaagtgatccacccaccttggtttcccaaagtgctgggattacaggcgtgagccaccgtgcctggacatatatctatcttttttttttttgagatggagtctcgctctgttgcccaggctggagtgcagtggcgtgatttcggctcactgcaacctccgcctcccgggttcaagtgattctcctgcctcagcctcccaagtagctgagattacagacgtgcgtcaccatgcccagctaatttttgtatttttagtagagatgggatttcactatgttggccaggctggtctcgtactcccgacctcaggtgatccacttgccttggcctcccaaagtgctggaattacaggtgtgagccactgcatccggccttatatatctatcttgtctgtctgactgtctaatctaattcatctattttatctgtttatcttatctatcatctatttatctaatctatctgtctgtatgtctgttttttttttgttttttttttttttttgagatagagtcttgctctgtcgccgaggctggagtgcggtggcgcgatctcagctcactgctgaacctccgcctcctgggttctaagcgattctcctgcctcaatctttggagtagctgggattacaggcccgtaccactgtgcccggctaattttgtatttttagtagagaagggtttcaccatgttggtcaggcttgtattgaactcctgacctcaggtgatctacccgcctaagcctcccaaagtgctgggagtacaggtgtgagccactgtgtctgtccctaaatgtctgtctctatctatctatctatctatctatctatctatctatctaatctatctttctgtctaacctaatctattttatctatcttattcatcatctatctaatctgtctgtatgtttatctaatctatttacctaatctatcaatctatcatctaatctatctaatctgtctatctaatctattttatctatctatctatctgtccatccatctatctacctacctgtctatctcaagcacctaccacgtattaagccctggctacctcctcttccaggcagatggagtaactggaggcagctaacaaagatggagtcacttttcttatcttctcctaaaccaccgtaagaggaccaagcccccacaccttctgagtgccccattcctctccacagattgtgtcttagtgcccagcaggaaacacagtccacctcccatggttcaagagattgtagaaagggggttattcacataggttaagggaatcaatcaatttgaagcacagacactattaacagcaggaagagtcctgaagaagtgaaaatggtgtttctggaacccagagagtgcttgcactctggataaggggccaccccacagaagctgtggaggggcagggctgcaggtgaggatgaacacacagctattgacagaaaatatgcccagggcagggatagagtaggaaaaatatcccagcttctttcccccacccttccatctcatctctgaaaggcacttcccactggccagccccgactggtgctggagggcaagagagcctatgagccatgtgtggctgtcagccccttggtggagagccacagacaggatggagagtggctggcagggccccgtggggatgaacagcttggattggggcgactgggcttcatccaggctgggctggatgtgtgcatacatttcagtgacccgttttagaaacagaattaatatggtgaatagagaaagaagaaatcagtgactttcgctcctccatacaattcaatttggcttaagttagccaaagccataccaagtcctctctctatgtctcagctgctgccaggcttgtggtggccacacagctggctagactgtcatctctgtcctcaaggggctcaagctagaggaggagagttgagaaaccaaatcactatacacaaagtagaaggtggaacacacccaggagcatgtcaacggggtgctgtgggacttcagagtaggcagatcgtcaccaagcttcaacggcaaagatgccactgggggaaagaaggaccaagcttggaagacagagtaagtctggaggcaagatcttgtctcaccagcaggggccaggtccatggtgacaccttccccaggcagtcacctctctgagcccactttatatcctaggcctggattcaaagacacttgagccctgctccagccttcctttgaggtgctatcttggtgcctttcctataatcactgctccagtcccatgtcatctggtccccagttaccacatcaagcttcccgaagctccacacagaccatgccacatctttaccaaaaaatcagcagtgggtcccctcacctccaggacaaagctccagctcttcgacctgcctgtcaatatttgcaatcactgcctgcacaaattagctgggtgttgtcatgaaaggatcacttgagcccaggagttccaggctgcaatgacctatgattgaaccactgcactctggcctgggtgacagagtggatctaaactaaaaataaaaagatttacagtcaagcctcaaaggcttttcccataccttcttccaccatcacctccctgagccctctctttcctccgaagcctcctcgcacatccctaccacctttgcacacctcagaatggggacacctctcccctttcctctccatctaacttatggttttcaaacttgagcgtgatcagttacctggagatttgtgaaaacccagatgactagacccacccccagtttctgattcagcaggtctggggtggggccgaggatctgcatttctaacaagttcccaggtcatgttgccgctgctactgatccaggactttgggaatcgctcctctaatctacagctgtccattccccatggtccattcagagcctctctgccctgcccccaccacccccagtctcgcctgtctgccaagcgcacaggaaactctccttcatccaaaccctggaccaacgccttctgcttggcccactcagaggccttgtagggttggtctgatattggacagagaaatggccctctgctctttctcccctgacctctctgaagggggcctgcccctccacacctgtgggtatttctcgcaaggtggagacaagagactgagaaaagaaataagacacagagaaagtatagaggaataaaagtgggcccaggggaccggcgctcagcaagtgaggacctgcaccggtgctggtctctgagttccctcagtatttattgatcactatctttactatctccgcgaggggaatgtggtggggctatagggtgaaggtgaggagagggtcagcagaaaaacatatgagcaaagactctgtgtcataaataagtttaaggaaaggtgctgtgcctggatgtgctagatttatgtttaactttacacaaacatctcagtgtagtaaagagtaacagagcagtattgccgccatgatgtctcgcctccagacataaggcagttttctcctctctcaaaatagaatgtatgatcggttttacaccgggtcattccattcccagggacgagcaggagacagatgccttcctcttatctcaaccgaatagaggccttcctccttcactaatcctcctcagcacagaccctttacgggtgtcgggctggggggctgtaaggtctttcccttcccatgaggccatatctcaggctgtctcagtggggggaaacctggacaatacctaggctttctcgggcaggggttcctgcggccttccacagtgtattgtgtctctggttaatagagaacggagaatggtgatgactttcaccaagcacactgcctgcaagaacttttctttttttttttttttgagacagagtcttgctctgtcgcccaggctggagtgcagtggcgcgatctcggctcactgccacctctgcctcccgggttcacgccattctcctgcctcagcctcccgagtagctgggactacaggcgcccgccaccacgcccggctaatttttttgtatttttttagtagagatggggtttcaccgtgttcaccaggatggtctcgatctcctgacctcatgatccgcccgccttggcctcccaaaatgctgggattacacgtgtgaggcaagaactttttaaaagtgcatcttgcgcagccctagatccattaaaccttgattcaatacaggacatgtttttgtgagcacagggttgggacaaaagttacagattaacagcatctcaaagcagaacaatttttcttagtacagatcaaaatggagtttcttatgtcttcctttttctacatagacacagtaacaatctgatctctctttcttttccccatacctctcacgctgtatcaggccccaattcttgggaacgtcaccttagaactgtcccacacatttctacagccacttggctcaggccctttgctgaccaggatggttgcagttctgcctttggtgcctcgcctcctccagttctttcactcagcagctgcaggggtccacgtggcaaatctaataatcttcttctctatagaaaatcctctgctggctctctagtgcccaggatccagtcccagcatctcagcacggccttcaagcatttccacgtcctggcctggctccatggtctccccgccaatttgccaccttctccatgcatccttttctgatcccctcctcactcatcccagcaaagaaccccctcctggcctgagcatagcatttcgtggtgtgtatctcagagcatccagttaggggtgtgcaagtttactttgttactggctgatgttgtgaagtcccaagttgttggtgccgcaaacaaaaaattggacatgacacacacaaatagcaaagcagcaaaagtttattaagcacagtacgatccactatggatcaaggatgacctgcgaatggtatcagcatcactttgctatatttcatggccttttctatgtgttttttttctctttttcctcaagctgcctaagctttagccagcatgtgccttttggttgacaggtgggttgcttagtttcttggcctctgtgtgtttacgtgtcatttccttcccatagttttaagtacatgcatgatatgcactctgtaggcatgaaccttaagtagctaattactatacggggtcattttgaggatatcttttctctgtagtacatgtgcatctttttttgcagtggtgcaatcttggctcactgcaacctcctcctccctggttcaagtgattctcctgcctcagcttcctaagcacctgagactacaggtgcatgccaccacgcccggctaatttttgtatttttagtagagatggggtttcaccatgttggccaggctgatctcgaactcctgaccgcaagtgatccacccacctcggcctcccaaagcactgggattacaggcatgagccaccgcacccagcctagtatatgcccatctcttaggagctgctcctaactggtttggtttggatctagccagccatggggctccttattcacttatttatcttctgtttttgctcacctgcctctttctcttgcttctgctcctactcattccttccttaatccaacctccaattccctctgctattctcctgcctcaagttcactaggctggctgcaagggtcctgagggagaggttgtgtatcgcccctgtatactccaggtccagtaaatgtttgctgactaatgattggcatttccctcaggccctgccatttctgtgggctcaggtccctactggctcaggcccctgcctccctcggcaaggccacaatgaaccggggagtcccttttaggcacttgcttctggtgctgcaactgggtaagttctcagacctggggtctcaatgcagatgacgtgggaggaaaggcaaaggtggaggatggggtagagggggacagcggcgacattgagacctgactcctttcttttccacttagcgctcctcccagcagccactcagggaaagaaagtggtgctgggcaaaaaaggggatacagtggaactgacctgtacagcttcccagaagaagagcatacaattccactggaaaaactccaaccagataaagattctgggaaatcagggctccttcttaactaaaggtagggttgcctggctccccatccagggaggaaaacacactatggagtgaaagcctttggtgtctgagatctggtcttagttaaactctgggatcccagagggcttgggttgacagaaactcagtggcattcttatccagagtttctctacaccaactgctggtggcccagggaaaggtggtatgtgaatttcaatattttaatatttaatattcatgaacttattttagtgagttttagaacaatcactatcacttaaaacccgtgatttcttgagtattgttgctacagacctatgtagataatactttgcacagtgactcatatgtataatcctagcactgtgggaggctgaggccggaggattgcttgagtccaggagttcaagaccagcctgaacaacatagtgagactctgtctctatgaaaaaaaatatatatatattttttttggagacaaggtctagttctatcacccaggctccagtgcagtggtgtgatctcggctcactgcaatctccacctcccaggctcaagtcatcatcccacctcagcctcccaagtagctgggactacaggcatgcaccaccatgccaggctaatttttgtattttttatagagacagggtttcaccatgttggccaggctggtctcgaactcatgagctcaagtgatccactcaccttggcctctcagagtgctggaattacaggtgtgtgtcactatgcctagccaaaaaaaatttttttaattaaaaaaaaaaaggccggctgtagtggctcacacctgtaatccagaactttgggagtttgaggtgggcagatcaccggnggtcaggagttcaagaccagtctggccaacatggtgaaacccggtctctactaaaaatacaaaaattagccaggtgtgggggtgcagtcctgtacttccagctactcaggaggctgaggcaggagactcgcttgaacctgggaggcaaaggctgcagtgagctgagattgcaccactgcactccagcctgggtgacagagcaagacttcatctcaaaaaaaaaaaaaaagctgcanatttattattattattattagtttatttatttatttttttgagacagagtctcgttctgtcgcccaggctggagtgcggtggcgtgatcttggctcattgcaacctccacctcccgggttcaagtgattctcctgcctcagcctcccgagtagctgggactacaggcgtatgccaccatgcctggctaattttttgtacttttagtagagacagagtttcacggtgttagccaggctggtcttgatctcctgacctcgtgatttaccctccttggcctcccaaagtgctgggattacaggcgtgagtcactgtgcccggcccagaatcatttttttctacttttttttttttgaggcaaactctcgatctgttgcccaggctggagtgcagtgggcatgatcttggctcactgcaagctctgcctcccaggttcaagcaattctcctgcctcagcctcctgagtagctgggactacaggcgtgtgccaccatgcccggctaatttgcgtatttttagtagagaccggttttcatcatattggccaggctggtcttgaactcctgacctcaagtgattctcccaccttagcctcccaaagtgctgggattacaggcatgagctactgcacttggccttttctcctggttttaaaactattatatgctcattacaaaatatttggtcaatgaagaaaagaatatggaagaaaatcaaatgcatgcatacttctatcactcagagatatcctctgctaacattttgattgattttcttccaatctttttttttttttttctttttgagacagggtctcactctgctgcccaggctggagtacagtggcatgaccacaacacatcacagcctcaagtgatcttcccacttcagccttcccagtagctgggactacaggtgcacgccaccatgttcacctaattttttactttttgtagagatgagacttcaccatgttgctcaggctggtcttgaattcctaggctcaagtgatcttcccgctttggcctcccaaagtgctgggattataggtatgagccactgcatgtggcctattttcttccactgttgttcggcgtggagaatattatatacataattacgtaaatgatatcatactgtatataccttttttcctactccttccttaagttatatcataatgagactaccaattattagactttttttcttttttttgagacggagtctcggtctgtcacctaggctggagtgcaatggcgcgatctcagctcgctgcaacctctgcctcccaggttcaagcaattctgcctcagcctcccgagtagctgggactacagacacgtgccaccatgcccagctaacttttttatttttttattagagacagggttccaccatgctagcaggatggtctcaatctctcgacttcgtgatcagcccggcttggcctcccaaagtgctgggagtacaggtgtgagccaccgcactcggcctagactaactatttaaagtaatctggcaatgtttaacgaatacaaaactctaaaacccttggacctaataatagctattttggaaagtctacttgacagaaataaaattgtgaatattcttttttgttgtttttttgagacagagtctcatttggacgcctaggctggagtgcagtggcatgatctcggctaactgcaacctccacctcctgggttcaagtgattctcctgcctcagcctcctgagcagctgggattacaggtgtgcaccaccatgtctggctaatttttgcatttttagtagatggggtttcaccatgttgaccagggtggtctggaacttctaccctcaagtgatctacccaccttggcctcccaaagtgctgggattacaggtgtgagccaccacgcctgaccagtgaacacttaataatatctatggaaaggtgttattataagaattgcttgtggggccgggcgtggtggctcacgcctgtaatcccagcactttgggaggctgtggcaggcggatcacgaggtcaggagatcaagatcatcctggctaacacggtgaaaccccgtctctactaaaaataccaaaaaattagccaggcgtggtggcgggcacttgtaatcccagctatccaggaggctgaggcaggagaattgcgtgaacccaggaggcggaggtcgcagtgagctgagaccgtgccattgcactccagcctgagtgacagagtgagactccatcacaaaaaataaataaataaataaataaaatataaataagtaaataaaggtcaggagtggtggctcacgcctgtaatcccagcactttgggaggccgaggtggacagatcatgaggtcatgagatcaagaccatcctggctaacacagtgaaaccctgcctctactaaaaatacaaaaagtcatccaggtgtggtggcacacacctatagtcccagctacttgggaggctgaggcaggagaatcacttgaacccaggaggcagaggttgcagtgagctgagatcgcgccactacactccagcctaggcgacagagcaagactctgtctcaaaataaataaataaataaataaataaataaataaataaataaaataaaaagcacacacacacacacacacacacacacacaatgcaaaagacccaccctactacaactaacattatatttaatggtgaaaaactgaattctttctccctaagtgcaggaataagacaaagatgtctgctcttactactcttattcaacataatactgcaatcccttgccagtgcaataaggcaagaaaaatgaaataaaaggaaaactgatcagaaagaaagaaataaaactgttcctatttgtggatgacatgattacatagaaaatctcaaagaatctgtaagaaacttcttagaattaataaatgaattcatcaaggttgcagaatataagataaacataaaaaatctattgtatttctatatattagcaaggaacatgtgtacacagaaattaaaactacaataccatttataattgctcaaaaaggccaggcatggtggctcacacctgtaattcctgcactttgggaggccaaggtgggaagattgcttaagcccaggagttcaagaccagcccgggcaacatagtgagaccttgtctctacaaaaagtaaaaaattagctgagcatggccgggtgcagtggctcactcctgtaaccccaacactttgggaggctgaggcgggcggatcatgaggtcaggagatcgagaccatcctggctaacacggtgaaaccctgtctctactaaaaacacaaaaaattagctggatgtggtggcaggcgcctgtagacccagctactcgggaagctgaggcaggagaatggcgtgaacctgggaggcggagcttgcagtgagctgagattgtgccactgcactccagcctgggtgacacagtgagactacgtctcaaaaaaaaaaaaaaaaaaattagctgagcattatggtgtatgcctgtagtcccagctactggggaggctgaggtgggaggattgcttgagccctaggagggcaaggctgcagtgagccatgatcacaccactgctttccagcctcggtaggagagcaagaccctatctcaaaaaaaaaaaaaaaaaaaaaagaaaagaaaagaaaagaaaagaaaaagaaagagagaaagaaatacttaggtgtaaatctaaaaaacatgcgtagggccaggtgcagtggctcatgcctgtaatcccagcactttgggaagttgaggctggcggatcacttgaagtcgggagtttgagaccagcctggccaacatggtgaaaccccgtctctactaaaaatgcaaaaattaggcaggtgttgtggcgcatgcctgatcccagctactttggaggctgaggcaggagaattgcttcaacccgggaggcagaggttgcagtgagccaagactgttccactgcactccagcctgggcaacagagtaagagtctgtctcccgaaaaaaaaaaaaagaaaaaagaaagcattgaattgtatgctaaaaactacacgatgctgattaaagaagtcaaagaagatctaaatatatggagagacatgctgtactcatggattgatggattggaagactcaacataagaaagatatcaattttccccaaattaatatacaagtttaatccaattcctataaaaataccagcaagattttttgtagatataaacaagttggccaggtgtagtggcttacacctgtaatcctagcactttgggaggctgaggtgggaagatcgcttgagcccaggtgttcacgactgcagtgagctatgattgtgtcactgcattccagctggcactccagcctaagtgacaaagggagaccctgtctcaaaaacaaaaacaaaaccaaaataattttgctctgcaaaatccctattaagaagaagaaaagaggctgggcacagtggctcaccgctgtaatcccagcacgttgggaggctgaggcaggctgatcacttcagcccagaagtttgagatcagcctgggcaacatgaggaaaccccgtctctaccaaaaaaaaaaaaaggtacatacacacacacacacacacacacacacatacacaagtatatacacatatatatacacatacaggtgaatagatgtatatacatctatttattgtgaatatacatctatacacacacgtgtgtgtacacatatatttaaaatttatttttatttatttatttatttttgagacagagtcttgctctgtcacccaggctgggtgcacctgtattcccaacgacacaggaggctgaggtgggagaatcactgagccagggaggcagaggttgcagtgagccaagatgttgcctggttgcctgggcaacagagcgagaccctatatcaaaaaagaagaataataagaaaagacagtttacagaatataagaaaatatattcacaatccacatacttagcaaaggactggtatctagaatatgataaacaactctcaaaactcaaaaccaaaaaaatgaacaattcaattagaaaacaggccgaaaaggacatacagttggcaaataagcacatgaaaagttgttcaacatcattaatcattagggatatgtacattaaaaccacaataggctatcactaaacctatcagaatggctaaatacaaaattggaacaccaccaaatgctgatgaggatgtggagaaactgggtcattcttccaatattggtgggaggctaaaatggcaaagccactctggaaaacagtttgatagtttcttataaaacaaaacatgcggccgggcgcggtagctcacgcctgtaatcccagcactttgggaggccgaggcgggtggatcacgaggtcaggagatcgagaccatcctggctaacacggtgaaaccctgtctctactaaaaatacaaaaaattagccgggcgtggtggcgggcgcctgtagtcccagctactcgggaggctgaggcaggagaatggtgtgaacccgggaggcggagcttgcagtgagccgagatcgcgccattgcactccaacctgggagacggagggagactccgtctcaaaaaaacaaaaacaaacaaacaaaaaacatgcaacaatccagcaatattgcacccctaggcatttatcctagagcaatgaagacttatgcccacacaaaaagctgcacacaaatgttcatagcagctttattcatggtagccaacaattagaaacaatctagatgtccttcaactggtgaatgattacatccataccacgaaatacttttcagcaataaaaaggatgaatcatagtacacaccacaacctggatgaatctccagggaattatgctgagtgaaaaaaagccaatctcaaaaggtaatatactgtattaatccatttatataacattcttaaaataactaattatagaaatggagaacagatgagtgattgccaggggttaaggggctcagggatggggaggggaaggggtatggctacaaaaagcaacaaccttatggcgccggaaatgttctgtattctgattgtgtcaatgtgagcatactggttgagatatagtgctacagttttgcaagttattaccatcagagtaaactggatagagggcacataggatttctctgtattacttcttacaactgcaagtgaatctacaattatctcaaaataataagtttagtttaatgctaggcgtggtggctcacatctgtaatctcagctctttgggaggctgagacgggtggatggcttgagtccaggagttcgagaccagcctggccaacatggcaaaaccggtctctactaaaaatacaaaaattagctgggcgtggtggcaagtgcctgtagtcccagctactcgggaggctgaggcaggagaattgcttgaacccgggaggtggaggttgcagtgagccgagatcacgccactacactgtagcttgggcgacagagtgaggctctttctcaaaaaaaaaaaaaaaaaaaaaaaagcaggcaggcagggccaggaaagcgtataatttttgtagttcaaatgactaacctaaaaagtgaagattggccaggcgcagtggctcacgcctgtaatcccagcactttgggaggccaaggcgggtggatcacgaggtcaggagattgagccactctggctaacacagtgaaaccccgtctctactaaaatacaaaaaattagctgggcgtggtggcacccgcctgtagttgcagctacttgggaggctgaggcaggagaatcacttgaacccaggaggcgaagttgcagcgagccgagatcacactactgcactccagcctgggtgacaaagtgagattctgtctcaaaaaaaaaaaaaaaaaaaaaaaaaaaaaaaagtgaagtttacctttttttttaaatttttcttcttttccttccctactttgtgagataattttcttctttttaaaaagccaagagcttacttctgtaagtaaagattatcttaagacaacttagaaatgtatattattagtattttctatttcattgtaagttatttgtaaatattggttttggtgctaacctagaattccatcaaattaattgtcccctaatatatggccattatcattttgtctaacattgtatcctattaacaatgctgtaagtattatttttgtagctaaattatggtttgcattttaaaattattgttttaaggataaagttccagaaatgaaattaaggatatgaactttttgagcacatcttgtcagcactgagtagtattatttaaaacttttggggggggcaattttataattgaaaaatatatcattgttttaatttgcatttctttcactgcctatgagattaaaacaatgcactactttccaaaaattcttaagtcttttgtgttgatgcttttgttctgtttctatggatctcatcttccttcagaacagctccccttcccaacttcctgatttctaacaataacagtatcaccctccttgttctcccaatttctgaaacacagagtcatgtttttttctctgcttcaatccctggtttcctatcgtcatcaattatgacctttccttgctttgaaagtgttttgggccgggcatgatgtctgccacctattgtaatcctagcactttgggaggctgaggcggctggatgacttgacctgaggatttcgagaccagcctgggcaacagggcgaaacctcgtctctacaaaaaatacaaaagttagtcgggagtggtggcacatgcttgtagtcccagttacttggggggctgaggtggcaggatctcttgagcccacgaggtagatgttgcagtgagccgtgattgcgccactgcaccccagcctaggtgacagagtgagaccctgtctcaaaaaaaaaaaaatgttctagtttcttcctcttctttgttcccatgggaatgccaccatcaccagccaaggctcacatacctcccacctggattacagtgagcttccaggtaatttggtctgctactagtctcgcctacttggatttcccttccccctgctgcagcattgccttccaaagccatgctttgcacatgccacatcctagcccattagactaagcctagaagcctctgcaggacgttcaccctctcagcgccactgctcagtttcccagtggaaacctctgcacccaggaggtttccccacagcttgcctgtgctgcctctctggagcttttctcccttcctgtaatgtccttgctgctccccgtctctagtccattgcctatacctctttttttttttttttttgagatggagtctctctctctcatccaggctggagtgcagtggcgcgatctcggctcactgcaacctttgtctcctgggttcaagggattctcctgcctcagcctcccgagtaactgggattacaggcgtgcaccaccattcctggctaatttttgtatttttagtaaagactgggtttcaccatgttggccaggctggtcttgaactcctgccctcaggtgatccacctgcctcggcctcccagagtgctgggattacaggcgtgagccaccgcacctgccacaggcccatacctcttttaagtcttcattcaataccagttgtcccatgaatttgtcccagactcactcatatgcttagacctttcatattatcttgccatagctttttcaaagtatgggacagcatggacaagcaggccatggttttcttttgaagagaagcaaggaggcagagttattttaggaggagggttatacatttcattttgaaccaattgcgtttggggtgatggcaggatattaacataaacttatttcttggaccattggaaatgtgtgcctagaactgaggagagaggtcagggctggcagtaacaacttggccacaatctgcagagctgactggggatgaggtggaatttagaatgtctgtagaaacggggaagagaaccaaagacagagtctgggacaacacctaaatgtagatgtcagagcaagagttcaagacgaagaaaaacgaatcatacttagaaatggaggggaggaacaaaagaggcggagcaaagtggggcagaaccagagtaggccacgcttttaagaagtttggtaaaggaactgtgaaaggaatgtagttgaatttcagggtaagctggggaattaaagcagtgtgtagatccagggcaaacagcaagtagggcaggaaccactgaaggaacaaataaagggggaggttgggtccaggttgtcttgagtagggaagtttttttaaaaagtgtgaaactgaaggtgtggggtggattgggtgcctgccgtgctctgaggaagcttggggcaactgtgtgctgaggctgtgaggttgtctggaaggggctcctggacagtaagagctgagcagtggggaagaggactgtgtggtctggaagaggagagaaaggagagtgagtgactgaactggtatccaggctcccacaccaaggcagaaagagggagaggacctgggcatctcagggaggcagaggcagtaccaagcagggtgagaggctttagtcttagccacctttgccccattcctccaaatatacattctaagtaaaaacaaaacaaaacagaactgtttgctatgtaaatttagcttctaaagccctgttctacagagattttggagcttccactgcacccagaaaatgcacagctaaagagaaaacttcccttggtgatggttattagattttacaagaagaggccaaaggagacacatacttatgccagaagaactttccagagatagcattgcatagcgaaatagcctgaattatttttattttttaaaacattttttcttttcttttttcttttctttttctttttttttttttttttttgagacagagtctcactctgtcacccaggctggagtgcagtggcgtgatcttggctcactgcaatctccacctcccgggttcaagccattctcctccctcagcctcccaagtagctgggattacaggcatgcgtcactatgctctggctaattttttttttctttttttttttggtatttttagtagagatggggtttcaccatgttggccaggctggtcttgaactcctgacctcaagtgatccaccgccttggcctcccaaagtgctgggatttcaggcgtgagccaccgcacccggccaaaaatttcttttctttaagatgaggcctcactctgttgcccaggctggagtgcagtgttacaatcatagctcactgtaactttgaactcctgggctcaagtgatcctcctgcttcagcctctcaagtagctgggattacaggcatgtgccaccacacccagctaattttttttaaaataattttttttagagacgagggtctcgattggctgcctaggttggtcccagactcctgacgggctgcattttaatcctagctccaccacttacgggagtcaaaattcaaaagatagaaaagggcatataggctgggtgcagtggctcacacctgcaatcccagcaatttgggaggctgaggtgggcgggttgcttgaggtcaggagttcgagatcagcctgggcaacatggcaaaacttgtatctactaaaaatacaaaaattagccagatgtggtggtgtacacctgtaatcccagctactccgaaggctgaggcaagagaatcccttgaactcaggaggcagaggttacaatgagcagagatcgaacactcgactccataaaaacaaacaaacaaaaaaagaaagcaggctgggtgtggtggctcacgcctgtaaccccagcacttcgggaggccaaggcgagcggatcacctgaggttgggcattcgagaccagcctgaccaacaaggagaaaccctgtctctactgaaaatacaaaattagccgggcttggttgcgcatgcctgtaatctcagctactcgggaggcagaggcaagataattgcttgaacccgggaggcggaggttgcggtgagccaagatcatgccattgcactccaacctgggcaacaatagcgaaactccatctcaaaaaaaaaaaagcaaagggcatatagtgaaaagctttcttcctacacatgagtattcacttcctcttcctagaggcaaccaaggttatttttgtgtgtgtgtgtgtgtgtgtgtgtgtgtgtgtgtgttttgggacagtctcactctctcaccaaggctggaatgcagtggtgcgatctcactgcaaactctgcctcccagtctcaagcgatcttgtgcctcagcctcccagtttttttttcttttaaatggggtctcattctgtcgcccagggtggagtgcagtggcatgatcatagctcactgcagcctcgacctcctgggtcaggttatcctcccacctcagcctccggcatagctggggctactggcatgcaccaccacactcagttaattttttttcttttttgagacagagtctcactctgtcacctagactggagtgcagtggtgccatctcatttgtttcactgcaacctttgacttctgggctcaagtgattctcccacctcagcctcccaaggcggctaattaaaaaaaatttttttttttttttttttagagatggggtttcgccatgttgcccaggctgatctcgaactcctgggcacaaacaatctttccacctcgatctttcaaagagctgggatgagagatttccaccatgcctggcctcattttcttttttaatttttttttagacattatagctctttttaatggcctcattttcttatgtttaattcgagaattattcttttcatatacaaagaatatattttctccacctttaaaaacaaatagtagactgtttaacatctcgctttattcagttagtgatgtttcttagatacgggtccaaattagtacacaaagcacttcctcattcctctcttacggctgcatagcagtccactgaatgggtgagctatgatctatttaacctattctttattgatggacatttggttttgtatatacatttgtaattctgtatagattacaaatcaccatccaaagaaattgtactggtttattctcctacaatgtgtgagagttgggtaattacttaatctcaatatgtgagagtttaggcagttacctaatctctctgagtctcagtttctctatctgcaaaataaacaaaacagtgttgacagtatctatttctcggaattattgtggagattactgagatgatgcctgtaaagtatttggcatgtaggagttggtgctctccaaataaggatatgattttatttgtatttgtgagctactgtcccagccaggtaaatggatatgatgagacctccttgccagaccgggtttctctgattagaacgaggagcagatgttgcaggaaattagcaactgatatcagaagagccgtgggcattctcttgccagaggtgccctgtctccagggcgcctcagtccccccccatatgtcttctgctcccaggtccatccaagctgaatgatcgcgctgactcaagaagaagcctttgggaccaaggaaactttcccctgatcatcaagaatcttaagatagaagactcagatacttacatctgtgaagtggaggaccagaaggaggaggtgcaattgctagtgttcggatgtgagtggggcaggtggggatgaggatacctcctgcctggttcccttccccactactcccacccctgcaccaaatccagcctgagctggtgataccgcagcagccccaagaggaccaggctgtcaaactggcctccaaatgtcttaaaacccttcttgatcaggtgagggatgctggtgggcggaggagggaagaggccttgggaaaaggaaagaaaagggaaggaggcaagggaaggagggagagagactggggaagagaggatgaggggagaggaggaaagaagagagagaggaggggagagggaaaccctatcttggctgggggtgcgcagctgggtgctgggaggaaggagatgttgggacggcgataatggagagatgttgttggtttcctgttgtctgcccttctccttggggatggtatgtgtgtgacacagctggcctttccctccacagtgactgccaactctgacacccacctgcttcaggggcagagcctgaccctgaccttggagagcccccctggtagtagcccctcagtgcaatgtaggagtccaaggggtaaaaacatacagggggggaagaccctctccgtgtctcagctggagctccaggatagtggcacctggacatgcactgtcttgcagaaccagaagaaggtggagttcaaaatagacatcgtggtgctaggtaagggaagcccctcttcgcgcagtctcctccctgccccaggggctgacagcccctccctctgctctgactgccctgtttctggttctggtgctgggaggtcaggagtggagaagactaggtcccctagagctgaggcctgtcttgaaggactcactggggccctcatcctcagggggctgattggcagccacccctcagtgtggtggacatggagaaaggaaaggctggggaaggtaaggatgctagaggcccgagtctcctttggaggccccaaaggaggaatgtcagggagcttactttctttgttgcctcagctccacacccctaccaagttggcaaatccacttactcagggacactaacaccagtaagccaaccctgatgatgttctatgttgtacctctggacctctaagccaggccactgtggggagaccaaggtcctaccccagatcctgtcccctgggtgcttatgtgacttaaggtagacataaggtagtgtgccagtttagtgcatgtacgctgattgaaatcctggttctgccacaaccatgtgaccttgggtgagttactaaacctctctgcaccttggtttcagcctctgtgaaatggggatgatgttaactgccatagtgactacctcgtattaagttgaggactgatatacgtaaggcactgaaaatggtgcctggcacagagtaagccctagttaagtgttcgctgttattttgtgaagggtgatgaatacgcctctaaggagtggaggccaaatggcttctgtggtccaggaatcctaaggacagcaaggatcccctgtggctgggctgctctgtgatggcttccgggaggagggaggtggcctgctgtaggaaaatgctgggtggaagaagggagagaaggctggagaggtaggaaggaactgaagtatctgaagtgacaaggtgggtgtctggactcgtcgggtccccttccatctccctgctgcctccacatgccaaccccactcgtgcaccctcatcttcctatctcctcacccagggtctctcccttcccacctccagctttccagaaggcctccagcatagtctataagaaagagggggaacaggtggagttctccttcccactcgcctttacagttgaaaagctgacgggcagtggcgagctgtggtggcaggcggagagggcttcctcctccaagtcttggatcacctttgacctgaagaacaaggaagtgtctgtaaaacgggttacccaggaccctaagctccagatgggcaagaagctcccgctccacctcaccctgccccaggccttgcctcagtatgctggctctggaaacctcaccctggcccttgaagcgaaaacaggaaagttgcatcaggaagtgaacctggtggtgatgagaggtgaggggccaggccagggaggggtgggcaggggaaggagttggaggggcctggcccagggctccctctgaggcaagccaggccccaagaggggatgcctaggccctggtcacctggatgaagtgagggagggccctctgggtttggggctggttttgaactgagacatccatgagccagcctggggctggcttcactgaagatccccaaagcacttgggctaagaaccagggttccagttcttcctataaccaaccctctgtgaccctggctaagccccctcccactgcaggcctgcttcctgacctgtctaataaggataatgaaatctgctctctgtgtgatagtaatgatgataatgtcaagctccaaattgagtttctggcttccttatctccttatcatcataacgactctgcaaatagtaatggctaacacttgatgctcagcacgtgtcgggccccatccaaacactttacatgtatgcctgcctttagtactatctgggtgcaggttgttaagtcacttgcccagagacacacagctgctaagcagtggagctgggattcaaatccaataccactggaccccaaacgctgtttttcctcgtaggactgcatgaaaacctgctctaaaaggctaaaagaaggtcacccatatagagtatcattttaattgttctactgaatctcaggcctttgatctcagcctctcgttcctctgcagccactcagctccagaaaaatttgacctgtgaggtgtggggacccacctcccctaagctgatgctgagtttgaaactggagaacaaggaggcaaaggtctcgaagcgggagaaggcggtgtgggtgctgaaccctgaggcggggatgtggcagtgtctgctgagtgactcgggacaggtcctgctggaatccaacatcaagggtaaggacccaggttccaaggcctctgcctcctgggctgcgggaccttcctgtggttggcagagaccacccagagtcccggcctcccaatgcctgagttggggggttatgggtatggtgtcctctgtggtcccagggtgctttggaggccccaaaaggaggcatagaagtgatgaagtgaggtgggttgtggtcctgggctctaggctgccagttgtaattctacaagttcccactccctcaggtctacagcctagggatggggtccacctgaccgagagcccccctccctggctcctggcttttctccaaatccagacgcacttacacacacactcacacacatacactctcacacacatgcacacactcccatacactctcacacacgcacacacatcactcacacactcgcacacactcatacacacactacacacacatccacactcacacccacactctcaccccatgtactcacacccatgcactcacacactgtcacacactcatacacacacatgtactcacacatgcatgcacacacacacttacacattcacgcacatactctcacccacacactgtcgtacacgtacactcacacacttatacactcacatccgcacacgcattattcacacatgtgcacacacgcgcgcgcacatgcatgcagtcacgcacacacattcatacacgcacacaggcacacattcacacacatgcacacacgcacacacattcacacatggactcacacgcgcacacgcgcgcacacacacacattcacaccattcacacacgcacacacatgcacacactcacacatgcacacacacatgcactcacacacacagcccaggagccagaccacagcttctctctctccagagtgccctggatatggatatgcccaaacataaaaccgattccccagcactggcggcctttgagagcccccaggcacccctcccctctcccccaaccccagggtcaaaccagagactggccaggagggattgcagggcagtcctcagtcccctggcccgtggaggagggcggtgcattgagcacatttctctcccttgcagttctgcccacatggtccaccccggtgcagccaatggccctgattgtgctggggggcgtcgccggcctcctgcttttcattgggctaggcatcttcttctgtgtcaggtgccggcaccgaagggtgagtaaccccacacctggtccccacaaggccctcaaacccctgagtcctctaccaggagatcctgtatatgggaactgattttggcccagctccctctgcccactcgtaagttcccttgctgccctgtcccagatcccactcaagggagagacaggaaggagcagagagttaattccaggatagatggcctgggccatgtaactgcttctcctgtcgcagcttcccccactccccccaccaaggggcacctcccttctggaggcctgggaccctcgtgactccctttcttgtccctggacagcgccaagcagagcggatgtctcagatcaagagactcctcagtgagaagaagacctgccagtgtcctcagtaaggatctgggaggaggggttgagagaggggaaagggggagggggagggagttagagaggagggggaggaaggggagcaaaggggggcaggaagggaggatggagaggaggaaggagttgaggaggaagagctgggaggggtggaggtgaggagatgggggctaaaggggtgtggtggagaggatagaggggtgggaaaagatggccaggagctagaaggaggcagaagtgggaggatggagctgaaggagcagcaggccaggaaaggccctgctggaaagccactggagctgtgctgcgctggaaaggccattggaggtgctagaacgcaaaggggttgcagtggggacagacctgctccccttcttctttgttcctgcagccggtttcagaagacatgtagccccatttgaggcacgaggccaggcagatcccacttgcagcctccccaggtgtctgccccgcgtttcctgcctgcggaccagatgaatgtagcagatccccagcctctggcctcctgttcgcctcctctacaatttgccattgtttctcctgggttaggccccggcttcactggttgagtgttgctctctagtttccagaggcttaatcacaccgtcctccacgccatttccttttccttcaagcctagcccttctctcattatttctctctgaccctctccccactgctcatttggatcccaggggagtgttcagggccagccctggctggcatggagggtgaggctgggtgtctggaagcatggagcatgggactgttcttttacaagacaggaccctgggaccacagagggcaggaacttgcacaaaatcacacagccaagccagtcaaggatggatgcagatccagaggtttctggcagccagtacctcctgccccatgctgcccgct

SEQ ID NO: 15509 - DNA, 49253 bp, Homo sapiens
gtaggcggtgcttgaacttagggctgcttgtggctgggcactcgcgcagaggccggcccgacgagccatggttgctgggagcgacgcggggcgggccctgggggtcctcagcgtggtctgcctgctgcactgctttggtgagtgaagcctgccccaggggccccgcgccggccggcgggtactgggcagcacccaggctgggtggacgcgccgggctcgaggcggttgccgatcagagacgggtggggacgggtcgctgtgggccgggaacaactcagccgtgggagccttttcaggaagagaaagttgttatttcatcgccagtgtccctcatggagtcagcaaggaactgtgtggccttagggaaggacgggctccggcccgctagcctctcctgcggggcctgcgcccccccgccggccccctcccgagctccagtgaccaagttccttcctgggcttccccagtaacgtcgctgagcgcttcagcggactgcaaaatttttcccagccgtgaacgcgcccgggacggggagcgggcgcggatgccacctgctcgagggcgacgcctgctgccctccccgcgcggtgccgtccccgcccgcgcggcgtccgccgtatcagcagagaggacttttcagaatcgccccacagcgaggagcgggtaggcaactaggaagcccagtcggcagcggcctcacgttgggattcctaagtggtgcgactcctgctcctttttcctcccctcaaatcctaaaaactagtatcagaactggttccatcctctccgtgtgttgtcagccaagtcgtcacaacaacctcaggaaataggtccccttcttcccattttgcctccccatcctccttcaccctccacacattggccccagtcaggccatagcaaaaccccgggagtacagcagtaacctcccagcgagttcaactgtacttgaggggttctcatggctggctcctgcaccccactgccagccctccagcccgtccgtccgtttgctcagcgtccgctgcctgcccgggaggtgcgcgtgtgcatctatggaagacagccaagggggaggggttgagatagactcaaaagtacccgcacgatcagataagtcagtgttgtaagaggcctgggctgggcgtggtggcttacacctgtcatcctagcactttgggaggctgaggcaggtggatcacttgaggccaggaatcggagaccagcagggccaacacggtgaaagatcggctctacaaaaaatacaaaaattagctgagcgtggtggcgcatacctatagtcccagctactcggaaggctgaggtgggagaatcacctgagtcccggaggcagaggatgcagtgagctgtgattgtgccactgaactccagcctgggtgacagaatatgacctgtctcaaaaaaaaaaaaaaaaaaaaaaggtgagctgtgagggtacagagggaagaagaaggcagtctcttttgtgaaatcaagtgtcttttgtgaagcagtcttcatgggagggaggatatttgagcccagccttcaaggactggtgatgtgtggacatgtgataatgtgggaaaagattgctgagtgtccccttagggagtctggattctctgagctgagagagcttctcctgggccttacaggatcaggaccatgcgcctgggaagaagaatctgttagcaacaaagaggaaggctgcagtcaggaggaattggaggcagggaggccagaaggccagggtggactaccatcacagggcccaaatagctctggggagttcatgtgcgggtggctggggaaaagaagagatacaaacagggattaattgaatggatggggtaactctcctccaggcaagctggtccctcattccctggcaccttgggtcactgctgcctgtacctgtgttctcccttccactgcaaacccagtttgcccaagctccacctccaacagattatttgaactgtcccttcctggtgatctctctcacctaattcatgtattcattcagaagtcatttgattcagcaaacatgtatttataaactgctctgcataggccttaaactaaagacaagactgaatgggtatatccccttttggggacccaagcctgcctcattagggaagctgcaaatgcagtgattaacagcatcagctctggggtcagatgcctagctttggatcctggccccactcctcacctgagtcatgaacttgtgtgagttccctaacttctcttcacttcagtaccttcacttttgaagagagtaccactcacatgagggaaaggagaataataaacccacttcatagaattactgggaacatcagtcatgcaataaatatttactgagtgtcaattatatgttaagcactgcacaatggacgggggatacagcaagctatgcacagttccctgcctttgtgaagctcaccttatagtgagggagagagacagtaagtaaatgagtaaaaacatggatgctggatggtgataaagtaaacatttactagtacagagatgagtaaagcaaagaaaggggtgatggaagtcgttaatacttcagtttagggttttttttgaaattttagaacaattaaaatctttaggacagttgcaaaattagtacagtgaacatttgcgtactttctccttgaatcaccagttaactgtcacattagttttctttgttatttttgccatctgttatttttgccaaaccatttgagagtttcagatctcatgacacctcacctgtaattctttatcatatgtctcataagaacaagagcattctccaacaagtcacagaatcatcataatctggaaatgtggcattgatacaatactgtttcctggtagagaacccagaagccagtcctgcaccacatacttcatttgataatcatgcctttttaaccccctttaacctaaaactgttgcttttttttttttttttttttggtactttaagacatcatcatttttgaagtgtctgggctagttgctttaccgaatgtccctttggatgtggattgcctgcttgtttcctcatgatcagattctggttgtaactctttgtagcaggaatacttcatagctatgttgggtccttctcagtgtgtcacatcaggaagatgtggtctgtttgtcacattattggagatgttaactttgacatttggttaaagtgaagtttaccagatttctccattgtagaggcaccattttacctttgtaagtaataaatgatgtgttaagtgatgttttgaggttgagtgaatatcctgttctccagccattgttcattcagtggttttagtatcctatggtgattcttcccagaatccattatcactaaaatattttattttattttttgagacagggtctcactgtgtcacccaggctggagtacaggggtgctatcacagctaactccagcctcgacctctgaggctcaagcaattctgccacctcagccttctgagtagccaggactacaggtgcatgccaccatgcttggctaatttttttttagtttttgtagaaacagggtttccctatgttgcccagactggtcttaaactcctgggctcaagtgatcctccctccttggcctaccgaagtgttgggattacaggcatgaaccaccacatccagccactaaaatattttcaaatggtaattttcttcccccacccttgtccctttcttctccctccctcccttccttccatccttcctctctcccctcccctccctccctcccctcccctccctttccctcccctccccctcccttcctgtcccttcccttcccttcccttcccttcccttctttccttctttgtttcattgccttttctcttttcttttgagacacagtctcactctgttgcccaggctagagtatagtgacacaattatggctcactgcagccttgatctcccagactcaagcgatcctcccacctcagtttccaaatagctgggactacagggacatgccttcacgtccacctaatttttttgtattttttatagagacggggttttgccatgttgcccaggctggtcttgaactcctgggctcaagcaatcctcccaagtcagtttcccaaagtgtcgggattataggcatgagccacccagcaattttctcttctgtttctctctatatatatatttattagtttacattgttcagtaatggatagcttttgcacacacatcctccctttttttcttttattttagaaggttatgtggactcatggattcttttttaaatatggcattcctgtcatccattttgatgctcggcaaccccacatttgacaagtgggaacaccttcaagcttcagagtccttttgctctgtttgttcctgtttgattttaaacacttccttactttctggcacagaaagatgttctggactcatcttgtagtgttcctgcctcagccttcgaatcattaggttccctggtttcttttagtgagagatggtatttagaaatcaagttctgggtgcaaagtgtgcccacaggtaccagagtcattgcttctcagccttgtcagttttcaaagttaagaaatagagtttttacaaagtcaggagttcaccctgatacttctaacactaataatcttgctgcttagttcttctgcctcttctgctcttccatatttgcatctccttactcccacagtgagaactctgttcttagtagcatcagtatattttcctaatctacattaaaccccaaatcattttacagttgctataccaatctactaccaactacaaacttactaaatacagttaaagatttctttacagttccttttatttttcattacagtctccaacttagcaatggttcgacttaagatttttcaactctacaatgagtttttcaagatataactccataataagaaatatctgtatatcccagtgaatatgcaatactatattcaaaagttacttggattctggccgggtgcagtgactcatgactgtaatcccagcactttgggaggccaaggcgggcggatcacaaggtcaggagattgagaccatcctggctaacgcagtgaaaccctgtctctactaaaacaaaaaattagctgggcatggtggcacacgcctgtaattccagctacctaggaggctgaggcaggagaatggcctgaaccaggaggcagagactgcagtgagccaagattacaacactgcactccagcctgggtgacggagtgagactctgtctcaaaaaaaaaaaacaaaaaaacaaaacaaaacaaaaaaaagttatttggattcttttttttttttctaactacccttcttaaacaaggtaacactctatgtatttttttgtatctcatttttgtcacttaaccatacatctggaaaatcattccctatcacttcatagagatccacctcattctttttcacagctgtacagtccctcatagggtggctatatggtagttcattcagctaccctctgctggttagtattacatagtgtggtcagggagggtctctttaatagggtgacaattgatcatacacttaaggaagtgagagataggccacaaggctatctgggggagtgatattccaggtctactactcaggaccctgagataggcttcaagcgtttaagaaacttcaaggataccattgtggtggagagtggtagaaaatgaagttataaaagtagtcagggttggatcctgtagataaagtttttagggccttttaaatattttggcctttttgctttcagtgactggaaagttttgaaggattttgaacaggagtgaaattatgatgacttggatgtttaaaagaattattctggctgctggatgaatagtctgtagaggagagaaaaggaagagcagggaggttggttaggctgcaggggcaatgcaggaaaggaatcactgggggtgggagatatctggatgtgttttgaaggtggagctggcaggatttggtgtgggcttgcattagtggaatgacatgtggatagggcctggatagtgctgggcaagtagcaagaactcaaaagtatgaacttggctgagagtggtggtgcatgcctgtaatcctagcactgagaggctgaggtgggcagatcttttgagcccaggagttcgagaccatcctaagcaacatgctgaaaccccatgatatggtttggctctgtgttcccacccaaatcttacgttgaattgtaataatccccatatgtcaagggcagggctaggtggagataattgaatcataagggcagtttcccccatactgttctcagatagtgaataagtctcacaatatttgatgattttataaatggggattcccctgcacaagctctctcttgcctactgccatgtaagatgtgccttacttctcctttgcattctgccatgattgtggggcctccctggccaggtggaactgtgagttcattgaacttctttcctttataaattacccagtcttgggtatgtctttattagcagcatgagaatggactaatatagtaaattggtactgggtagtggggcactgctgcaaagatacctgaaaatgtggaagcaactttggaactgggtaacaggcagggattggaatagtttggaagactcagaagaagacaggaagatgtgggaaagtttggaacttcctagagacttgttgaatggctttgaccaaatgctgctcatctcagatggagatgaggaacaattgttgggaactggaataaaggtgactcttaatatgttttagcaaagagactggcagcattttgcctgtgccctaaagatacgtggaactttgaacttgagagaaattatttagggcatctggtggaagaaatttctaagcagcaaagcattcaagaggtggcttggttgctgttaaaagcattcagttttatatgttcacaaagatgtggtttggaattggaacttatgtttaaaaggatagcagggcataaaagttcaaaaaatttgcagcccaatgatgcaatagaaaagaaaaaccccttttctgaggaaaaattcaagccagctgcagaaatttgcattaagtaatgaggagccaaatgttaatcacgaagacaatggggaaaatgtctccagggcatatcagaaaccttcatggcagcccctcctatcacaggcctggaggccttggagggaaaaattgtttcatgggctggacccagggcccccctgctctttgcagcctccaaacatggagccctgcatgccagctgttttagctccagccatggctaaaaggggccaacataccactcaggctgttgcttcagagggtaagccttggtggcttacatgtggtgttgggcctgtggatgcacagaagtcaagaattgaggtttgagaacctctgcctagatttcagaggatgtatggaaatgcctggatgtccaggcagaagtttgctgcaggagtgggaccctcatggagaacctctgctagggcagtgtggaagggaaatgtggagttggagcccccacacagagtccccactggggcaccgcctagtggagctgtgagaagagggccatcatccaccagaccccggaatggtagatccaccgagagcttgcaccgtgtacctggaaaagccacagacacttaatgccagctcatgaaagcagccaggaggatggctgtaccctgcaaagccacaggggaagagctgcccaaggttgtgggagcccatctcttgcgtcacctggatgtgaggcatggagtcaaaggagatcattttggaactttaaggtttaagactgccctattggatttaggacttgcatggggcctgtagcccttttgttttggacaatttctcccatttggaatggatatatttactcagcacctgtacccccattgtatctaggaagtaactaacttgcctttgattttacaggctcataggtggaaggtacttgccttatctccgatgagactttggatttagacttttggattaatgctggaataagttaagattttgagggactgttggaagggcattattgtgttttgaaatgtgaggacatgagatttgggaggggccggggtggaatgatatggtttggctgtgtccccacccaaatctcaccttgaattgtaataatccccgtgtgtcaagggcagggccaggtggagataattgaatcatgagggcagtttcctctatactgttcttgtgatagtgaataagtctcacaagatctgatggtttcataaaggggagttcccctgcacacgctctctcttgcctgccaccattaagacatgactttgcttctcctttgccttctgccatgattgtgaggtttccctggccatgtggaactgtgagtccattgagcctctttccttgataaattacccagtctcatgtatgtcattattagcagtgcgagaatggactaatacaccccatctctacaaaaagttagccaggtgtggtggtgcacgcctgtagtcccagctactcaggaggctgagatgagcctggcaattgcttgagtctgggaatttgaggctgcagtgagccatgatgacacaactgcattccagcctgggtaacagagcaaaaaaataaaaaataaaaaggtaggaactattttattattaacagagtctgtcttattctgctgttgttgacattttacagatcctttattgccaactatctgcataactagattttaagttccttgtatgcagaagtcatgtattattttttaaaattttccttatattgatctgtttttttttaatagtaaagattgttgaatctgaacattagatgacaatgtatttgtccagcatttctccatttgaaattatctcacattattatgtgagacttgttcatgtgctttgctggagttgagacttagacagtctgtgtttttttatttagcaaagataatccaagttaaaatagtgttgtgtgttcctataggaaaactaggcccagtgttataacagagtgtaagtaataatagccactaggaggtaagtacctgctctgtgccaggagctatgcttcagatttgagatgtttttatttaattgtcacactgattttattacatagggaacatttaataggagaacaaagcttaggtaggttcagtaatgtgtccaagttcacacagcaaataagtggcagagtgaacttgaactttgattctctctgaatcagaacctattcctttatatgctctgttgtatccctagcctgagatccactaagcaactttttgaagatgagtactactgatttcttatatccaacatgtatacattgtccaatgaaattctgctaaaacatgggaaatataggtcagcacaattaccagtcatgcaaaattgtatttaatatcataatttgtaatggtgaggggtgcttctttgggacatagaatttacaatggcaatttattgacatatttattattaacattattatatttacattctctaggtacccacatttcactcctagacacttttgcataatctcaataacatcataacatctataaatattaacactaatcctgtaacatcacctaacttttacccgtattcagatttccccacttgtcacaagagtgtcttttgttaaaaaacccggatctaatcaagtttcactcattgtattcgttgctatgtttttttgttttaattttgatgggcatctttcagaagttttaaaatagtcttagaacctctttttaagaaccagatttgaataatttattttattgacctccttgtcactctaacatttctttagtaaatacaggctttgagggtaggtattggtttctctgtttaaaagtagaaactttgcataaatcagcccttatatgtgtaagttttctgccttttggtttcttctcatgctgtttctgcacaagtgcctaagcttttttgaagctttacttgaggggtgaccagaaggttttacttaaggacacagacccttaaattctgcaatgacaaatctcaacttccatctcagggttgtaagtgaaaccaggatgcagccgtttctcttttctcagataagttcaggtttgaatataaagtgtgactataagatacagagactgtccctagaaaaggaggggaaaacattttagcagttcctctttggagataactttcagtgcctgcccatcagcctccaaggaaaatgctttttggttactttataggttctagtgaactttgcttactttacaatgttccccaaaatgtctgttgagattagtgcctgaatttccactgggctgaccagtctgtagtttcttgaacattttcttcctatgccagttaaaaattagaagaaaattgaagtttaacatacacattcagaaaaaaataaaaaatcagattaataagaaactaatgaggctgtgccattgtaaactacttgcaatagagtttcccaacgatgaactgagtatctagaaaataacaaggattctcaaggaattttagtgaaatgatcagtactgtattgaaataccttgaatcagactttggagaatagatttaaaaacactcacagccttaaccgatctagtaagaaccttattccctaaagcatactgtggatctcagctgtatcctatctaaggtgagaacagtcaaagacaaatgtggcctttgagaaaggtgggatgtgagtgtcttgaaacaacaggctaaagaagtgctctcaaatagaagtataatatggaacatgtgaaattaattttaataatatattttagttaacctaatatatccataatattttcatttcgacatgtattaggttggtgcaaaagttattgtggtttttgctatttttttttaatggcaaaaaccggcaattacttttgcactaacctagtagttactacaaaaaaatattaacaagagattttatgttccactttttaataccaggtcttcagattctggtgtgtatttgatactcagaacacatctccatttgaactaaccatatttcaggttctcactagccacttgtagctggtagctactttgatggattgcataggtctaaagggaaacatcttgagaaagaagaaataggttaagtgcaagaacaagaattaaaaaggaaactattttagcatcatattagaaggaaagtacagaaagaagttgatttagagaaccaacatcttaattcttgatgaacttatcgaggaggcagattgacagctgagagcaaggtccgggaaccttgctctggccttggggaccgagggtttgtaaccgttgggagacaggtggctgcagtttcagtatgaagtagatgagggcagggaaactggtggtggtgtggctgaaatcagtaaatctctgtcttaaggaaataagagaagtcactaactgggaccggctaagggtggaatcgatcaggaaaaaagaggaatggccccaaccaaggcatctgatgttctggccaacagtgcaggctctggggccgactgcctgtgtctggacaccagctctgccccttgctagctgagtgaatgcagtcagctgaccctctcagtccatttcttcatctgtagcctggtgcttcggaatctttgaccttctctatcaaccaagtgtccagcggagcaaaccaccttactttgataggcgtgttctcaagaaataactcctttctcactctcaccccagatgttcttaggctcgctcccctgcttttctggactctgctcagatgccaacttatgactgccccccatgccatccaactcctttccttaccagtactcctcagcccccacactctgctttatttttctctatagcacttaacatcatccaacatcatccaaataaaagatatttactttttcatttattatgttcttccctccactgaaaaatagactccaagagggctgggattttgtctgttttgttcattgctatatcctgcctgcttatttcagtgtctggcacataggcaggactccatgaacatttgatgaacaaataaatgaataataagaactacctcagagttgagttgaggattaaatgagttaatacacaaacagctcttggaacaagtgcttgtcacatagtaagcctgcagtgaatcttcgtgctgctgctactgttaaatattattactgaggctgagctggcctagggctccttggattggacttgctaagagctaggcaagagtcacaactgtatgaaacttgattgagttaaaacaaacagtgctactcctctttattatctccatgcctggtaagcacattttctacccccaaaattgggactgactaatatgagaatatttatggccttaataggacaggttatttgatacaattactagcctagacattttaggagattggccgctcctcaatactataaatgcatatatgggtgtgtagatagagatgttgcttcccagattgccacacatcctgatactgcaagtaggcatcaactgaaaatgtgccgtgatgtgaagaccaaacgcagagaagtgagagggacaaggctgtgctcagtgacccatatccagatgagaaatccatctgctcacttgggagcaaaaatgccccaagaccctgctatctctgggcttgcacgaggctttaaatgaatcaccattatgatgtcttatattcagagggaaataccaatattcatatattcaggtactgaaacttttaagggaatttttcttttttctttcttttttttttttttttggtcaaatgaacttttactttacctgctaaaatctgcaggcagtgtgagccttaaaatattttagagagagagagagaagtatcttaaaattacattgtttatttctaagaacaaactcaagaaaaccctttccttcaaatcccggaagagtgattagcttgtctctaaggtatggcattggctgggcatggtggctcatgcttgtaatctcagcacttcagaaggcccagggaggaggatcacttgagcccacgagtttgagatcagcctgagcaacatagtgagaccttgtttctacaaaaaatataaaaattagctgggcgtggtggcatgcaactgtagttctagctacttgggaggctgaggcagaaggatcacttgagcccaggaggttgaagctacagtgagccacgattgcaccactgcacaccaacctgggtgacagaatgagaccctgtctccaaaaagaaaaaggaaggaaggaaggaaggggagggaaggagggagagagagagggaaagaaagagaaaaataaaaagaaagaaaagaaagaaatgacatcagtgaacctcctcaaaccatagcgaggctgttaagtttgattggggctgacatccatgagtgggtacaagtttatctggtgtggtgccctgcatcctataacacttagttggtaaaatctacttaaacttgagagggaacatctcaaaagggacagctgtggagttgggaaggtggagcccgcaggtcctcccatcttgctttggtgatgaggcagaaagtggggctgaaaaactgagtctgttttggttgtatatgagggctcctgagccattttatttttaagctccagttaaacttctttctccatctctccttacgaagtcctccttcttcagccaggttccacagcaatttgggatttcacaaagcccagggtttggggtgactgtcaaattttgctattctgtcaggaagccttatcttttgaactacatttaagttgtattttaatcattttagttaattcattcaacagatatttattgaaagtccatatgccagacatatggggatacagccaaaaacaggaacacctttgtccttgtcctgatagggctagcctggctggggttacccctaagctcagatttgaattagttgccaactttcaagaacaggaattttcacacaaaatgtgaatatctggctttttttgaaaaattgggaacctggcaatggtgggcctctgtttccacatggcaggagctgaggcacagctcctgtttccacatggcaggcccctccctgtaggctcactggtgcgcaagtcctcaccagtcccttctgactcacacttggcccgctggtatctcctctgtgggtggaattgctggtcttcgtctaatgcgtcatttgccacagttctgtttctttgtgactcctttgtttgctcgttttctttttattgtttctggtctggctttttcttccttgactggagtcttgctctctgaggccctcttcagctctagcattcgatgatttggaaaccacagagcttagtgcctcacctgtaggtttggaggtgtgcttaactcagtttgactttctcatttgcaacatctgctgttccaatgctgtctatagattgtatcctgagaaaccctgcatcatgtcactatctttaagagccttatgccatgtagcaagctaaataagaaacaatggttaagagcactgattctgcagtcagattgtccaggttcaaatctggcttcattacttaacattgttgtgcctcagtttcctcacctgcaaaataataaggttagaaataaaaccttcttaatatgtttttaggattctgattttttttttttttttttttttttttctgagatggagtcttgctctgtcacccaggctggagtgcagtggcacagtcttggccactgcaacctccacctcccgggttcaagcgattctcctgcctcagcctcccatgtaactgggattacaggcgagtgccaccacgcccagctaattttgtatttttagtagagacggggtttcaccatgttggccaggctggtctggaactcctgacctcaagtgatccacctgccttggcctcccaaagtgctgggattacaggcatgagccactgctcccagtggtgagtacctatttatagagcccttgcaacagtgcctggcacagagccagggccatacaagtgttagattaagtaaaaaaaaaaagtaccagtcaatctgaatctcaggccctgagtaataatttgcagaggaatttgtgctgggggttgagagttccttttcattaacccatagttaacggtgaccagattttctaaataagaaatcaggatacttcatctataaaacttgggttccagttacaacttcaggccatacaaaaagaactattaaaattgaggtgttgatgttttgtagaaacactgcaacagaatatttgagatcagacctgtttttagatatgtgatcactctatacatgtagtgctgattaggtattaggtaccctcatatctttatttaaaaaaaattcaaaattcttcaaaacaaaaaaaccttcaaaaattatctggctagcatagaaaatctttttaggcgatcactgataaaattttttccctccctccatctctctttgcttttaaacagcaaaaactcaccccatgcccagttctcacccagttaattcagacagtgtgaataccttgatgttgacctaactcattaaaagaaaaagagagaaaacctttgaaagcctattccatgtcaaccagtgtaaaaagactctcaattttattcaaacctgaaaacaatcttttatggtgggcattatgatttctacttcacagctgaggagatctagtgtggggaggcctttgggagttcaccctgggccttgctggcttcaaaatctgggcactctctgttctgcactctggcatggttattagcgtccctacagtcccttttctgaccactcagtggtatcagcaaagcaacaaactcactgttgacaccattcctttgctcctatttgtgtattcattcattcattcattcattcgttcatccatggtttgtgacctttgagaaaaaactcactcccctttcttctattgttcttttgttcattagaaattatcttagcaacttactttagtgttggccttggaagtgcaacagaaaagactttactgtaggaaggaaataatagatatacccatgcacacaaagtagaggtagatattagttttagagacagttcttaacaactcctcctcttggttgaataattctatttaaaaaaaatttacatagttttaatattataatagtaataggatatttgtcttcaaaagtaacatatttttcaatgtgacctgtattaagtaataagtaataaattgaaatctcaccatcaccacaatctctaaagtaaccgtggttactttaaaaacaaccactgttaatcatttagggtgtctctttccagtctaaaaaaagagcaagtgagaatgcatgtacacatgtattcatgtctttttatagttaaaatatatatatattttttggtagagacagggtctcactacattgcccaggctggtatcaaactcctgggctcaagtgatccttccactttggcctaccaaagtgctagaattgtaggcatgagccaccacatctggcctctttattgtttttaaaaagaggaatattctgcatatatatttctataactttttatttttaatattaagaaattttccaaattcccaataataaaaggagaatatcctgtttccttttttaaaataaccacatagtaagccatggcataatactaaattgtttaactattagactagattattatttactagtatagataactttaaaatgaatatcattatgcatatctctttatgtaggttatactattgttttatttgttaacatcctgaataaatatcacccagatcccagtattcagtgaaactacaggttcttttagagcataagcaaaaataaattgtatgcatgtgtttttgtatgtgtgtttaattctgcttacatttgaattttcttccatctttttcctactatctgagtaatatcactagtgccttttattcagtcaagtctccacatgttgactcttgtcttggagttatgatgccatccccctcctggcctttcttctacttcccaggtctctctcagtctccttagccagtgttttcccctctagccaagctttaaagcacaggtccaagctgccttttcccacttcatacgctctcccaaggtgatggtcctaatggcctccattggagccactagaaatgtgatgactcccaaatctgtatcctttcctgtgagtcccagacctgtgtacttagcagctactgggcatctttgcttggatgtctcacagacccctcacactgaacagtgtcaaactgaaagcatgatgttccaggccagtcttagtcttcctgctgtgtttcctttcttagggaaagacaccacaacccacctaggaggaagtaagagctgtgattcatcctggccctcctggcacctcctctcctcctcctttaccccatatgctgtcaatcatctagttctcccagttttacctccctaatgtctcttgaaccactttgcctagcacaatgctgcctcttgaccagtctgaaattgctgtctgatggatctcttgctatctagtcttacccctcccatcagtcttccacaccatagccagaaaagataaacactttcattatgtaaaaatatagaaactttgtatggaagatattcatttagtaaattcaataggcaaaggctgtatttgaaaaaaaactataatacagataaaaatatataacatataaggagcctttaaactttgagaagaaaaaaacaaacaatctaatacaaaaaaagaggatgtgaaaagacatttctcagaaaaagaaatccaaatcaacaagcagaagagatgcttaaatttttaaaggttgggaaaatgcaaattcaagtatcaatgaaatgtcactatttgcccaaaaattaaacataaaaaaaaaattacctaatgctgtcaggagtccaaggaaagggcaactcaggcattactgatggagatgtaaattgccaaagtcttttttgtaaacaatgcagcaacttctattaaaataaaaaaaatctatttaccttttgatgtagcaactcccagctccactctactcccacataaatatgaaaccataaatacatcaggacatatgtacaggatagttattgcggtgtaactgcaatagacaaagctagccacaaaaggagtgttcatcagtggtggatggcagattaattatggttccctcatgctctggaatattatgtagttattaaaaagaataaagtatagctataccagttgatttcaaggagattttatgacatattaatggaaaggcgggatgtagagaagtgtgcataagaccatttttattaaagaatggtaaatccctcaggcacacctccttttattgcatttcactttattgcacttcacagataatgtgctttttacaaattgaaggttcgtgacaacccagctttaagcaagtccatcagtgcctaactttatgttttgtctctctgttacattttagtaattcccacaatatttaacgctttttcattatcatatctgttatggtgatctgtgatcagtgatctttgatgttactgttgtcattgttttgggatgccaagaaccatgcgtataagacggtgaacttaattgataaatgctatgtgtgttctgactgctccactgactggctgttctccccatctttctccttctcctggcctcccttgtcacctgagacaatgatactgaaattaggccaatttaataaccctgcaatggcttctaagtgctcaagtgaaaagaagagttgcactgtctctcactttaaattaaaaactagaaatgattaagcttagtgaggaaggcatgtgaaaagccatgacaggtggccgggcgtggtggctcacaactgtaatcccagcactttgggaggccaaggtgggtggatcacctgaggtcagaagtttgagaccaacctggccaacatggcgaaaccccgtctctactaaaaatacaaaaattagctgggtgtggtggtgggcacctgtaatcccagctggttgggaggctgaggcaggagaatcgcttgaacctgaaaggcagatgttgcagtgagccaagatggcactattgcactccagtctgggctacaagaatgaaactctgtctgaagaaaaaaaaaaaaaaagaaagaaagaaaaaaaaaaagccacgatgggctgaaaactaggccttttatgccaaagagttagtgaagttgtgaattcaaaggaaaagttcttgaaggaaattaaaagtgctacttcagtgaacacataaataagaaagtgaaacagcgttattgcagatggagaaagttcgagtagtctgcatagaagatcaagccagctacaacattcccttaatccaaagcctaatccagagcaagaccctaactctctttagttctgtgaaggctgagagaggtgagaaagctgcaggagaaaagtttgaagctatcagaggttagttcatgagatcttaggaagaaagccatctccataacataaaactgtgaagtaaagcagcaagtgttgatgtagaagctgcaagaaattatccagaagatctaagattactggtgcaggatacatgaaacaacagattttcaatgtagacaaaacaaccttctactggaagaagatgccatctaggacttccatagctagacaggagaagtcaacttcaggcttgaaaggacagctgactctcttgttgtgtgggctaatgcagctgatgactttaagttgaagccagtgctcatttaccactctgaaaatttttagggcccttaagaattaggctaaatctattctgcttgtgctctataaaatggaacaacaggctggatgacagcacatctgtttacagcatggtttactgaatattgtaagcccactgttaatacttactgcttagaaaaaaaagattcatttcagtatattattgcttgttgacaatgcacctaatcacccaagagctctgatggagatgtacaaggagatgagtgttgttttcatgcttgctaatacaacatccattctgcagcccatggatcaaggagtaattttgcctttgaagtcttattatgtaggaatacacttggtaaggctatagctgccatagataattattcttctgatgaatctgggcaaagtaaattgacaaccttctgaaaggattcagcattctagatgtcattaagaatatttgtggttcatgggagaagatcaaaatatcaacattaacaggagtttggaagaatttgattccaatcgtcaggtcaaaatatcaatattaacaggagtttggaagaatttgattccgatcctcatggatgactttgaagggtggaaatagcaagaaaaatagaagtggagcctgaatatgtcactcagttgccacaatctcatgatgaaaattgagccaatgaggagttgcttcttatggatgagcaaagaaagtggtttcttcagatggcatctatactcctggtgaagatgctgtgaacattgtttaaatgacaacaaagggttaagagtattacataaatttagttgataaagcagcagcaggatttgagaaaatttactctaattttgaaagcagttttactgtgagtaaaattctatcaaacagcattggatgcctctgagaaatattttgtgaaaggaagggtccattgatgcagcaaaactcatcattgtcttcttttaagaaattgccacagccattgcagcctttagcaaccaacaccctgatcagtcagcagccatcaacattgaggcaagacctttcaccagcaaaaatattaggacttgctgaaggctcaaatgattgttagcatgttttttttttcagcaataaagtattttttaattaaatatgtacattgtgtttttagacataatgctattgaacactttaatagactacagtatagtgtaaacataacatttatatgccctgggaaaccagaaaatttgtgtgacacactttactctgatatttacatgattgctgttgtctgggaccaaacccacggtatcttcaagctatacctgtgtgtatccattatatgtgatacatgtttgtatctatttgactatatgagagaaaaatattgaaagatgtattctgatttgttaatgtagattatagaactggagattgttatggggttaagagagtgggtaaggcacccagataagaggactgaaaaaatacttatatgatcgtttttcattagtgtaaagttgtatgtatgtgtctatgtataatttatgttttaaaatacattttttaaagaaagagttactcttattttgtccccatcctgtttgaaactcttctatggctttctttacttcaatactagaattgtgtttgtttgatgccttgcaagggctggctgtgcttgtgtatgcagctcggcttatgctacttttctcatgccattgctcctgcttcaaggtctgcataattgttctcttaatggggacctgccctgctctcctgggcatagttaactgctgcttgtgcctcagaacttcttttagggaagggaactgccttccctaaccccttgttagttccctaagtaaatgttcttattgacacctgatgcttttacttagcagcaattatcacagttgcagttgggcattgtctaattatttgtgtaaattctgcctcccctaatagaatgtcaactctaagaaggaagggacggtgtctgtcttgttctcaaggatcttatatagaatagatgcccaatgaatatttcctgagtgaatgaataaatgaatcccatcctgaatgtgggaccacgctgttctgaaagggcactgaccaaggagtcagacaatgtgtgttctggtcattgtgccgccataaacttgctgagagacatggagcaaggtgatatgcctcttggagcctgctttcctacctgtaaatggggttaataacacctactgcaggtagacatggagagggataaaaaggaatacaagacaatgtgaacatataaccagcagagagtaagcattcaataaaattgccttatatttttcttggtgtcttgtcacttcaccagtgaaatgggagtaatttgactaaataatttttagagtttcttctagttcaaaattatagttgacccttgaacaacatggcaattaggggcaccaaccccttgagcagtcaaaaatttatgtataactcttgactcccaaaaacttaactgctaatagcctaccagaagccttaccaataacataaacaacacatattttctatgttatatgcattgcatgttgtattcttacactaaattaagctagagaaaagaacttattaggaaaagcataaggtgtagaagaatgaaactggatcctcatctttcaccttatataaaaatcaactcaaggtggatcaaaaacttaaatctaagacctgaagccataaaaattctagaagataacatcagaaaaactcttctagactttggcttaggcaaaaggtcatgaccaagaacccaaaaacaaatgcaacaaaaacaaagataaatagatggggcttaaattaaaaagcttctgtacagcaatataaacaatcagcagagtaaacacacaacccacaaagtgggagaaaatattcacaaactatgtatctgacaaaggaccaatatccagaatctataaggaagtcaaacaaatcagcaagaaaaaagcaaacaatcccatcaaaaagtgggccaaggacatgaatagacagttctcaaaggaggatatacaaatggccaacaaacatatgaaaaaatgctcaacattactaattatcagggaaatgcaaattgaaaccacaatgcaataccaccttactcctgcaagaatggccgtaatttaaaaatcaaaaaataatagatgttggcatgggtgtggtgggaaaagggaacacctgtacactgctggtgggaatgtaaactagtacaaccactatggagatttcttaagcaactaaaagtagaactaccatttgatccagcaatcccattactgggtatctacccagaggaaaacaagtcattttatgaaaaagacaacacacaacatgttgcacacaacatctttatagtggcacaactcgcaattgcaaaaatatggaatcagcataaatgcccatcaatcaatgagtggataaagaaaatgtgggagatatatatatatatgaatatgccataaaaaggaacataataggccaggcgcggtggctcgtgtctgtaatcccagcactttgggaggccaaggcgggcagatcacgaggtcaggagatcgagaccatcctggctaacatggtgaaaccccgtctttactaaaaatacaaaaaaaaaattagccgggcatggtggtgggcgcctgtagtcccagctactcaggaggctgaggcaggagaatggcgtgagcctgggaggtggaacttttagtgagccgagatcacgccactgcactccagcctggggacagagcgagactctgtctcaaaagaaaaaaaaaaaaaaaagaacaaaataatggcattcacagcaacctggatggaactggagaccattattctaagtgaagtaactcaggaatggaaaaccaaacatatgttctaacttacaagtgggagctaagctatgtaagaatgatacagtgaactttggggacttgtggagaagggtgggatggggatgagggataaaagactacacactgggtacagtgtacaccagaatctcagaaatcacacccaaataactaaaaaaaaaaaaaaaacttatccatgtaaccaaacatcacctgttcccccaaaactattgagataatagtaataaaaaaatttaaaaaagaaaaaaaagcataaggaagaaaatatacttactaagtgaaagtggatcatcaaaggtcttcatcctcattatcttcacgttaaagcaggctaagtgggaggaggggttggtcttgctatctcagggatggcagaggcggaagaaaatccacatgtaagtggacccacacagctcaaacccatgttgttcaagggtcaactgtactttgatttcttctgagctgcagtctcccctttctctaccctcacttccctccaccactagctccattcctgactactttcttctactgttctcaagcccaggatacatcagctctccctgggaaagacaaaagacatcttcatgccgccagggtatggcagtttatctcatacctactctttcaccaccaccctgccctctatcactcattgtttcatttacatttataagacatttttgagtttccactattgtgtgtggtagactctcaccccttgaattctgtactttttcttgtgccttcccacatactctgttgagtggaggaaataatgcataatcggcaaagcaatggaaagatgctggtgtgtttttgagggcagttccccttaattaagggagatgggttctaaaaagtccttgtagataaacaaatgggtgatatttgcttcttatctgaaattactaacacagttgtctacaactggtcattcagtgttcttgatttcccctgtattatttcaattaccctaattgctactaggcaaaaacttcagtcaaattttaattgctctttaatgttaacttaaaatagctgcagttttttgtttgtttgttgagacaggtcatgctctgtcacccaggctggagtgcagtggcacaatcatggctgactgcaatctctgcctcatggcttcaagtaatcctcttcagcctcccaagtagctggggaccacaggtgtgtgccatgcccagctaattttttgtacttttcgtaaagatggggtttcgccattttacccaggttggtcttgaactcctgaactcaagcaatccaaccaccttggcctcccaaaatgctggacttacaggcatgaaccacaggacccagctgctgttctctcttaacaagagacaagtcctagagcaagatgcatttaaacccactttggggtatcaaaaatatcccaatcttgtggttctaataaatgtttaacaactaggttggtatggaggttctgatgtgaagcattagtcagtttctgtgctgttactagatgttccctaatagggctgggcagagatgctaacaattggctcatgagggcaggtggacctggctccaacccaccactgcacccaatccctgagttcttaatcttcatcacaccctcgacttgcttcccagccattgtttctgatctcagttaatgatgcctctcagtcagccaaggagacctgacagtcccatccacttcccccaccctcatcactgaatcctgttgacttctctctccagcatctcctgagtctgtccgcttgtctgtccccactacaaacaccctgctctggtctgtcctgtccatggacttcattgctacagcattgactttcattataatttccctgcctctgtgctggcccctgtcagccgctctctactctaaagacagtcagcctgctgacacttaaattatgttaggccagtcttgttaaaaacctttctgtggcttcctctccattaggatcagtccaaacccttagcgttccttactttagcacacataggctgtgggctggcctttgtctgtcttgttccccaccagccaccccttgccctcctcattctagctgttaggaatcacgtgtgtatcctcaagcacaccatgctctttctccattcagggccttcctttgggggtgctgcttcctatatatctgtatgatcatctcttcttccactccccacccactcacctacccagccctgcggcctaactgccttttatccttcagtgatttgcacgttatgtcagttccagcatgacttccttggggaggccctagaccaggcagctcccctcatgcagcccctgatgtagagcctgctccctgtcttctccacacgtgaggctcctggagggcctggaacaaccccatattcccagcccagcccgtactacctggcagatggttggtgctccatgaatgtcgggtccatttcttggatttatgcaggtcccagttttctattaaagagtaagctccacatggtcaaacatgttcttacttcctgtattttgtgtcagcagtttgtcagcttagcacaaaaagtacctgatgaataatttctgccaccaaagtcatgttgttttttctaaccaatttttttttctctcctaggtttcatcagctgtttttcccaacaaatatatggtgttgtgtatgggaatgtaactttccatgtaccaagcaatgtgcctttaaaagaggtcctatggaaaaaacaaaaggataaagttgcagaactggaaaattctgaattcagagctttctcatcttttaaaaatagggtttatttagacactgtgtcaggtagcctcactatctacaacttaacatcatcagatgaagatgagtatgaaatggaatcgccaaatattactgataccatgaagttctttctttatgtgcttggtgagtattccataagttgatttgtttaaaatggcaaatttccatttttttagtctgttttcagagactagcacaaattaatggtctatgagaaaagaattagatgttacctgttgtcagggttttctccttttctggtatagaggagctagctactttcaattcctttgtcattcctctgggtgaggagagaatctaaccaaggtggggagaacagtatcagttgtcttactaggaatgttttggaaagagatgtagtgacagcagttagcttagaactctttgggctccactgatagatgttactctataaagttcctgcttccccacacagcggggagattgtttttcctcctgcaccattttatttaattaatttatttattttgagaaggagtctcactctgttaccaaggccagagtgcagtggcacaatcttggctgactgcaacctctgcctcccaggttcaaagtgattttactgtctcagcctcccaagtagctgggactacaggcccgcaccaccatgcccagctaatttttgtattttagtagagatggtgtttcactgtgttggccaggctggtctcaaactcctgagctcaggtgatccacccgcctcagcctcccaaagtgctgggattacactcatgagccaccacacccagctcctgcaccattttaaactgaaactagagagaggggacacatttctccctgcttctcactgacactcctccctggtctctaaagccccttttgtgttgcagtcttgtataggcccctgcctcacatgccagtgtttcttggtcattttaaggcctgcctcattttcattgtttctgacattcctggtgtcttggtggttgcaatatttaaattaaaattctttcaatattgtccttgatcgcctctcctgtaaggatcttttcctctacgttacccactacccatggatgtaaccgagaactcatcattacctcaatgtcaggtgtctcactctgaccaccatgccctgtccttgatgatgctgatgctgacagtccttcacacacctgatgtccctgctgccctccctactcagcctgagtgctgttgtcactcactagactcagtccgttgcagacacacttagcttccttgctcctttgctggcttgtcatactcgcatggccagattacagctagattaagtccgctgctttgcctattctgtgctcacacccatgtggttgcagaaaaatacaccaccctacaaagtcctgcacttttaatttctctaatcacttacctcaattaagttggtatttcctagcctgttcacttacccactctcctagcagttactttttctctcctcaaatcttgaatacctccttctctagactgactcttcagctgaaggctttgcttcttatttcactaaggagaataagcaatcagagggcaatttccacaagctctcaccacctgcctaccttcctacccatacctgagcctgtaggccctgctttctctcctgatatgaatggactttctgagttctcacctgaagttaaactttccacgtgtgccctggatcccacctcctcttgccgtcctcgggaatatcaccctagtgcttctacccactctctcctgatgagaatttcccccataagttgatggttcattttaagtggcatacatatatactgtcattaaaactttctcatgatccctgtacccctccagccaccaccacctgctgtcttcactttatagaaaatctccttgaagaagttgtccatattcacttattctgatcccttatattcacttttaacccactccaaataggctttcatctgcactgctatgccaaaactcctctagacctccttgttaataaatccagtggttcattctcagtccatgtcattcttgacttctcagcagcttttgacatagctgatcactccctcctccaagtactgtcttcacttgacatccaggataccaccctattcatgtttctttctcttttttccttgagagggggtttcgcccttgttgcccaggctggaatgcaatggcgcgatctcagctcactgcaacctatgcctcccgggttcaagtgaatcttctgcctcagcctcctgaacagttgagattacaggcatgcaccaccatgcctggctaattttgtatttttagtagagatggggtttcaccatgttggtcaggctggtcttgaactcctgacctcaggtgatccacctgccttggcctcccaaagtgttgggattacaggtgtgagccactgtgcctggcttcacatttctttctaacacactgactattccttttcagcttcttttgctagtttccttgtttccccaacctcttaacactggaaacatcaaggcttaagccttaggtctctttccttttctgtctgcgttcatagccagtgggtgagctcatcccatgtcagggctttaaatatcatctcaatgctaataatgtacagatctagagctctagcccagagtaccccgccgagctccttatgtgtatacctgactgcccagtgtacctctccagtcagacatctaattggcctttcaaatatcacaagtccaaaagtaagctcattatcttccccttaaaacctgctgctcctccccaaatcttttcccttttggttaatggcagccccatcctttcagctggtcagtctgaaaccgggatgtcatccttgatacctctctttttcttgaataccacattcactctaccaggaagttgtattggttctaccagaatgatctttttaaaacagaagtcagatcatgtcactcatctgtgtggaactttctaatggccccatctaactctgttaaagctaaaatgtgtaaagcgacttgcaaggctatgtgaggtctgacccctgtggactctatttagacaaatacagcttgctaagatgtcaaagtatcctcttagaagatttccttgaaaaagtagaatctttgaaacatggacattggggatctgataatttatagatagggccaacaaacaagaggattgagtcagaatttagatcacacattttaagagccctttttatagagtttgtaaaactaattcaaaacatttgaataaatttctcctcttaaacttgatgaactgttttaaaataatttaaaatattctaggccgggcattgtggctcaaggctataatcccagcactttgtgaggctgaggagggagggttgcttaagcccagtagttcaagaccatcctaggcaacatagcaagactccatctctacaaaaataaaataattaaccaggcatggtggtgcatgcctgtagtcccagctactcaagaggctgaggtgggaggatcccttgagcccaggaggctgaggctgcagtgagccatgattgcacctctgcactccagtctgggtgacagaccaagaccctgcctcaaaataactagctaaataaattaattaaataaaatattctatggcacctcagcaaaggtatggttttgttagtcagaccaactggatagaccttaggaagcctgcagaggagtaaagtacaggggaggtgagttttgatcaggaggcagtgatattgatagtattgagtgtgggacttaaagtcctggtttgagagtctggacatcagcttgtagcagtggggagccattgtgtcctatactggagcaaggaagtgacttgataaaatacatttttggaagattaatgtgatggtgcatacttatgatggattaaagagaggagatgtcaagttagaagctactatcatccaggtagatagagggtccaagaaagagtctgcaagatgtaggttttggttgtaaaaagacataagatgactctaggtttcacatctgcatgataaaatgattggtcatactatttttttttttttttaagaaaagaggaagtcatacttccttgaggtaatgttaacacttgttttagtaacctggtaatcttctagagacaccagacctaataggagacttccagtgagcatattttggacagggggatttcctggcacttcctaaattcagggcatccacttccttctgtgtgtacattgagatctggctttcctccatacccaaaagtccccttaaaatttctacttctgaggtttattagtcctttcccatctttttatggaccttcatcacatctcagatgatgatttttatgtaagtagaattaactgccctgtccttaactgggctggattgatacttgacctttactaaaattcgtgaaaatatacacatatttctataaaatgtcatcagatatgtgtaagaaattctcattttttacacagcagtgaactcaattcattaattataaattgactaattgtcttagggaggaagtaggcacatttcttgccagtttaatgctgcttaaagtagaggtataacgaatatttgttagatacagctgtggtaagtcccacgggcagcaagaaaatatgaaagatttatagaaggaaaagatctgaggtgtagaaactgtgatctaggtgctgcagaaaggcttgcacacttttagatgagttggataggcacttctacctttgccatctggcaactgttgtgtaatgagatagccagaaagagcttctacctagtcaagggagttctagcaacttagaagataatactaacacttcttcatgtttcccctgaaattactttcatattctgttttttttcttttcttttcttttcttttcttttttacaaaccctgcatgtggcactcagtcatattctgtttgacctttacagtgacctgatacagcattccctttcacagatgaaaataagacagtttaggagtccgtttctctgtaagtagaacaagagacctggatggatgctttcttaaaactcttccagctcctaaaaggactgtggccccaggtcacacagcaggccaaggctaaggcttgatcaaacctcccaactcctactcagtgactcttctcatcatatcacataccctccggggagcctcggcttcctggagttggaaactcacagccaatggccgtgtgctctattacagctagcatttgttaagtacttactctgtgcaggcactacatgttaattcatatgttgattattatctgtgttaactcatttaatctcattacagtctgatagagtaagtactatttgtgtccttattgtagagaggaggaaacctagacacaaggtgatttaagtaacttgcccaatgtcaaatggctcttagtcatgaagctgggatatgcactcaggcagctgggcttctgagtccatgctaaacaccatactgtacctctttggagatagcgggtagaagaatttacattttatttgaagactgtctctctgaatctatccttctatccatctgtctccccatctgtcctgtactgcttgtgaggagccatctgtgtgccttgcattatgtcatgtgctgtggttgaaaggtgagtcatacctagtctttgccctccaaagatacacagtctctggggctgatgatgcacctctgttcagttcagaaagtgctggatgaaagactagacattggcagagctagatcaatacattagaatctgcaacagaacaaacaggccacatacatcagaagcacctgggatggtggggctcaggaatctgtatttttaacaagcacccttggtgattcttaggcaccttaaaatttgagaaatgcttcaaaggaccatttctaaggaggtagaaagcttggttttctgcccctgagaaatgcccagcctagttacagaggcaggcataagtatatgaaatactgagaacaggcatttttgaactattctggggatgcatgttccttggaagtcccctgagggctgctatggggtggggtgggcaaaagggaccagaggaagttaggagagcagggctctaggctttcaattttgagtcaactagagcaacttcttatccattggattggattgccactgaagatttaattctgagaaattccactgcttaaaagatgattaaaagtctttttaattaaagaaaatcttaaggaagtatgtaaggacttgtgtgagctagattaaacttaaaaactaggaagccccaagtagaaagggaagtcagtgtgtgactctggtttctaccaaggcaggctgggtactttatttaactgagcgagaaggaattcaggaggaggagaagatgggggaaccattaaatgcttttatttttcagattataattggagcataagcattaacttgtcttagaaaacatcattttaaatgacaacatagtattccattatcttggtgaacctaaatttacttaaatgctctttttagtagacgtttataatgtatcaatactttattatcccagtgctaccatgaccattgttgtatattacatatgtttttgcatgtttcctcaggcctcttatgattaattgctggagggtagctgagacgcaagaaggcatatgaattaacaaataaatgactcataggacaaagtaattagccttgaggcttttaaagggcaacaatggcagaatgtgacatgttagtgtcttaactcatccttgtaggtccatgctgccttagccaataggaggcacttcctagaagaagggtgggagtgaggcctctggacaggcaggtctgtgacacatgctgctccctgcactgcctattaacaggtccagcccaaccaataggcagggcccgacaaggctctgtgtagctccacctttcacaaaatgtattgagtcagatgtattatggactttcctttcacaaaatgctttgagtcagacgtgttatggaattaaaatttttttttacattttggaaaggtaatacaaagtatttcctctgcatattaagcaccccacttaattatggggagcaccctatgggtcaagcataggaacaagtatttacttcattcctatatatttaaagacaaggtctcagtctgatgcaatcatagcccactgtgtgtagtgagctagagtgcactggcacaattataactcactgtagcttcagattccttggttcaagcagttgcaagtagctgagactacaggcaggagccatcatggctggctaatctttaaactttttataaagacagggtcttgctatgttgcccaggctggtcttgaactcctggcctcaagccatcctcctgcctcagcctcccaaagtgctgggagtatagccatgagccactgtgtcctgccaagcacaggaatatttttgtggtgaaacgataatgaatatttgaagtgagtgagaaagactcaaatccttgtgttaattcaggtcaggtcaggatttgcagctaaacgattttgctaccaacttgcgaagactcttttggcttcagagattttttgatttaagaattgaggataagggatttggggcctgtattggtctgttttcacactgctataaagaactacctgaaactgggtaatttataaagaaaagaggtttaattgactcacagttccacatggctggggaggcctcgggaaacttacaatcatggcagaaggcgaaggagaagcaagcacttttttcacaaggcagcaggagagagagagaactgccacacacttttaaaccaacagatgtcatgagaactcactctctatcactagaatagcatggggaaaccatcccccatggtacaatcacctcccaccaggtccctctctcgacacatgggaattacaattcaagatgagatttgggtgaggacccagagccaaaccatatcagggtctgaatttattctgttaaatttgaacaggtagatctgacctagcaaaagaaagaattctcgctccttgatgctcaaggagtttgtctgctcatcctttcaagcttgtaaggaggttgcgagctcttcataaatttgcagatgataagtctaaatattactattttctgtactaaatattatacttttttttccagagtctcttccatctcccacactaacttgtgcattgactaatggaagcattgaagtccaatgcatgataccagagcattacaacagccatcgaggacttataatgtactcatgggattgtcctatggagcaatgtaaacgtaactcaaccagtatatattttaagatggaaaatgatcttccacaaaaaatacagtgtactcttagcaatccattatttaatacaacatcatcaatcattttgacaacctgtatcccaagcagcggtgagtaaataactaaatgtgtcatggaggctttcagaccacagatgtggtgactaacacaaggttcacaattttgaaatgtaaaacaagttacaattttttttttttttttttttttttttttgagacagagtctcgctctgtcgcccaggctggagtgcagtggcgcgatctcggctcactgcaagctccgcctcctgggttcacgccattctcctgcctcagcctcccgagtagctgggactacaggcgcccgccaccacgcccggctaattttttgtatttttagtagagacggggtttcaccgtgttagccaggatggtctcgatctcctgacctcgtgatccgcccgcctcggcctcccaaagtgctgggattacaggcgtgagccaccgcgcccggccaacaagttacaatttttaacagaaaccccattatagatacaaagctaacattatttagcactttctgtgttgagcaccattctaatacatatgttaattaattcaatcttcacatcaatcctcatacaacctataagttgtgtactagtacttatccctgtttcctggtgagaaaccaacagagagagagtttaagttgtttgctcaaggtaacagctagtaagtggcagaacctggctttgagtagaggctatctggctctagagcccatggttttaactattcacaatgctgctttataatattgttataatatcattatgttctgaaaggttacatatctactacaggaacatgcatttgatatgtttccttaggcctaacactaagttaatatcatgacaatctgtcttggctatgattttctaatgttgttttagtattatttacatttgtaatttttattatctgttttttacattatatccccagtttaacaaacaaaaaggtcagtgacttgaaagtggtttattaaaatataaaagagacgaaaatagtaaatactattattcagaataatataattgtaaatagtgaacaggattccagggcaaatagagaatatgagtctctagggctgggataaggtgagtctatgaatgaaatttttctgaacaagcagctgaaacagataagggaaattagcaaatacaagaaatatatgaaacttggattttaactggtgagccattctaagtctcccatttattgtcttttctgaaccctttcaaacaataacttaaagccattaaagttatattattttcagacaaagcagagtcacttttgggaaaggaaagacatttttcaagaaaaagtagacgtcctcgtcagggtgggcagcgccgccgcggcgggcctggggcttggggcctggagcggcccctcccagcacccggtgcgcccctgccctgccgcccactgccctgaaggtcaagtcgctttgttctgcgctgcgggcggcttcctcgccggcggcccagcggaggaggcgtagagggcggcgagtgggggctggcagctcaaatctcccgctagcccagccagccccgcgtacccggagggccgcggcgcacccggaggagcattcaggcttcccgtttttaaggtggagacgtccaggacctctttattagatgtttaggaatttgagtttttccgtagggcgatggtcatcgtgagcatctgtggggtcaggctgggctaactggggttttgattgtaagtttcgtgtggacgagggcatgtctgatggggaagaaagtccttggcattgcatctcagctgttgggagctgtgcggtgcgagccagatgggcggcgtgtgctccccgaggactggcctgagtgccttagcctagttactcacgggacttggtttaccagacaaggggataaaaacattcagatggcagataacagtttttcagatggggttccttcagatttcgtggaagctgctaaaaatgcaagtaagacggaaaagctcacggatcaggtgatgcagaatcctggagttttggcagctttacaggagcgacttgacaatgcccctcacaccccttccagctacatcgaaactttacctaaagcagtaaaaagaagaattaatgcattgaaacaaattcaggtgagatgcgctcatatagaagccaagttctatgaagaagttcatgacttggaaagaaaatatgcagcattataccagcctctctttgacgagagaagagaatttatcaccggtgatgttgaaccaacatctgatatggaatcagaatggcaccgtgaaaatgaagaggaggagaaattggctggagacaggaaaaataaagtagtcataacagaaaaagcagcagcaacagctgaagagccaaatcccaaaggaattccagagttctggtttaccatctttagaaatgtagatatgctaagtgaattagtccaggaatatgatgaaccaatcttgaaatacctgcaggatattaaagtgaagttttctgaccctggacagcctatgtctttcatattaagagttccactttcaacccaatgactgctttgccaactcagtcctgacaaaaacctgcaagatgaaatcagaaccagataaggctgatcccttttcatttgcaggtcctgagatcatggactgcgatgggtgtactattgactggaagaaaggaaagaatgttactgtcaaaaccatcaagaaaaagcagaagcgtaagggtccaggcactgttagaacaattaccaaacaagtatccaatgagtcatttttcaacttcttcaatccactgaaagcatctggggacggagaatcactggataaagattctgaattcgtattagcctctgattttgaaattggacactttttccgtgagcggaccacaggctgtgctgtacttcgctggggaggccttaaaggatgatgacaattttgacgaaggtgaagaagaagaggacgaattagaaggtgatgaggagggagaagatgaggatgaggtggaaattaatcccaacaaggaacccagccagccggcggaatgcaagcagcagtaggaagtggaggtgggcgcctggcagaccggctgtcgcgactccgggcctgtagcgggaggcctcagtctttgccgcatgcggcacaatcccgtcgacagcgcttactccatctaatcgttttcaagtgcatgattttcactttcacttttcctttttccttattattttgcttaatgtgtacagtggcaactgaaatgcatttcagaaataggaggttttgtccaataccctctgcagccttggtgcctgtagctctggacttgcctggacccttccctgcgggagggccccatagaccccattggggtggggtgggatggggtggggatcacttggctaaaagggccgaggtctggtgatgaggttccagggatctagaacctctcctaccactcctgcagttggactgaattctttcctttcatttgaagaaacccactcgctgttttcagctgcttaatctgctgagtgtgcagcctgcatcacctgctgtatgctaatcatctcagaagggccgtgtagagtagggccgtattctccttaggatgttgctttttgatcttcttttttaagggttgggtcagggttgtggcacaccagctcaggcgagagctgccacgggtcacctcatatttatttatcccttcttgcctgtgaggactgcggccttttgctgtcgctcgtccttgccatttctgaaccaccctggtgacctgagcaggaagatgtgccacttcctagcaggagcaagggctgtgcggaagaaacactgcttcctgccaccagggctgaagacgcgagcctgtcctcgtgacacaggcaccgccctgctgccggagttgggattcggcagtgttctccagtgaggggctgggctgggaagtcctgcgtttcatttgagcatatgagcgtcaagtcctgctttctcagtagtcccattgctgggccccaccattcatcctgtctgaaggtcctggttggtgtgaccggttggtggctggtgagtggggtttccaagtgggtgacagcgctctgtggcagccggggatggccttgtccgcgctgaccaggcctgtagagagtgctcagcctaaccttagaacacatttataactgaatacagtgttttcaatttgtacataatagttagaatattctattaaagttatgaaacacggagaaaaaaaagaaaaagtgcaaatgagtcccaatttataactgatagatttgatttttgaagacagagaaaagatcaaacccacagaggtgtcactcaaaggagcactgtttgtacaagtcacacaattgcaagaagtttttaaaacgagctgcaaagttaaaatagttaagcttggagcaaacattcctttattaattccaccttttgagtgttacataatacccaaggcatacgatatggaaatgcaatttgttgtaaaagcagatagttgctttataatgggaacaacaaaaaataaaaccagtgtgcttttgccttttggtatatgtgtgctgcatctaactgacaagggggaagaagatgaccacatatagacagagcaagcaagttgaaatcttgaaaagttttaagtgttccaagagacaaaatacttgaaggaaataatttctgagtaagatccctctatagaattacatggaatattttaggggatttttaaaggttttgcccttgcaaaactttatgtttaactttatgtttgccattagaatttgaagacacaaagtaaaattactcttactgaaagtaagattactttccctgtaaatagtctggtaaaagatcataagaggaatgatattcctcttattgatttgaaataagtactattaatttgaaaaaattcttttaattattaaataatggtgatttatccttcttttacattttcttccaaattgatagttcacatatatacaacagattttgaaagtttgaggaatgttgcttgataggtcttaggtttaaatcctggagtagtgttgacatctgagacatatgtctgggcttctgaccctggtttctgttaaccaaatattggaggaccttctccttttaaaatgcaaaccaggagctgaacttaatgatcttaatggttcttttgaacagtaacagtctaggatctttttttttctgagatgatttttgaatgcttttgtgtggaaccacatgcatcataatagatacaaatccatgaaagtataacagttaaatactagatcttactttttcaggttttgatttctcatctaaactttccaatgctttatcagtgaagcaaactaactcacattgactagcctgctctcctttagcaaacccttcaaataaatgcctcatttgctcctcaccactatcattttagattggccagacagttgttacttaccttttaagaatgaggagacaggtagccgggtgcggtggctcacacctgtaatcccaacactttgggaggctgaggcgggtggatcacgaggtcaggagatcaagaccatcctggctaacacggtgaaaccccgtctgtactaaaaatacaaaaaattagtcaggtgtgttggtgggcacctgtagtcccagctacttgggaggctgaggcaggagaatggcatgaacccgggaggcggagctggcagtgagctgagaccacaccactgcactccagcctgggtgacagagtgagattccgtctcaaaaaaaaaaaaaagaatgaggagacagggtcaaccaggtggggtgacttgcccagggtcacttaagtattggagatagaattaaaatttaggtctttgaattccagagtgtttttgtatgataccatcctgactctctatacgtttcaaaataaatcaaattttaaagttttctttgatttattcatatgaatgagctagagaaacccatactatatagatatacatagtagatattggtcaaatgtaacttaattttttacctcattatctcatgtttcttgtaacattttgtctagtaggacctttttgtggtttgtcatcattttagtcatgacatctactgtcataccgtcactgcaacccagaaatggggcgatggggttactaactagttaaacacaatctaaaggagaattttagagacagttaagattgaggacagagttcttgtccaactcgtattgtactgggggaatgaactaatacttactgaaggcctgctccacaacaaactcctgtaaatgatttacataaatgtgtcacatttaatccacacaacaacccagtggtgtgggtatttataaaggaggaatctgaggcacagtgaggttaaataacttgaccaaatatacacatttattaagagcaaagccaggatttgacatccaactccatctgaactcaaagcactgtgtcttccccactgtactgggaagtaaaagtaagaagatgactcagagatggagaattataatctggaatttggaatttacttccattggttaaccgtttgaaaattgcagctccaaggcattgggagatggaaagaaagctagtgagcaattatttcttgcctttgtgtcatgctcctacattttgctcctccttatctccttatctgcggtcagagtagatagcatggaggttttatgcccatgctacagatgttcagagatctcaaggtcagaaagctggtttatggcagcacgtgaatatagacagacttatacagattagaaaattgagaagttgagggcaggagaaaattctggatagaagagaacatgggattgggagcaagaaaacctaggtcctagacctgatttcattgcttactggcagtgtgaatgtgggggataataatacttactttacaagggctgaggaaattaaataaaatagcatgtgggaaagagtattgatggttagtcactataaaactgctagttgttattcaggatacaggaagagtttcaagagaggacatttggtataacattatatacagccaatggtttaaggaggacaatgtagaagaggttgtggatttggcacttaggaggtcattgttgacagaccttgtgaatagatgagggtaggaaccagattcctgggctttaagtaagaagaggggtagtccaataggccagttatatatttggctgtgaaagaggaaaataaaatctgagtacctttgagagtcaaaggctatttccaggtaaagaaacccagtgcacttcaccattctcttttagataactgctgggaagaagtaggatgattgtaacaccctccacattgacacagaactctaaatgggagcctagggaaagggcacattttttgaaggggtaggcaagaggatattctctagagtaccagtttccaactgttgtacacatttatggaccaagaacataaaagaaacattgttcagttccgacctgaagttatgtagaacaaacattgttctgagttcaactagatgatctttctttcatagctgtgtggacattatgttacctgcagggagtaagtcactgaaggtagagcctcaaaaaaacaccctttgatcttactcctaagaaaaaagagagaaattggaaaaattcatcatagaaacacaaaaatatgcggaaataggaaaaaggagaagaaggaaagaaatgcaacataggaaataatattatgtagactgagataaagaatgttaagaatatttgaacaaagtttgaaccagatgaaatgtaacaggcagaaacagaagtaggaggatttttggactgatttaagttggtctcttgtgacttttatgactttccactgggaagaatagtgattaagaatgttcactctgcttttaaaaattgagaaagaacgctgcgtgcagtggcttatgcctataatcccaacactttgtgaggccaagacgggaggattgcttgaggctgagagttcgagaccagcctgggcaacatagggagaccctatctctactaaaaattaaaaagttactgaggtgttgtggcatgtgtctgtagtcctagctacttgggagactgaggtgggaggatcacttcagcctggcagtttaaataaatcagatcagtaattaataatcttccaaaacagaaagcaccaggttcagatgggttcattggtgaattctaccagatatttaaggaagaaatactaattctctataatctcttttagaagatagaagcagagggcatactttccaattcattttatgaggccagcattattcttgtgctaaaaccaaagaacaatacaagaaaagaaaattaagacaaatatttctcatgaacatacatgtagaaaccttaaacaaaatattagcaaattggatccaacagcatatagaaagaattatacatcatgactaagtggtatttatctcaggtgtgcaaggcaggttcaacatatgaaaatcaattaatgtaatccatcacattgacagactatgaaagaaaaatcacatgatcataccaatagatacagaaaaagcatttgacaaaatccaacatcaatttatgataaaaactctcagtaaactaggaatagaggggaaactttttcaacttgttaacaaatgcctacaaaaaaccctgcagctaacatcatctgtaatggtgagaaacttgaagctttccaactaagaccaagaataaggaaataatgttcttctcaccactccttttcagtattgtactataagcactaactaatgccataagacaagaaaaggaaataaaagttatacagatgagaagaaagaaagaaaattgttttagttctcagatgacatgaatatctatgtatacaatccaaacgaattgaccaaaaacctcctggaactaataaaaaactatagcacatttgtaggatacaaagttaatatacaaaagtcaatcacttttctataacagcaatgaacaagtggaatttgaagtttaaaacacaacaccatttaccttagcaccccaaaaatgcaatacttaggtacaataacaaaatatgtcccagatttatatgagaaaatcaacaaaactgatgaacaaaatcaaagaagaactaaataaatggagagatattctatgttcatagataggaagactccttattgtgaagatgtcagttatttccaatttactctataaattcagtgcaatcccaagcaaaatatcagaagtcatttgtggatatcagcaaactgattttaaggttaaatgggcaggcaaaagaccagaatagccagcaaaatattgaaggagaacaaaattgtaggactgatactactcaacttcaagacttactataaagctacagtagtcaacatagtgtggtactggtggaaaaataaaagacaaatagatcagtgaatcggaatagagagcccagaaataaaccaacataaatatggtcaactgatctttgacaaaggagcaaaggcaatacaatggagcaaagatgatcttttcaacaaatagtgctgtaacaactggacatccacatgcaaaaaaatgaatctaaacacagaccttatgcccttcacaaaattttactcaaaatggaccatagatctaaatgtaaaatgcaaaaccataagactcctaaaacataagagaaaacctagataactttggatatgatgactttttagatacaacaccaaagacatgattcatgaaagaaagaattggtaagctgtacttcattaaaattaaaaacattgctctatgaaagacaatttcaagagaatgagaagccaagccacagactgggagaaaatatttgcaaaagacacatctgataaaagactgttatccaaaatatacaaaaaacttttaaaactcaacaagaaaaacacaaacaacccaattaaaaaatgagtcaaagatctcatcacacacttctccaaggaaggtatacagatggcaaatagggatataaaaagatactcctgggccgggtgcggtggctcacacctgtaatcccagcactttgggaggccgaggcaggcggatcacctgaggtcaggagttcaagaccagcctggccaacatggggaaaccccatttctactattttctattttgtaaaaatacaaaaattagctaggcatgtcctatgtcaacaggcaacagggaaatggaaactaagacaacaatgaaataccacttcacgcctatcacactggccaaaatctagaacactgacagcaccaaatgccagtgaggatgtggagcaactctcattcattgcaggtgggaatgcaaaatggtacagccactttggaagacagtttggcagtttcttacaaaactgtatgtactcttaccattcaacacaactgtcatgcttcttgctatttacccgaaggcattaaaaacttatgttgacataaaaaccttcacatggatggttatagcatctttattaataattgtcaaaacttggaagcaaccaagatgtccttcagtaagtgaatggacaaataaactgtggtacatacagacaatagaatattattcagcactgaaaagaactatcaagccatgaaaagacatggaggaaacttaaatgcatattataagtcaaagaatccaatctgaacaggctacatgctatgcaaattttacctatgtgacattctggaaaaggcaaaactgtggagactgtaaaaagattagtagttggcaggggatatgaataggtggaacacagaggagtttgggggcagtgaaaatactctgtatgatactgtaacgatgttattatacatttgtccaaacccacagaatgtacaactgaatgctaatgtaaagtgtggattttttaatgataatgatgtatcagaatggtttcattaattctaaaaaatgtaccactctggtgagggatattgataatggggaggctatgcatgtgtaggggcaggatgtatgtacaaactttctgtaacttctgctcagttttgttgtgaacctgaaactcaaaatatttaaagccaagtgaagctaacttactaagccatgaatcaagtttgtggaataaccccaaatagaggaaccattccaagtgttttcaaaacatagtaatttgggtgcatatttcaaggggctgcattctaaggataaaaagaactataaagaaaaaaattgtaatgttttaagtaattatgtagttagcagtaatgctggtatttggttactgttgagtatgtattgcaggaaaatgcaaatgaatatttatattgttgttattgaatattgggatgtttggcatgaaagaaaggagattcagctgtaaattgattaggttaagtaaacattgtagccctggatttatttaaaggtattaatttgaaccatatgaaattgctgtttctctagtcaaaaaccattgaatcttggcagcttaatagggttcagcataatgccagcatgacccattaatgtattttgtctcttagaaaattgtgtatttcctggttctgtccattgaaatgttctagaaacaagagccagtcctgtagcaatttgcatgcttcttggttcttggacccagatttgagtgaccagtgttacctggtgtgcccagacttcccagtttcagcacccgaatttcatatcccaggaaactcttcagtttcaggaaaaccaggatgattggccaccttcacccagattatggtacctaattatcatttcccatgaaaatgaactagggcctttgggacagttggctgattccatacctggggcatggaatgcattaaaataagccttgagtatcttattttaccacagaacaagaaagctatcaaaaagacttaacatgatggtacgaacaggactcaggagccactctgaagaggttccctctggccaaaaataagacaattggaacatcaataagaataacaacttcagtagattgaaacacatcagttgtgctcagttcatgcgttcataatgtactaaaaacaaatttaaaaactcactggtcatctctagagaatgcttgggagctaactcattattttgaaaaacgataaagaaagagaagaatcaaatgctgcttttcctatataaattgaacctcagagtaaccacattgttgatgaggggcagtttatctttatgtgaagattgtagttagtaaagaaggaatgatagactaaaccactttgcaaacccttgatgaacttatggctctagacaatgatcttcagtggcactgacatcatgaaaagaaaagcaaccaggcatcgtatgccacctaagggaagtatacaaacactacttggggagtattattgccaaggaatatctgaattttgctactaaagaagggaaaatgatgttcgggggcacctagcagtttctggccagggtcttctcaaatctgaccaataggtgactgcctatttgctccaacacacctgtgttcctaataaaaggaaagtgtgatcatatccttattctcatttattcattcattttctctctctcttcctcctctcccttcctttcccttcctttcccatatccatgtcacatttgttcttagtgacccctccccaatcctttagcagtgcattgtgtactctgattttggattttcaatagctggatagagtttaccttgtgaacataccacagttttttgtgaaaacaaggagctgctgtgaaaacaacttaggttgtttttgccttatggtatattaagtaaggctgcagtaaatatctttgtgcctttttgcggggagtagaagggcacatcattgatattttccccaggataacatcttagaaatggaattgcagagtcacaagatattaatagagataccaataacatctactcaataggttaatgacagtatataacagctgttcttaaatgcaactaccctatgagataagtatatttattagtctcgagtatagttaccctgtgagaaaatggaggcactgagaggttaaggcacttgcccaacattgtaatgacttagtgagactataggcacatgacttagtgcaatgtctagatgcttcatgataaatatttttaaggcttattatatacaactgccagaattgccctaccaaacacaatgccaagttctgcttccactggcagtatgagatggtcagaaacaaaccttctagtggaacacttgcttcttttattaaataacacagggtctggaatgtatcaagcttgtgcatataagtttgtttagaaatagtcgaatcttgttattcatattagttctacagagtcaagttaacagtgaaatagcaagtagtgaagtaatgttcctgggggaaatacaggggtaggttcctgtgagcctctagtcataagatttttgttaatgatctgtttataaccttgttttatgtgtgtctctgtttaaataaaccttaatatatagtgttgatttattgaccttgaactcatagccaacagcactgtaactcatgcctaagtgaagcttatctaatacacctattttctctgcaaggcacatcgcagccttcttgcacttaggaactcttgtcagcccttcaacactatactttgggaccacttaaaatagtgaaatcaccaacaaaaaagcacaaaaatgcaaaatcatggcactaaatagactgcaaataggacacttgttaacagtgtaagaacttgaaacaagaaggcagagctttacctttttccacctctgctgggaatctgcttattgggtgactcaaagttttcatcactgttcttatgtctgagaatgactgctttgggtattgatttgtggattacaaataaatttcagtaaataagcaaaccgcaaggtggaatctgcaaataatgaggatccattttgatcagttcaactagttgaatttcttttcttttcttttttataggtcattcaagacacagatatgcacttatacccataccattagcagtaattacaacatgtattgtgctgtatatgaatggtatgtatgctttttaaaacaaaatagtttgaaaacttgcattgttttccaaaggtcagaaaatagtttaaggatgaaaataaagtttgaaattttagacatttgaaaagaaacaaaaa

SEQ ID NO: 15510 - DNA, 56493 bp, Homo sapiens
gaacttagggctgcttgtggctgggcactcgcgcagaggccggcccgacgagccatggttgctgggagcgacgcggggcgggccctgggggtcctcagcgtggtctgcctgctgcactgctttggtgagtgaagcctgccccaggggccccgcgccggccggcgggtactgggcagcacccaggctgggtggacgcgccgggctcgaggcggttgccgatcagagacgggtggggacgggtcgctgtgggccgggaacaactcagccgtgggagccttttcaggaagagaaagttgttatttcatcgccagtgtccctcatggagtcagcaaggaactgtgtggccttagggaaggacgggctccggcccgctagcctctcctgcggggcctgcgcccccccgccggccccctcccgagctccagtgaccaagttccttcctgggcttccccagtaacgtcgctgagcgcttcagcggactgcaaaatttttcccagccgtgaacgcgcccgggacggggagcgggcgcggatgccacctgctcgagggcgacgcctgctgccctccccgcgcggtgccgtccccgcccgcgcggcgtccgccgtatcagcagagaggacttttcagaatcgccccacagcgaggagcgggtaggcaactaggaagcccagtcggcagcggcctcacgttgggattcctaagtggtgcgactcctgctcctttttcctcccctcaaatcctaaaaactagtatcagaactggttccatcctctccgtgtgttgtcagccaagtcgtcacaacaacctcaggaaataggtccccttcttcccattttgcctccccatcctccttcaccctccacacattggccccagtcaggccatagcaaaaccccgggagtacagcagtaacctcccagcgagttcaactgtacttgaggggttctcatggctggctcctgcaccccactgccagccctccagcccgtccgtccgtttgctcagcgtccgctgcctgcccgggaggtgcgcgtgtgcatctatggaagacagccaagggggaggggttgagatagactcaaaagtacccgcacgatcagataagtcagtgttgtaagaggcctgggctgggcgtggtggcttacacctgtcatcctagcactttgggaggctgaggcaggtggatcacttgaggccaggaatcggagaccagcagggccaacacggtgaaagatcggctctacaaaaaatacaaaaattagctgagcgtggtggcgcatacctatagtcccagctactcggaaggctgaggtgggagaatcacctgagtcccggaggcagaggatgcagtgagctgtgattgtgccactgaactccagcctgggtgacagaatatgacctgtctcaaaaaaaaaaaaaaaaaaaaaaggtgagctgtgagggtacagagggaagaagaaggcagtctcttttgtgaaatcaagtgtcttttgtgaagcagtcttcatgggagggaggatatttgagcccagccttcaaggactggtgatgtgtggacatgtgataatgtgggaaaagattgctgagtgtccccttagggagtctggattctctgagctgagagagcttctcctgggccttacaggatcaggaccatgcgcctgggaagaagaatctgttagcaacaaagaggaaggctgcagtcaggaggaattggaggcagggaggccagaaggccagggtggactaccatcacagggcccaaatagctctggggagttcatgtgcgggtggctggggaaaagaagagatacaaacagggattaattgaatggatggggtaactctcctccaggcaagctggtccctcattccctggcaccttgggtcactgctgcctgtacctgtgttctcccttccactgcaaacccagtttgcccaagctccacctccaacagattatttgaactgtcccttcctggtgatctctctcacctaattcatgtattcattcagaagtcatttgattcagcaaacatgtatttataaactgctctgcataggccttaaactaaagacaagactgaatgggtatatccccttttggggacccaagcctgcctcattagggaagctgcaaatgcagtgattaacagcatcagctctggggtcagatgcctagctttggatcctggccccactcctcacctgagtcatgaacttgtgtgagttccctaacttctcttcacttcagtaccttcacttttgaagagagtaccactcacatgagggaaaggagaataataaacccacttcatagaattactgggaacatcagtcatgcaataaatatttactgagtgtcaattatatgttaagcactgcacaatggacgggggatacagcaagctatgcacagttccctgcctttgtgaagctcaccttatagtgagggagagagacagtaagtaaatgagtaaaaacatggatgctggatggtgataaagtaaacatttactagtacagagatgagtaaagcaaagaaaggggtgatggaagtcgttaatacttcagtttagggttttttttgaaattttagaacaattaaaatctttaggacagttgcaaaattagtacagtgaacatttgcgtactttctccttgaatcaccagttaactgtcacattagttttctttgttatttttgccatctgttatttttgccaaaccatttgagagtttcagatctcatgacacctcacctgtaattctttatcatatgtctcataagaacaagagcattctccaacaagtcacagaatcatcataatctggaaatgtggcattgatacaatactgtttcctggtagagaacccagaagccagtcctgcaccacatacttcatttgataatcatgcctttttaaccccctttaacctaaaactgttgcttttttttttttttttttttggtactttaagacatcatcatttttgaagtgtctgggctagttgctttaccgaatgtccctttggatgtggattgcctgcttgtttcctcatgatcagattctggttgtaactctttgtagcaggaatacttcatagctatgttgggtccttctcagtgtgtcacatcaggaagatgtggtctgtttgtcacattattggagatgttaactttgacatttggttaaagtgaagtttaccagatttctccattgtagaggcaccattttacctttgtaagtaataaatgatgtgttaagtgatgttttgaggttgagtgaatatcctgttctccagccattgttcattcagtggttttagtatcctatggtgattcttcccagaatccattatcactaaaatattttattttattttttgagacagggtctcactgtgtcacccaggctggagtacaggggtgctatcacagctaactccagcctcgacctctgaggctcaagcaattctgccacctcagccttctgagtagccaggactacaggtgcatgccaccatgcttggctaatttttttttagtttttgtagaaacagggtttccctatgttgcccagactggtcttaaactcctgggctcaagtgatcctccctccttggcctaccgaagtgttgggattacaggcatgaaccaccacatccagccactaaaatattttcaaatggtaattttcttcccccacccttgtccctttcttctccctccctcccttccttccatccttcctctctcccctcccctccctccctcccctcccctccctttccctcccctccccctcccttcctgtcccttcccttcccttcccttcccttcccttctttccttctttgtttcattgccttttctcttttcttttgagacacagtctcactctgttgcccaggctagagtatagtgacacaattatggctcactgcagccttgatctcccagactcaagcgatcctcccacctcagtttccaaatagctgggactacagggacatgccttcacgtccacctaatttttttgtattttttatagagacggggttttgccatgttgcccaggctggtcttgaactcctgggctcaagcaatcctcccaagtcagtttcccaaagtgtcgggattataggcatgagccacccagcaattttctcttctgtttctctctatatatatatttattagtttacattgttcagtaatggatagcttttgcacacacatcctccctttttttcttttattttagaaggttatgtggactcatggattcttttttaaatatggcattcctgtcatccattttgatgctcggcaaccccacatttgacaagtgggaacaccttcaagcttcagagtccttttgctctgtttgttcctgtttgattttaaacacttccttactttctggcacagaaagatgttctggactcatcttgtagtgttcctgcctcagccttcgaatcattaggttccctggtttcttttagtgagagatggtatttagaaatcaagttctgggtgcaaagtgtgcccacaggtaccagagtcattgcttctcagccttgtcagttttcaaagttaagaaatagagtttttacaaagtcaggagttcaccctgatacttctaacactaataatcttgctgcttagttcttctgcctcttctgctcttccatatttgcatctccttactcccacagtgagaactctgttcttagtagcatcagtatattttcctaatctacattaaaccccaaatcattttacagttgctataccaatctactaccaactacaaacttactaaatacagttaaagatttctttacagttccttttatttttcattacagtctccaacttagcaatggttcgacttaagatttttcaactctacaatgagtttttcaagatataactccataataagaaatatctgtatatcccagtgaatatgcaatactatattcaaaagttacttggattctggccgggtgcagtgactcatgactgtaatcccagcactttgggaggccaaggcgggcggatcacaaggtcaggagattgagaccatcctggctaacgcagtgaaaccctgtctctactaaaacaaaaaattagctgggcatggtggcacacgcctgtaattccagctacctaggaggctgaggcaggagaatggcctgaaccaggaggcagagactgcagtgagccaagattacaacactgcactccagcctgggtgacggagtgagactctgtctcaaaaaaaaaaaacaaaaaaacaaaacaaaacaaaaaaaagttatttggattcttttttttttttctaactacccttcttaaacaaggtaacactctatgtatttttttgtatctcatttttgtcacttaaccatacatctggaaaatcattccctatcacttcatagagatccacctcattctttttcacagctgtacagtccctcatagggtggctatatggtagttcattcagctaccctctgctggttagtattacatagtgtggtcagggagggtctctttaatagggtgacaattgatcatacacttaaggaagtgagagataggccacaaggctatctgggggagtgatattccaggtctactactcaggaccctgagataggcttcaagcgtttaagaaacttcaaggataccattgtggtggagagtggtagaaaatgaagttataaaagtagtcagggttggatcctgtagataaagtttttagggccttttaaatattttggcctttttgctttcagtgactggaaagttttgaaggattttgaacaggagtgaaattatgatgacttggatgtttaaaagaattattctggctgctggatgaatagtctgtagaggagagaaaaggaagagcagggaggttggttaggctgcaggggcaatgcaggaaaggaatcactgggggtgggagatatctggatgtgttttgaaggtggagctggcaggatttggtgtgggcttgcattagtggaatgacatgtggatagggcctggatagtgctgggcaagtagcaagaactcaaaagtatgaacttggctgagagtggtggtgcatgcctgtaatcctagcactgagaggctgaggtgggcagatcttttgagcccaggagttcgagaccatcctaagcaacatgctgaaaccccatgatatggtttggctctgtgttcccacccaaatcttacgttgaattgtaataatccccatatgtcaagggcagggctaggtggagataattgaatcataagggcagtttcccccatactgttctcagatagtgaataagtctcacaatatttgatgattttataaatggggattcccctgcacaagctctctcttgcctactgccatgtaagatgtgccttacttctcctttgcattctgccatgattgtggggcctccctggccaggtggaactgtgagttcattgaacttctttcctttataaattacccagtcttgggtatgtctttattagcagcatgagaatggactaatatagtaaattggtactgggtagtggggcactgctgcaaagatacctgaaaatgtggaagcaactttggaactgggtaacaggcagggattggaatagtttggaagactcagaagaagacaggaagatgtgggaaagtttggaacttcctagagacttgttgaatggctttgaccaaatgctgctcatctcagatggagatgaggaacaattgttgggaactggaataaaggtgactcttaatatgttttagcaaagagactggcagcattttgcctgtgccctaaagatacgtggaactttgaacttgagagaaattatttagggcatctggtggaagaaatttctaagcagcaaagcattcaagaggtggcttggttgctgttaaaagcattcagttttatatgttcacaaagatgtggtttggaattggaacttatgtttaaaaggatagcagggcataaaagttcaaaaaatttgcagcccaatgatgcaatagaaaagaaaaaccccttttctgaggaaaaattcaagccagctgcagaaatttgcattaagtaatgaggagccaaatgttaatcacgaagacaatggggaaaatgtctccagggcatatcagaaaccttcatggcagcccctcctatcacaggcctggaggccttggagggaaaaattgtttcatgggctggacccagggcccccctgctctttgcagcctccaaacatggagccctgcatgccagctgttttagctccagccatggctaaaaggggccaacataccactcaggctgttgcttcagagggtaagccttggtggcttacatgtggtgttgggcctgtggatgcacagaagtcaagaattgaggtttgagaacctctgcctagatttcagaggatgtatggaaatgcctggatgtccaggcagaagtttgctgcaggagtgggaccctcatggagaacctctgctagggcagtgtggaagggaaatgtggagttggagcccccacacagagtccccactggggcaccgcctagtggagctgtgagaagagggccatcatccaccagaccccggaatggtagatccaccgagagcttgcaccgtgtacctggaaaagccacagacacttaatgccagctcatgaaagcagccaggaggatggctgtaccctgcaaagccacaggggaagagctgcccaaggttgtgggagcccatctcttgcgtcacctggatgtgaggcatggagtcaaaggagatcattttggaactttaaggtttaagactgccctattggatttaggacttgcatggggcctgtagcccttttgttttggacaatttctcccatttggaatggatatatttactcagcacctgtacccccattgtatctaggaagtaactaacttgcctttgattttacaggctcataggtggaaggtacttgccttatctccgatgagactttggatttagacttttggattaatgctggaataagttaagattttgagggactgttggaagggcattattgtgttttgaaatgtgaggacatgagatttgggaggggccggggtggaatgatatggtttggctgtgtccccacccaaatctcaccttgaattgtaataatccccgtgtgtcaagggcagggccaggtggagataattgaatcatgagggcagtttcctctatactgttcttgtgatagtgaataagtctcacaagatctgatggtttcataaaggggagttcccctgcacacgctctctcttgcctgccaccattaagacatgactttgcttctcctttgccttctgccatgattgtgaggtttccctggccatgtggaactgtgagtccattgagcctctttccttgataaattacccagtctcatgtatgtcattattagcagtgcgagaatggactaatacaccccatctctacaaaaagttagccaggtgtggtggtgcacgcctgtagtcccagctactcaggaggctgagatgagcctggcaattgcttgagtctgggaatttgaggctgcagtgagccatgatgacacaactgcattccagcctgggtaacagagcaaaaaaataaaaaataaaaaggtaggaactattttattattaacagagtctgtcttattctgctgttgttgacattttacagatcctttattgccaactatctgcataactagattttaagttccttgtatgcagaagtcatgtattattttttaaaattttccttatattgatctgtttttttttaatagtaaagattgttgaatctgaacattagatgacaatgtatttgtccagcatttctccatttgaaattatctcacattattatgtgagacttgttcatgtgctttgctggagttgagacttagacagtctgtgtttttttatttagcaaagataatccaagttaaaatagtgttgtgtgttcctataggaaaactaggcccagtgttataacagagtgtaagtaataatagccactaggaggtaagtacctgctctgtgccaggagctatgcttcagatttgagatgtttttatttaattgtcacactgattttattacatagggaacatttaataggagaacaaagcttaggtaggttcagtaatgtgtccaagttcacacagcaaataagtggcagagtgaacttgaactttgattctctctgaatcagaacctattcctttatatgctctgttgtatccctagcctgagatccactaagcaactttttgaagatgagtactactgatttcttatatccaacatgtatacattgtccaatgaaattctgctaaaacatgggaaatataggtcagcacaattaccagtcatgcaaaattgtatttaatatcataatttgtaatggtgaggggtgcttctttgggacatagaatttacaatggcaatttattgacatatttattattaacattattatatttacattctctaggtacccacatttcactcctagacacttttgcataatctcaataacatcataacatctataaatattaacactaatcctgtaacatcacctaacttttacccgtattcagatttccccacttgtcacaagagtgtcttttgttaaaaaacccggatctaatcaagtttcactcattgtattcgttgctatgtttttttgttttaattttgatgggcatctttcagaagttttaaaatagtcttagaacctctttttaagaaccagatttgaataatttattttattgacctccttgtcactctaacatttctttagtaaatacaggctttgagggtaggtattggtttctctgtttaaaagtagaaactttgcataaatcagcccttatatgtgtaagttttctgccttttggtttcttctcatgctgtttctgcacaagtgcctaagcttttttgaagctttacttgaggggtgaccagaaggttttacttaaggacacagacccttaaattctgcaatgacaaatctcaacttccatctcagggttgtaagtgaaaccaggatgcagccgtttctcttttctcagataagttcaggtttgaatataaagtgtgactataagatacagagactgtccctagaaaaggaggggaaaacattttagcagttcctctttggagataactttcagtgcctgcccatcagcctccaaggaaaatgctttttggttactttataggttctagtgaactttgcttactttacaatgttccccaaaatgtctgttgagattagtgcctgaatttccactgggctgaccagtctgtagtttcttgaacattttcttcctatgccagttaaaaattagaagaaaattgaagtttaacatacacattcagaaaaaaataaaaaatcagattaataagaaactaatgaggctgtgccattgtaaactacttgcaatagagtttcccaacgatgaactgagtatctagaaaataacaaggattctcaaggaattttagtgaaatgatcagtactgtattgaaataccttgaatcagactttggagaatagatttaaaaacactcacagccttaaccgatctagtaagaaccttattccctaaagcatactgtggatctcagctgtatcctatctaaggtgagaacagtcaaagacaaatgtggcctttgagaaaggtgggatgtgagtgtcttgaaacaacaggctaaagaagtgctctcaaatagaagtataatatggaacatgtgaaattaattttaataatatattttagttaacctaatatatccataatattttcatttcgacatgtattaggttggtgcaaaagttattgtggtttttgctatttttttttaatggcaaaaaccggcaattacttttgcactaacctagtagttactacaaaaaaatattaacaagagattttatgttccactttttaataccaggtcttcagattctggtgtgtatttgatactcagaacacatctccatttgaactaaccatatttcaggttctcactagccacttgtagctggtagctactttgatggattgcataggtctaaagggaaacatcttgagaaagaagaaataggttaagtgcaagaacaagaattaaaaaggaaactattttagcatcatattagaaggaaagtacagaaagaagttgatttagagaaccaacatcttaattcttgatgaacttatcgaggaggcagattgacagctgagagcaaggtccgggaaccttgctctggccttggggaccgagggtttgtaaccgttgggagacaggtggctgcagtttcagtatgaagtagatgagggcagggaaactggtggtggtgtggctgaaatcagtaaatctctgtcttaaggaaataagagaagtcactaactgggaccggctaagggtggaatcgatcaggaaaaaagaggaatggccccaaccaaggcatctgatgttctggccaacagtgcaggctctggggccgactgcctgtgtctggacaccagctctgccccttgctagctgagtgaatgcagtcagctgaccctctcagtccatttcttcatctgtagcctggtgcttcggaatctttgaccttctctatcaaccaagtgtccagcggagcaaaccaccttactttgataggcgtgttctcaagaaataactcctttctcactctcaccccagatgttcttaggctcgctcccctgcttttctggactctgctcagatgccaacttatgactgccccccatgccatccaactcctttccttaccagtactcctcagcccccacactctgctttatttttctctatagcacttaacatcatccaacatcatccaaataaaagatatttactttttcatttattatgttcttccctccactgaaaaatagactccaagagggctgggattttgtctgttttgttcattgctatatcctgcctgcttatttcagtgtctggcacataggcaggactccatgaacatttgatgaacaaataaatgaataataagaactacctcagagttgagttgaggattaaatgagttaatacacaaacagctcttggaacaagtgcttgtcacatagtaagcctgcagtgaatcttcgtgctgctgctactgttaaatattattactgaggctgagctggcctagggctccttggattggacttgctaagagctaggcaagagtcacaactgtatgaaacttgattgagttaaaacaaacagtgctactcctctttattatctccatgcctggtaagcacattttctacccccaaaattgggactgactaatatgagaatatttatggccttaataggacaggttatttgatacaattactagcctagacattttaggagattggccgctcctcaatactataaatgcatatatgggtgtgtagatagagatgttgcttcccagattgccacacatcctgatactgcaagtaggcatcaactgaaaatgtgccgtgatgtgaagaccaaacgcagagaagtgagagggacaaggctgtgctcagtgacccatatccagatgagaaatccatctgctcacttgggagcaaaaatgccccaagaccctgctatctctgggcttgcacgaggctttaaatgaatcaccattatgatgtcttatattcagagggaaataccaatattcatatattcaggtactgaaacttttaagggaatttttcttttttctttcttttttttttttttttggtcaaatgaacttttactttacctgctaaaatctgcaggcagtgtgagccttaaaatattttagagagagagagagaagtatcttaaaattacattgtttatttctaagaacaaactcaagaaaaccctttccttcaaatcccggaagagtgattagcttgtctctaaggtatggcattggctgggcatggtggctcatgcttgtaatctcagcacttcagaaggcccagggaggaggatcacttgagcccacgagtttgagatcagcctgagcaacatagtgagaccttgtttctacaaaaaatataaaaattagctgggcgtggtggcatgcaactgtagttctagctacttgggaggctgaggcagaaggatcacttgagcccaggaggttgaagctacagtgagccacgattgcaccactgcacaccaacctgggtgacagaatgagaccctgtctccaaaaagaaaaaggaaggaaggaaggaaggggagggaaggagggagagagagagggaaagaaagagaaaaataaaaagaaagaaaagaaagaaatgacatcagtgaacctcctcaaaccatagcgaggctgttaagtttgattggggctgacatccatgagtgggtacaagtttatctggtgtggtgccctgcatcctataacacttagttggtaaaatctacttaaacttgagagggaacatctcaaaagggacagctgtggagttgggaaggtggagcccgcaggtcctcccatcttgctttggtgatgaggcagaaagtggggctgaaaaactgagtctgttttggttgtatatgagggctcctgagccattttatttttaagctccagttaaacttctttctccatctctccttacgaagtcctccttcttcagccaggttccacagcaatttgggatttcacaaagcccagggtttggggtgactgtcaaattttgctattctgtcaggaagccttatcttttgaactacatttaagttgtattttaatcattttagttaattcattcaacagatatttattgaaagtccatatgccagacatatggggatacagccaaaaacaggaacacctttgtccttgtcctgatagggctagcctggctggggttacccctaagctcagatttgaattagttgccaactttcaagaacaggaattttcacacaaaatgtgaatatctggctttttttgaaaaattgggaacctggcaatggtgggcctctgtttccacatggcaggagctgaggcacagctcctgtttccacatggcaggcccctccctgtaggctcactggtgcgcaagtcctcaccagtcccttctgactcacacttggcccgctggtatctcctctgtgggtggaattgctggtcttcgtctaatgcgtcatttgccacagttctgtttctttgtgactcctttgtttgctcgttttctttttattgtttctggtctggctttttcttccttgactggagtcttgctctctgaggccctcttcagctctagcattcgatgatttggaaaccacagagcttagtgcctcacctgtaggtttggaggtgtgcttaactcagtttgactttctcatttgcaacatctgctgttccaatgctgtctatagattgtatcctgagaaaccctgcatcatgtcactatctttaagagccttatgccatgtagcaagctaaataagaaacaatggttaagagcactgattctgcagtcagattgtccaggttcaaatctggcttcattacttaacattgttgtgcctcagtttcctcacctgcaaaataataaggttagaaataaaaccttcttaatatgtttttaggattctgattttttttttttttttttttttttttctgagatggagtcttgctctgtcacccaggctggagtgcagtggcacagtcttggccactgcaacctccacctcccgggttcaagcgattctcctgcctcagcctcccatgtaactgggattacaggcgagtgccaccacgcccagctaattttgtatttttagtagagacggggtttcaccatgttggccaggctggtctggaactcctgacctcaagtgatccacctgccttggcctcccaaagtgctgggattacaggcatgagccactgctcccagtggtgagtacctatttatagagcccttgcaacagtgcctggcacagagccagggccatacaagtgttagattaagtaaaaaaaaaaagtaccagtcaatctgaatctcaggccctgagtaataatttgcagaggaatttgtgctgggggttgagagttccttttcattaacccatagttaacggtgaccagattttctaaataagaaatcaggatacttcatctataaaacttgggttccagttacaacttcaggccatacaaaaagaactattaaaattgaggtgttgatgttttgtagaaacactgcaacagaatatttgagatcagacctgtttttagatatgtgatcactctatacatgtagtgctgattaggtattaggtaccctcatatctttatttaaaaaaaattcaaaattcttcaaaacaaaaaaaccttcaaaaattatctggctagcatagaaaatctttttaggcgatcactgataaaattttttccctccctccatctctctttgcttttaaacagcaaaaactcaccccatgcccagttctcacccagttaattcagacagtgtgaataccttgatgttgacctaactcattaaaagaaaaagagagaaaacctttgaaagcctattccatgtcaaccagtgtaaaaagactctcaattttattcaaacctgaaaacaatcttttatggtgggcattatgatttctacttcacagctgaggagatctagtgtggggaggcctttgggagttcaccctgggccttgctggcttcaaaatctgggcactctctgttctgcactctggcatggttattagcgtccctacagtcccttttctgaccactcagtggtatcagcaaagcaacaaactcactgttgacaccattcctttgctcctatttgtgtattcattcattcattcattcattcgttcatccatggtttgtgacctttgagaaaaaactcactcccctttcttctattgttcttttgttcattagaaattatcttagcaacttactttagtgttggccttggaagtgcaacagaaaagactttactgtaggaaggaaataatagatatacccatgcacacaaagtagaggtagatattagttttagagacagttcttaacaactcctcctcttggttgaataattctatttaaaaaaaatttacatagttttaatattataatagtaataggatatttgtcttcaaaagtaacatatttttcaatgtgacctgtattaagtaataagtaataaattgaaatctcaccatcaccacaatctctaaagtaaccgtggttactttaaaaacaaccactgttaatcatttagggtgtctctttccagtctaaaaaaagagcaagtgagaatgcatgtacacatgtattcatgtctttttatagttaaaatatatatatattttttggtagagacagggtctcactacattgcccaggctggtatcaaactcctgggctcaagtgatccttccactttggcctaccaaagtgctagaattgtaggcatgagccaccacatctggcctctttattgtttttaaaaagaggaatattctgcatatatatttctataactttttatttttaatattaagaaattttccaaattcccaataataaaaggagaatatcctgtttccttttttaaaataaccacatagtaagccatggcataatactaaattgtttaactattagactagattattatttactagtatagataactttaaaatgaatatcattatgcatatctctttatgtaggttatactattgttttatttgttaacatcctgaataaatatcacccagatcccagtattcagtgaaactacaggttcttttagagcataagcaaaaataaattgtatgcatgtgtttttgtatgtgtgtttaattctgcttacatttgaattttcttccatctttttcctactatctgagtaatatcactagtgccttttattcagtcaagtctccacatgttgactcttgtcttggagttatgatgccatccccctcctggcctttcttctacttcccaggtctctctcagtctccttagccagtgttttcccctctagccaagctttaaagcacaggtccaagctgccttttcccacttcatacgctctcccaaggtgatggtcctaatggcctccattggagccactagaaatgtgatgactcccaaatctgtatcctttcctgtgagtcccagacctgtgtacttagcagctactgggcatctttgcttggatgtctcacagacccctcacactgaacagtgtcaaactgaaagcatgatgttccaggccagtcttagtcttcctgctgtgtttcctttcttagggaaagacaccacaacccacctaggaggaagtaagagctgtgattcatcctggccctcctggcacctcctctcctcctcctttaccccatatgctgtcaatcatctagttctcccagttttacctccctaatgtctcttgaaccactttgcctagcacaatgctgcctcttgaccagtctgaaattgctgtctgatggatctcttgctatctagtcttacccctcccatcagtcttccacaccatagccagaaaagataaacactttcattatgtaaaaatatagaaactttgtatggaagatattcatttagtaaattcaataggcaaaggctgtatttgaaaaaaaactataatacagataaaaatatataacatataaggagcctttaaactttgagaagaaaaaaacaaacaatctaatacaaaaaaagaggatgtgaaaagacatttctcagaaaaagaaatccaaatcaacaagcagaagagatgcttaaatttttaaaggttgggaaaatgcaaattcaagtatcaatgaaatgtcactatttgcccaaaaattaaacataaaaaaaaaattacctaatgctgtcaggagtccaaggaaagggcaactcaggcattactgatggagatgtaaattgccaaagtcttttttgtaaacaatgcagcaacttctattaaaataaaaaaaatctatttaccttttgatgtagcaactcccagctccactctactcccacataaatatgaaaccataaatacatcaggacatatgtacaggatagttattgcggtgtaactgcaatagacaaagctagccacaaaaggagtgttcatcagtggtggatggcagattaattatggttccctcatgctctggaatattatgtagttattaaaaagaataaagtatagctataccagttgatttcaaggagattttatgacatattaatggaaaggcgggatgtagagaagtgtgcataagaccatttttattaaagaatggtaaatccctcaggcacacctccttttattgcatttcactttattgcacttcacagataatgtgctttttacaaattgaaggttcgtgacaacccagctttaagcaagtccatcagtgcctaactttatgttttgtctctctgttacattttagtaattcccacaatatttaacgctttttcattatcatatctgttatggtgatctgtgatcagtgatctttgatgttactgttgtcattgttttgggatgccaagaaccatgcgtataagacggtgaacttaattgataaatgctatgtgtgttctgactgctccactgactggctgttctccccatctttctccttctcctggcctcccttgtcacctgagacaatgatactgaaattaggccaatttaataaccctgcaatggcttctaagtgctcaagtgaaaagaagagttgcactgtctctcactttaaattaaaaactagaaatgattaagcttagtgaggaaggcatgtgaaaagccatgacaggtggccgggcgtggtggctcacaactgtaatcccagcactttgggaggccaaggtgggtggatcacctgaggtcagaagtttgagaccaacctggccaacatggcgaaaccccgtctctactaaaaatacaaaaattagctgggtgtggtggtgggcacctgtaatcccagctggttgggaggctgaggcaggagaatcgcttgaacctgaaaggcagatgttgcagtgagccaagatggcactattgcactccagtctgggctacaagaatgaaactctgtctgaagaaaaaaaaaaaaaaagaaagaaagaaaaaaaaaaagccacgatgggctgaaaactaggccttttatgccaaagagttagtgaagttgtgaattcaaaggaaaagttcttgaaggaaattaaaagtgctacttcagtgaacacataaataagaaagtgaaacagcgttattgcagatggagaaagttcgagtagtctgcatagaagatcaagccagctacaacattcccttaatccaaagcctaatccagagcaagaccctaactctctttagttctgtgaaggctgagagaggtgagaaagctgcaggagaaaagtttgaagctatcagaggttagttcatgagatcttaggaagaaagccatctccataacataaaactgtgaagtaaagcagcaagtgttgatgtagaagctgcaagaaattatccagaagatctaagattactggtgcaggatacatgaaacaacagattttcaatgtagacaaaacaaccttctactggaagaagatgccatctaggacttccatagctagacaggagaagtcaacttcaggcttgaaaggacagctgactctcttgttgtgtgggctaatgcagctgatgactttaagttgaagccagtgctcatttaccactctgaaaatttttagggcccttaagaattaggctaaatctattctgcttgtgctctataaaatggaacaacaggctggatgacagcacatctgtttacagcatggtttactgaatattgtaagcccactgttaatacttactgcttagaaaaaaaagattcatttcagtatattattgcttgttgacaatgcacctaatcacccaagagctctgatggagatgtacaaggagatgagtgttgttttcatgcttgctaatacaacatccattctgcagcccatggatcaaggagtaattttgcctttgaagtcttattatgtaggaatacacttggtaaggctatagctgccatagataattattcttctgatgaatctgggcaaagtaaattgacaaccttctgaaaggattcagcattctagatgtcattaagaatatttgtggttcatgggagaagatcaaaatatcaacattaacaggagtttggaagaatttgattccaatcgtcaggtcaaaatatcaatattaacaggagtttggaagaatttgattccgatcctcatggatgactttgaagggtggaaatagcaagaaaaatagaagtggagcctgaatatgtcactcagttgccacaatctcatgatgaaaattgagccaatgaggagttgcttcttatggatgagcaaagaaagtggtttcttcagatggcatctatactcctggtgaagatgctgtgaacattgtttaaatgacaacaaagggttaagagtattacataaatttagttgataaagcagcagcaggatttgagaaaatttactctaattttgaaagcagttttactgtgagtaaaattctatcaaacagcattggatgcctctgagaaatattttgtgaaaggaagggtccattgatgcagcaaaactcatcattgtcttcttttaagaaattgccacagccattgcagcctttagcaaccaacaccctgatcagtcagcagccatcaacattgaggcaagacctttcaccagcaaaaatattaggacttgctgaaggctcaaatgattgttagcatgttttttttttcagcaataaagtattttttaattaaatatgtacattgtgtttttagacataatgctattgaacactttaatagactacagtatagtgtaaacataacatttatatgccctgggaaaccagaaaatttgtgtgacacactttactctgatatttacatgattgctgttgtctgggaccaaacccacggtatcttcaagctatacctgtgtgtatccattatatgtgatacatgtttgtatctatttgactatatgagagaaaaatattgaaagatgtattctgatttgttaatgtagattatagaactggagattgttatggggttaagagagtgggtaaggcacccagataagaggactgaaaaaatacttatatgatcgtttttcattagtgtaaagttgtatgtatgtgtctatgtataatttatgttttaaaatacattttttaaagaaagagttactcttattttgtccccatcctgtttgaaactcttctatggctttctttacttcaatactagaattgtgtttgtttgatgccttgcaagggctggctgtgcttgtgtatgcagctcggcttatgctacttttctcatgccattgctcctgcttcaaggtctgcataattgttctcttaatggggacctgccctgctctcctgggcatagttaactgctgcttgtgcctcagaacttcttttagggaagggaactgccttccctaaccccttgttagttccctaagtaaatgttcttattgacacctgatgcttttacttagcagcaattatcacagttgcagttgggcattgtctaattatttgtgtaaattctgcctcccctaatagaatgtcaactctaagaaggaagggacggtgtctgtcttgttctcaaggatcttatatagaatagatgcccaatgaatatttcctgagtgaatgaataaatgaatcccatcctgaatgtgggaccacgctgttctgaaagggcactgaccaaggagtcagacaatgtgtgttctggtcattgtgccgccataaacttgctgagagacatggagcaaggtgatatgcctcttggagcctgctttcctacctgtaaatggggttaataacacctactgcaggtagacatggagagggataaaaaggaatacaagacaatgtgaacatataaccagcagagagtaagcattcaataaaattgccttatatttttcttggtgtcttgtcacttcaccagtgaaatgggagtaatttgactaaataatttttagagtttcttctagttcaaaattatagttgacccttgaacaacatggcaattaggggcaccaaccccttgagcagtcaaaaatttatgtataactcttgactcccaaaaacttaactgctaatagcctaccagaagccttaccaataacataaacaacacatattttctatgttatatgcattgcatgttgtattcttacactaaattaagctagagaaaagaacttattaggaaaagcataaggtgtagaagaatgaaactggatcctcatctttcaccttatataaaaatcaactcaaggtggatcaaaaacttaaatctaagacctgaagccataaaaattctagaagataacatcagaaaaactcttctagactttggcttaggcaaaaggtcatgaccaagaacccaaaaacaaatgcaacaaaaacaaagataaatagatggggcttaaattaaaaagcttctgtacagcaatataaacaatcagcagagtaaacacacaacccacaaagtgggagaaaatattcacaaactatgtatctgacaaaggaccaatatccagaatctataaggaagtcaaacaaatcagcaagaaaaaagcaaacaatcccatcaaaaagtgggccaaggacatgaatagacagttctcaaaggaggatatacaaatggccaacaaacatatgaaaaaatgctcaacattactaattatcagggaaatgcaaattgaaaccacaatgcaataccaccttactcctgcaagaatggccgtaatttaaaaatcaaaaaataatagatgttggcatgggtgtggtgggaaaagggaacacctgtacactgctggtgggaatgtaaactagtacaaccactatggagatttcttaagcaactaaaagtagaactaccatttgatccagcaatcccattactgggtatctacccagaggaaaacaagtcattttatgaaaaagacaacacacaacatgttgcacacaacatctttatagtggcacaactcgcaattgcaaaaatatggaatcagcataaatgcccatcaatcaatgagtggataaagaaaatgtgggagatatatatatatatgaatatgccataaaaaggaacataataggccaggcgcggtggctcgtgtctgtaatcccagcactttgggaggccaaggcgggcagatcacgaggtcaggagatcgagaccatcctggctaacatggtgaaaccccgtctttactaaaaatacaaaaaaaaaattagccgggcatggtggtgggcgcctgtagtcccagctactcaggaggctgaggcaggagaatggcgtgagcctgggaggtggaacttttagtgagccgagatcacgccactgcactccagcctggggacagagcgagactctgtctcaaaagaaaaaaaaaaaaaaaagaacaaaataatggcattcacagcaacctggatggaactggagaccattattctaagtgaagtaactcaggaatggaaaaccaaacatatgttctaacttacaagtgggagctaagctatgtaagaatgatacagtgaactttggggacttgtggagaagggtgggatggggatgagggataaaagactacacactgggtacagtgtacaccagaatctcagaaatcacacccaaataactaaaaaaaaaaaaaaaacttatccatgtaaccaaacatcacctgttcccccaaaactattgagataatagtaataaaaaaatttaaaaaagaaaaaaaagcataaggaagaaaatatacttactaagtgaaagtggatcatcaaaggtcttcatcctcattatcttcacgttaaagcaggctaagtgggaggaggggttggtcttgctatctcagggatggcagaggcggaagaaaatccacatgtaagtggacccacacagctcaaacccatgttgttcaagggtcaactgtactttgatttcttctgagctgcagtctcccctttctctaccctcacttccctccaccactagctccattcctgactactttcttctactgttctcaagcccaggatacatcagctctccctgggaaagacaaaagacatcttcatgccgccagggtatggcagtttatctcatacctactctttcaccaccaccctgccctctatcactcattgtttcatttacatttataagacatttttgagtttccactattgtgtgtggtagactctcaccccttgaattctgtactttttcttgtgccttcccacatactctgttgagtggaggaaataatgcataatcggcaaagcaatggaaagatgctggtgtgtttttgagggcagttccccttaattaagggagatgggttctaaaaagtccttgtagataaacaaatgggtgatatttgcttcttatctgaaattactaacacagttgtctacaactggtcattcagtgttcttgatttcccctgtattatttcaattaccctaattgctactaggcaaaaacttcagtcaaattttaattgctctttaatgttaacttaaaatagctgcagttttttgtttgtttgttgagacaggtcatgctctgtcacccaggctggagtgcagtggcacaatcatggctgactgcaatctctgcctcatggcttcaagtaatcctcttcagcctcccaagtagctggggaccacaggtgtgtgccatgcccagctaattttttgtacttttcgtaaagatggggtttcgccattttacccaggttggtcttgaactcctgaactcaagcaatccaaccaccttggcctcccaaaatgctggacttacaggcatgaaccacaggacccagctgctgttctctcttaacaagagacaagtcctagagcaagatgcatttaaacccactttggggtatcaaaaatatcccaatcttgtggttctaataaatgtttaacaactaggttggtatggaggttctgatgtgaagcattagtcagtttctgtgctgttactagatgttccctaatagggctgggcagagatgctaacaattggctcatgagggcaggtggacctggctccaacccaccactgcacccaatccctgagttcttaatcttcatcacaccctcgacttgcttcccagccattgtttctgatctcagttaatgatgcctctcagtcagccaaggagacctgacagtcccatccacttcccccaccctcatcactgaatcctgttgacttctctctccagcatctcctgagtctgtccgcttgtctgtccccactacaaacaccctgctctggtctgtcctgtccatggacttcattgctacagcattgactttcattataatttccctgcctctgtgctggcccctgtcagccgctctctactctaaagacagtcagcctgctgacacttaaattatgttaggccagtcttgttaaaaacctttctgtggcttcctctccattaggatcagtccaaacccttagcgttccttactttagcacacataggctgtgggctggcctttgtctgtcttgttccccaccagccaccccttgccctcctcattctagctgttaggaatcacgtgtgtatcctcaagcacaccatgctctttctccattcagggccttcctttgggggtgctgcttcctatatatctgtatgatcatctcttcttccactccccacccactcacctacccagccctgcggcctaactgccttttatccttcagtgatttgcacgttatgtcagttccagcatgacttccttggggaggccctagaccaggcagctcccctcatgcagcccctgatgtagagcctgctccctgtcttctccacacgtgaggctcctggagggcctggaacaaccccatattcccagcccagcccgtactacctggcagatggttggtgctccatgaatgtcgggtccatttcttggatttatgcaggtcccagttttctattaaagagtaagctccacatggtcaaacatgttcttacttcctgtattttgtgtcagcagtttgtcagcttagcacaaaaagtacctgatgaataatttctgccaccaaagtcatgttgttttttctaaccaatttttttttctctcctaggtttcatcagctgtttttcccaacaaatatatggtgttgtgtatgggaatgtaactttccatgtaccaagcaatgtgcctttaaaagaggtcctatggaaaaaacaaaaggataaagttgcagaactggaaaattctgaattcagagctttctcatcttttaaaaatagggtttatttagacactgtgtcaggtagcctcactatctacaacttaacatcatcagatgaagatgagtatgaaatggaatcgccaaatattactgataccatgaagttctttctttatgtgcttggtgagtattccataagttgatttgtttaaaatggcaaatttccatttttttagtctgttttcagagactagcacaaattaatggtctatgagaaaagaattagatgttacctgttgtcagggttttctccttttctggtatagaggagctagctactttcaattcctttgtcattcctctgggtgaggagagaatctaaccaaggtggggagaacagtatcagttgtcttactaggaatgttttggaaagagatgtagtgacagcagttagcttagaactctttgggctccactgatagatgttactctataaagttcctgcttccccacacagcggggagattgtttttcctcctgcaccattttatttaattaatttatttattttgagaaggagtctcactctgttaccaaggccagagtgcagtggcacaatcttggctgactgcaacctctgcctcccaggttcaaagtgattttactgtctcagcctcccaagtagctgggactacaggcccgcaccaccatgcccagctaatttttgtattttagtagagatggtgtttcactgtgttggccaggctggtctcaaactcctgagctcaggtgatccacccgcctcagcctcccaaagtgctgggattacactcatgagccaccacacccagctcctgcaccattttaaactgaaactagagagaggggacacatttctccctgcttctcactgacactcctccctggtctctaaagccccttttgtgttgcagtcttgtataggcccctgcctcacatgccagtgtttcttggtcattttaaggcctgcctcattttcattgtttctgacattcctggtgtcttggtggttgcaatatttaaattaaaattctttcaatattgtccttgatcgcctctcctgtaaggatcttttcctctacgttacccactacccatggatgtaaccgagaactcatcattacctcaatgtcaggtgtctcactctgaccaccatgccctgtccttgatgatgctgatgctgacagtccttcacacacctgatgtccctgctgccctccctactcagcctgagtgctgttgtcactcactagactcagtccgttgcagacacacttagcttccttgctcctttgctggcttgtcatactcgcatggccagattacagctagattaagtccgctgctttgcctattctgtgctcacacccatgtggttgcagaaaaatacaccaccctacaaagtcctgcacttttaatttctctaatcacttacctcaattaagttggtatttcctagcctgttcacttacccactctcctagcagttactttttctctcctcaaatcttgaatacctccttctctagactgactcttcagctgaaggctttgcttcttatttcactaaggagaataagcaatcagagggcaatttccacaagctctcaccacctgcctaccttcctacccatacctgagcctgtaggccctgctttctctcctgatatgaatggactttctgagttctcacctgaagttaaactttccacgtgtgccctggatcccacctcctcttgccgtcctcgggaatatcaccctagtgcttctacccactctctcctgatgagaatttcccccataagttgatggttcattttaagtggcatacatatatactgtcattaaaactttctcatgatccctgtacccctccagccaccaccacctgctgtcttcactttatagaaaatctccttgaagaagttgtccatattcacttattctgatcccttatattcacttttaacccactccaaataggctttcatctgcactgctatgccaaaactcctctagacctccttgttaataaatccagtggttcattctcagtccatgtcattcttgacttctcagcagcttttgacatagctgatcactccctcctccaagtactgtcttcacttgacatccaggataccaccctattcatgtttctttctcttttttccttgagagggggtttcgcccttgttgcccaggctggaatgcaatggcgcgatctcagctcactgcaacctatgcctcccgggttcaagtgaatcttctgcctcagcctcctgaacagttgagattacaggcatgcaccaccatgcctggctaattttgtatttttagtagagatggggtttcaccatgttggtcaggctggtcttgaactcctgacctcaggtgatccacctgccttggcctcccaaagtgttgggattacaggtgtgagccactgtgcctggcttcacatttctttctaacacactgactattccttttcagcttcttttgctagtttccttgtttccccaacctcttaacactggaaacatcaaggcttaagccttaggtctctttccttttctgtctgcgttcatagccagtgggtgagctcatcccatgtcagggctttaaatatcatctcaatgctaataatgtacagatctagagctctagcccagagtaccccgccgagctccttatgtgtatacctgactgcccagtgtacctctccagtcagacatctaattggcctttcaaatatcacaagtccaaaagtaagctcattatcttccccttaaaacctgctgctcctccccaaatcttttcccttttggttaatggcagccccatcctttcagctggtcagtctgaaaccgggatgtcatccttgatacctctctttttcttgaataccacattcactctaccaggaagttgtattggttctaccagaatgatctttttaaaacagaagtcagatcatgtcactcatctgtgtggaactttctaatggccccatctaactctgttaaagctaaaatgtgtaaagcgacttgcaaggctatgtgaggtctgacccctgtggactctatttagacaaatacagcttgctaagatgtcaaagtatcctcttagaagatttccttgaaaaagtagaatctttgaaacatggacattggggatctgataatttatagatagggccaacaaacaagaggattgagtcagaatttagatcacacattttaagagccctttttatagagtttgtaaaactaattcaaaacatttgaataaatttctcctcttaaacttgatgaactgttttaaaataatttaaaatattctaggccgggcattgtggctcaaggctataatcccagcactttgtgaggctgaggagggagggttgcttaagcccagtagttcaagaccatcctaggcaacatagcaagactccatctctacaaaaataaaataattaaccaggcatggtggtgcatgcctgtagtcccagctactcaagaggctgaggtgggaggatcccttgagcccaggaggctgaggctgcagtgagccatgattgcacctctgcactccagtctgggtgacagaccaagaccctgcctcaaaataactagctaaataaattaattaaataaaatattctatggcacctcagcaaaggtatggttttgttagtcagaccaactggatagaccttaggaagcctgcagaggagtaaagtacaggggaggtgagttttgatcaggaggcagtgatattgatagtattgagtgtgggacttaaagtcctggtttgagagtctggacatcagcttgtagcagtggggagccattgtgtcctatactggagcaaggaagtgacttgataaaatacatttttggaagattaatgtgatggtgcatacttatgatggattaaagagaggagatgtcaagttagaagctactatcatccaggtagatagagggtccaagaaagagtctgcaagatgtaggttttggttgtaaaaagacataagatgactctaggtttcacatctgcatgataaaatgattggtcatactatttttttttttttttaagaaaagaggaagtcatacttccttgaggtaatgttaacacttgttttagtaacctggtaatcttctagagacaccagacctaataggagacttccagtgagcatattttggacagggggatttcctggcacttcctaaattcagggcatccacttccttctgtgtgtacattgagatctggctttcctccatacccaaaagtccccttaaaatttctacttctgaggtttattagtcctttcccatctttttatggaccttcatcacatctcagatgatgatttttatgtaagtagaattaactgccctgtccttaactgggctggattgatacttgacctttactaaaattcgtgaaaatatacacatatttctataaaatgtcatcagatatgtgtaagaaattctcattttttacacagcagtgaactcaattcattaattataaattgactaattgtcttagggaggaagtaggcacatttcttgccagtttaatgctgcttaaagtagaggtataacgaatatttgttagatacagctgtggtaagtcccacgggcagcaagaaaatatgaaagatttatagaaggaaaagatctgaggtgtagaaactgtgatctaggtgctgcagaaaggcttgcacacttttagatgagttggataggcacttctacctttgccatctggcaactgttgtgtaatgagatagccagaaagagcttctacctagtcaagggagttctagcaacttagaagataatactaacacttcttcatgtttcccctgaaattactttcatattctgttttttttcttttcttttcttttcttttcttttttacaaaccctgcatgtggcactcagtcatattctgtttgacctttacagtgacctgatacagcattccctttcacagatgaaaataagacagtttaggagtccgtttctctgtaagtagaacaagagacctggatggatgctttcttaaaactcttccagctcctaaaaggactgtggccccaggtcacacagcaggccaaggctaaggcttgatcaaacctcccaactcctactcagtgactcttctcatcatatcacataccctccggggagcctcggcttcctggagttggaaactcacagccaatggccgtgtgctctattacagctagcatttgttaagtacttactctgtgcaggcactacatgttaattcatatgttgattattatctgtgttaactcatttaatctcattacagtctgatagagtaagtactatttgtgtccttattgtagagaggaggaaacctagacacaaggtgatttaagtaacttgcccaatgtcaaatggctcttagtcatgaagctgggatatgcactcaggcagctgggcttctgagtccatgctaaacaccatactgtacctctttggagatagcgggtagaagaatttacattttatttgaagactgtctctctgaatctatccttctatccatctgtctccccatctgtcctgtactgcttgtgaggagccatctgtgtgccttgcattatgtcatgtgctgtggttgaaaggtgagtcatacctagtctttgccctccaaagatacacagtctctggggctgatgatgcacctctgttcagttcagaaagtgctggatgaaagactagacattggcagagctagatcaatacattagaatctgcaacagaacaaacaggccacatacatcagaagcacctgggatggtggggctcaggaatctgtatttttaacaagcacccttggtgattcttaggcaccttaaaatttgagaaatgcttcaaaggaccatttctaaggaggtagaaagcttggttttctgcccctgagaaatgcccagcctagttacagaggcaggcataagtatatgaaatactgagaacaggcatttttgaactattctggggatgcatgttccttggaagtcccctgagggctgctatggggtggggtgggcaaaagggaccagaggaagttaggagagcagggctctaggctttcaattttgagtcaactagagcaacttcttatccattggattggattgccactgaagatttaattctgagaaattccactgcttaaaagatgattaaaagtctttttaattaaagaaaatcttaaggaagtatgtaaggacttgtgtgagctagattaaacttaaaaactaggaagccccaagtagaaagggaagtcagtgtgtgactctggtttctaccaaggcaggctgggtactttatttaactgagcgagaaggaattcaggaggaggagaagatgggggaaccattaaatgcttttatttttcagattataattggagcataagcattaacttgtcttagaaaacatcattttaaatgacaacatagtattccattatcttggtgaacctaaatttacttaaatgctctttttagtagacgtttataatgtatcaatactttattatcccagtgctaccatgaccattgttgtatattacatatgtttttgcatgtttcctcaggcctcttatgattaattgctggagggtagctgagacgcaagaaggcatatgaattaacaaataaatgactcataggacaaagtaattagccttgaggcttttaaagggcaacaatggcagaatgtgacatgttagtgtcttaactcatccttgtaggtccatgctgccttagccaataggaggcacttcctagaagaagggtgggagtgaggcctctggacaggcaggtctgtgacacatgctgctccctgcactgcctattaacaggtccagcccaaccaataggcagggcccgacaaggctctgtgtagctccacctttcacaaaatgtattgagtcagatgtattatggactttcctttcacaaaatgctttgagtcagacgtgttatggaattaaaatttttttttacattttggaaaggtaatacaaagtatttcctctgcatattaagcaccccacttaattatggggagcaccctatgggtcaagcataggaacaagtatttacttcattcctatatatttaaagacaaggtctcagtctgatgcaatcatagcccactgtgtgtagtgagctagagtgcactggcacaattataactcactgtagcttcagattccttggttcaagcagttgcaagtagctgagactacaggcaggagccatcatggctggctaatctttaaactttttataaagacagggtcttgctatgttgcccaggctggtcttgaactcctggcctcaagccatcctcctgcctcagcctcccaaagtgctgggagtatagccatgagccactgtgtcctgccaagcacaggaatatttttgtggtgaaacgataatgaatatttgaagtgagtgagaaagactcaaatccttgtgttaattcaggtcaggtcaggatttgcagctaaacgattttgctaccaacttgcgaagactcttttggcttcagagattttttgatttaagaattgaggataagggatttggggcctgtattggtctgttttcacactgctataaagaactacctgaaactgggtaatttataaagaaaagaggtttaattgactcacagttccacatggctggggaggcctcgggaaacttacaatcatggcagaaggcgaaggagaagcaagcacttttttcacaaggcagcaggagagagagagaactgccacacacttttaaaccaacagatgtcatgagaactcactctctatcactagaatagcatggggaaaccatcccccatggtacaatcacctcccaccaggtccctctctcgacacatgggaattacaattcaagatgagatttgggtgaggacccagagccaaaccatatcagggtctgaatttattctgttaaatttgaacaggtagatctgacctagcaaaagaaagaattctcgctccttgatgctcaaggagtttgtctgctcatcctttcaagcttgtaaggaggttgcgagctcttcataaatttgcagatgataagtctaaatattactattttctgtactaaatattatacttttttttccagagtctcttccatctcccacactaacttgtgcattgactaatggaagcattgaagtccaatgcatgataccagagcattacaacagccatcgaggacttataatgtactcatgggattgtcctatggagcaatgtaaacgtaactcaaccagtatatattttaagatggaaaatgatcttccacaaaaaatacagtgtactcttagcaatccattatttaatacaacatcatcaatcattttgacaacctgtatcccaagcagcggtgagtaaataactaaatgtgtcatggaggctttcagaccacagatgtggtgactaacacaaggttcacaattttgaaatgtaaaacaagttacaattttttttttttttttttttttttttttgagacagagtctcgctctgtcgcccaggctggagtgcagtggcgcgatctcggctcactgcaagctccgcctcctgggttcacgccattctcctgcctcagcctcccgagtagctgggactacaggcgcccgccaccacgcccggctaattttttgtatttttagtagagacggggtttcaccgtgttagccaggatggtctcgatctcctgacctcgtgatccgcccgcctcggcctcccaaagtgctgggattacaggcgtgagccaccgcgcccggccaacaagttacaatttttaacagaaaccccattatagatacaaagctaacattatttagcactttctgtgttgagcaccattctaatacatatgttaattaattcaatcttcacatcaatcctcatacaacctataagttgtgtactagtacttatccctgtttcctggtgagaaaccaacagagagagagtttaagttgtttgctcaaggtaacagctagtaagtggcagaacctggctttgagtagaggctatctggctctagagcccatggttttaactattcacaatgctgctttataatattgttataatatcattatgttctgaaaggttacatatctactacaggaacatgcatttgatatgtttccttaggcctaacactaagttaatatcatgacaatctgtcttggctatgattttctaatgttgttttagtattatttacatttgtaatttttattatctgttttttacattatatccccagtttaacaaacaaaaaggtcagtgacttgaaagtggtttattaaaatataaaagagacgaaaatagtaaatactattattcagaataatataattgtaaatagtgaacaggattccagggcaaatagagaatatgagtctctagggctgggataaggtgagtctatgaatgaaatttttctgaacaagcagctgaaacagataagggaaattagcaaatacaagaaatatatgaaacttggattttaactggtgagccattctaagtctcccatttattgtcttttctgaaccctttcaaacaataacttaaagccattaaagttatattattttcagacaaagcagagtcacttttgggaaaggaaagacatttttcaagaaaaagtagacgtcctcgtcagggtgggcagcgccgccgcggcgggcctggggcttggggcctggagcggcccctcccagcacccggtgcgcccctgccctgccgcccactgccctgaaggtcaagtcgctttgttctgcgctgcgggcggcttcctcgccggcggcccagcggaggaggcgtagagggcggcgagtgggggctggcagctcaaatctcccgctagcccagccagccccgcgtacccggagggccgcggcgcacccggaggagcattcaggcttcccgtttttaaggtggagacgtccaggacctctttattagatgtttaggaatttgagtttttccgtagggcgatggtcatcgtgagcatctgtggggtcaggctgggctaactggggttttgattgtaagtttcgtgtggacgagggcatgtctgatggggaagaaagtccttggcattgcatctcagctgttgggagctgtgcggtgcgagccagatgggcggcgtgtgctccccgaggactggcctgagtgccttagcctagttactcacgggacttggtttaccagacaaggggataaaaacattcagatggcagataacagtttttcagatggggttccttcagatttcgtggaagctgctaaaaatgcaagtaagacggaaaagctcacggatcaggtgatgcagaatcctggagttttggcagctttacaggagcgacttgacaatgcccctcacaccccttccagctacatcgaaactttacctaaagcagtaaaaagaagaattaatgcattgaaacaaattcaggtgagatgcgctcatatagaagccaagttctatgaagaagttcatgacttggaaagaaaatatgcagcattataccagcctctctttgacgagagaagagaatttatcaccggtgatgttgaaccaacatctgatatggaatcagaatggcaccgtgaaaatgaagaggaggagaaattggctggagacaggaaaaataaagtagtcataacagaaaaagcagcagcaacagctgaagagccaaatcccaaaggaattccagagttctggtttaccatctttagaaatgtagatatgctaagtgaattagtccaggaatatgatgaaccaatcttgaaatacctgcaggatattaaagtgaagttttctgaccctggacagcctatgtctttcatattaagagttccactttcaacccaatgactgctttgccaactcagtcctgacaaaaacctgcaagatgaaatcagaaccagataaggctgatcccttttcatttgcaggtcctgagatcatggactgcgatgggtgtactattgactggaagaaaggaaagaatgttactgtcaaaaccatcaagaaaaagcagaagcgtaagggtccaggcactgttagaacaattaccaaacaagtatccaatgagtcatttttcaacttcttcaatccactgaaagcatctggggacggagaatcactggataaagattctgaattcgtattagcctctgattttgaaattggacactttttccgtgagcggaccacaggctgtgctgtacttcgctggggaggccttaaaggatgatgacaattttgacgaaggtgaagaagaagaggacgaattagaaggtgatgaggagggagaagatgaggatgaggtggaaattaatcccaacaaggaacccagccagccggcggaatgcaagcagcagtaggaagtggaggtgggcgcctggcagaccggctgtcgcgactccgggcctgtagcgggaggcctcagtctttgccgcatgcggcacaatcccgtcgacagcgcttactccatctaatcgttttcaagtgcatgattttcactttcacttttcctttttccttattattttgcttaatgtgtacagtggcaactgaaatgcatttcagaaataggaggttttgtccaataccctctgcagccttggtgcctgtagctctggacttgcctggacccttccctgcgggagggccccatagaccccattggggtggggtgggatggggtggggatcacttggctaaaagggccgaggtctggtgatgaggttccagggatctagaacctctcctaccactcctgcagttggactgaattctttcctttcatttgaagaaacccactcgctgttttcagctgcttaatctgctgagtgtgcagcctgcatcacctgctgtatgctaatcatctcagaagggccgtgtagagtagggccgtattctccttaggatgttgctttttgatcttcttttttaagggttgggtcagggttgtggcacaccagctcaggcgagagctgccacgggtcacctcatatttatttatcccttcttgcctgtgaggactgcggccttttgctgtcgctcgtccttgccatttctgaaccaccctggtgacctgagcaggaagatgtgccacttcctagcaggagcaagggctgtgcggaagaaacactgcttcctgccaccagggctgaagacgcgagcctgtcctcgtgacacaggcaccgccctgctgccggagttgggattcggcagtgttctccagtgaggggctgggctgggaagtcctgcgtttcatttgagcatatgagcgtcaagtcctgctttctcagtagtcccattgctgggccccaccattcatcctgtctgaaggtcctggttggtgtgaccggttggtggctggtgagtggggtttccaagtgggtgacagcgctctgtggcagccggggatggccttgtccgcgctgaccaggcctgtagagagtgctcagcctaaccttagaacacatttataactgaatacagtgttttcaatttgtacataatagttagaatattctattaaagttatgaaacacggagaaaaaaaagaaaaagtgcaaatgagtcccaatttataactgatagatttgatttttgaagacagagaaaagatcaaacccacagaggtgtcactcaaaggagcactgtttgtacaagtcacacaattgcaagaagtttttaaaacgagctgcaaagttaaaatagttaagcttggagcaaacattcctttattaattccaccttttgagtgttacataatacccaaggcatacgatatggaaatgcaatttgttgtaaaagcagatagttgctttataatgggaacaacaaaaaataaaaccagtgtgcttttgccttttggtatatgtgtgctgcatctaactgacaagggggaagaagatgaccacatatagacagagcaagcaagttgaaatcttgaaaagttttaagtgttccaagagacaaaatacttgaaggaaataatttctgagtaagatccctctatagaattacatggaatattttaggggatttttaaaggttttgcccttgcaaaactttatgtttaactttatgtttgccattagaatttgaagacacaaagtaaaattactcttactgaaagtaagattactttccctgtaaatagtctggtaaaagatcataagaggaatgatattcctcttattgatttgaaataagtactattaatttgaaaaaattcttttaattattaaataatggtgatttatccttcttttacattttcttccaaattgatagttcacatatatacaacagattttgaaagtttgaggaatgttgcttgataggtcttaggtttaaatcctggagtagtgttgacatctgagacatatgtctgggcttctgaccctggtttctgttaaccaaatattggaggaccttctccttttaaaatgcaaaccaggagctgaacttaatgatcttaatggttcttttgaacagtaacagtctaggatctttttttttctgagatgatttttgaatgcttttgtgtggaaccacatgcatcataatagatacaaatccatgaaagtataacagttaaatactagatcttactttttcaggttttgatttctcatctaaactttccaatgctttatcagtgaagcaaactaactcacattgactagcctgctctcctttagcaaacccttcaaataaatgcctcatttgctcctcaccactatcattttagattggccagacagttgttacttaccttttaagaatgaggagacaggtagccgggtgcggtggctcacacctgtaatcccaacactttgggaggctgaggcgggtggatcacgaggtcaggagatcaagaccatcctggctaacacggtgaaaccccgtctgtactaaaaatacaaaaaattagtcaggtgtgttggtgggcacctgtagtcccagctacttgggaggctgaggcaggagaatggcatgaacccgggaggcggagctggcagtgagctgagaccacaccactgcactccagcctgggtgacagagtgagattccgtctcaaaaaaaaaaaaaagaatgaggagacagggtcaaccaggtggggtgacttgcccagggtcacttaagtattggagatagaattaaaatttaggtctttgaattccagagtgtttttgtatgataccatcctgactctctatacgtttcaaaataaatcaaattttaaagttttctttgatttattcatatgaatgagctagagaaacccatactatatagatatacatagtagatattggtcaaatgtaacttaattttttacctcattatctcatgtttcttgtaacattttgtctagtaggacctttttgtggtttgtcatcattttagtcatgacatctactgtcataccgtcactgcaacccagaaatggggcgatggggttactaactagttaaacacaatctaaaggagaattttagagacagttaagattgaggacagagttcttgtccaactcgtattgtactgggggaatgaactaatacttactgaaggcctgctccacaacaaactcctgtaaatgatttacataaatgtgtcacatttaatccacacaacaacccagtggtgtgggtatttataaaggaggaatctgaggcacagtgaggttaaataacttgaccaaatatacacatttattaagagcaaagccaggatttgacatccaactccatctgaactcaaagcactgtgtcttccccactgtactgggaagtaaaagtaagaagatgactcagagatggagaattataatctggaatttggaatttacttccattggttaaccgtttgaaaattgcagctccaaggcattgggagatggaaagaaagctagtgagcaattatttcttgcctttgtgtcatgctcctacattttgctcctccttatctccttatctgcggtcagagtagatagcatggaggttttatgcccatgctacagatgttcagagatctcaaggtcagaaagctggtttatggcagcacgtgaatatagacagacttatacagattagaaaattgagaagttgagggcaggagaaaattctggatagaagagaacatgggattgggagcaagaaaacctaggtcctagacctgatttcattgcttactggcagtgtgaatgtgggggataataatacttactttacaagggctgaggaaattaaataaaatagcatgtgggaaagagtattgatggttagtcactataaaactgctagttgttattcaggatacaggaagagtttcaagagaggacatttggtataacattatatacagccaatggtttaaggaggacaatgtagaagaggttgtggatttggcacttaggaggtcattgttgacagaccttgtgaatagatgagggtaggaaccagattcctgggctttaagtaagaagaggggtagtccaataggccagttatatatttggctgtgaaagaggaaaataaaatctgagtacctttgagagtcaaaggctatttccaggtaaagaaacccagtgcacttcaccattctcttttagataactgctgggaagaagtaggatgattgtaacaccctccacattgacacagaactctaaatgggagcctagggaaagggcacattttttgaaggggtaggcaagaggatattctctagagtaccagtttccaactgttgtacacatttatggaccaagaacataaaagaaacattgttcagttccgacctgaagttatgtagaacaaacattgttctgagttcaactagatgatctttctttcatagctgtgtggacattatgttacctgcagggagtaagtcactgaaggtagagcctcaaaaaaacaccctttgatcttactcctaagaaaaaagagagaaattggaaaaattcatcatagaaacacaaaaatatgcggaaataggaaaaaggagaagaaggaaagaaatgcaacataggaaataatattatgtagactgagataaagaatgttaagaatatttgaacaaagtttgaaccagatgaaatgtaacaggcagaaacagaagtaggaggatttttggactgatttaagttggtctcttgtgacttttatgactttccactgggaagaatagtgattaagaatgttcactctgcttttaaaaattgagaaagaacgctgcgtgcagtggcttatgcctataatcccaacactttgtgaggccaagacgggaggattgcttgaggctgagagttcgagaccagcctgggcaacatagggagaccctatctctactaaaaattaaaaagttactgaggtgttgtggcatgtgtctgtagtcctagctacttgggagactgaggtgggaggatcacttcagcctggcagtttaaataaatcagatcagtaattaataatcttccaaaacagaaagcaccaggttcagatgggttcattggtgaattctaccagatatttaaggaagaaatactaattctctataatctcttttagaagatagaagcagagggcatactttccaattcattttatgaggccagcattattcttgtgctaaaaccaaagaacaatacaagaaaagaaaattaagacaaatatttctcatgaacatacatgtagaaaccttaaacaaaatattagcaaattggatccaacagcatatagaaagaattatacatcatgactaagtggtatttatctcaggtgtgcaaggcaggttcaacatatgaaaatcaattaatgtaatccatcacattgacagactatgaaagaaaaatcacatgatcataccaatagatacagaaaaagcatttgacaaaatccaacatcaatttatgataaaaactctcagtaaactaggaatagaggggaaactttttcaacttgttaacaaatgcctacaaaaaaccctgcagctaacatcatctgtaatggtgagaaacttgaagctttccaactaagaccaagaataaggaaataatgttcttctcaccactccttttcagtattgtactataagcactaactaatgccataagacaagaaaaggaaataaaagttatacagatgagaagaaagaaagaaaattgttttagttctcagatgacatgaatatctatgtatacaatccaaacgaattgaccaaaaacctcctggaactaataaaaaactatagcacatttgtaggatacaaagttaatatacaaaagtcaatcacttttctataacagcaatgaacaagtggaatttgaagtttaaaacacaacaccatttaccttagcaccccaaaaatgcaatacttaggtacaataacaaaatatgtcccagatttatatgagaaaatcaacaaaactgatgaacaaaatcaaagaagaactaaataaatggagagatattctatgttcatagataggaagactccttattgtgaagatgtcagttatttccaatttactctataaattcagtgcaatcccaagcaaaatatcagaagtcatttgtggatatcagcaaactgattttaaggttaaatgggcaggcaaaagaccagaatagccagcaaaatattgaaggagaacaaaattgtaggactgatactactcaacttcaagacttactataaagctacagtagtcaacatagtgtggtactggtggaaaaataaaagacaaatagatcagtgaatcggaatagagagcccagaaataaaccaacataaatatggtcaactgatctttgacaaaggagcaaaggcaatacaatggagcaaagatgatcttttcaacaaatagtgctgtaacaactggacatccacatgcaaaaaaatgaatctaaacacagaccttatgcccttcacaaaattttactcaaaatggaccatagatctaaatgtaaaatgcaaaaccataagactcctaaaacataagagaaaacctagataactttggatatgatgactttttagatacaacaccaaagacatgattcatgaaagaaagaattggtaagctgtacttcattaaaattaaaaacattgctctatgaaagacaatttcaagagaatgagaagccaagccacagactgggagaaaatatttgcaaaagacacatctgataaaagactgttatccaaaatatacaaaaaacttttaaaactcaacaagaaaaacacaaacaacccaattaaaaaatgagtcaaagatctcatcacacacttctccaaggaaggtatacagatggcaaatagggatataaaaagatactcctgggccgggtgcggtggctcacacctgtaatcccagcactttgggaggccgaggcaggcggatcacctgaggtcaggagttcaagaccagcctggccaacatggggaaaccccatttctactattttctattttgtaaaaatacaaaaattagctaggcatgtcctatgtcaacaggcaacagggaaatggaaactaagacaacaatgaaataccacttcacgcctatcacactggccaaaatctagaacactgacagcaccaaatgccagtgaggatgtggagcaactctcattcattgcaggtgggaatgcaaaatggtacagccactttggaagacagtttggcagtttcttacaaaactgtatgtactcttaccattcaacacaactgtcatgcttcttgctatttacccgaaggcattaaaaacttatgttgacataaaaaccttcacatggatggttatagcatctttattaataattgtcaaaacttggaagcaaccaagatgtccttcagtaagtgaatggacaaataaactgtggtacatacagacaatagaatattattcagcactgaaaagaactatcaagccatgaaaagacatggaggaaacttaaatgcatattataagtcaaagaatccaatctgaacaggctacatgctatgcaaattttacctatgtgacattctggaaaaggcaaaactgtggagactgtaaaaagattagtagttggcaggggatatgaataggtggaacacagaggagtttgggggcagtgaaaatactctgtatgatactgtaacgatgttattatacatttgtccaaacccacagaatgtacaactgaatgctaatgtaaagtgtggattttttaatgataatgatgtatcagaatggtttcattaattctaaaaaatgtaccactctggtgagggatattgataatggggaggctatgcatgtgtaggggcaggatgtatgtacaaactttctgtaacttctgctcagttttgttgtgaacctgaaactcaaaatatttaaagccaagtgaagctaacttactaagccatgaatcaagtttgtggaataaccccaaatagaggaaccattccaagtgttttcaaaacatagtaatttgggtgcatatttcaaggggctgcattctaaggataaaaagaactataaagaaaaaaattgtaatgttttaagtaattatgtagttagcagtaatgctggtatttggttactgttgagtatgtattgcaggaaaatgcaaatgaatatttatattgttgttattgaatattgggatgtttggcatgaaagaaaggagattcagctgtaaattgattaggttaagtaaacattgtagccctggatttatttaaaggtattaatttgaaccatatgaaattgctgtttctctagtcaaaaaccattgaatcttggcagcttaatagggttcagcataatgccagcatgacccattaatgtattttgtctcttagaaaattgtgtatttcctggttctgtccattgaaatgttctagaaacaagagccagtcctgtagcaatttgcatgcttcttggttcttggacccagatttgagtgaccagtgttacctggtgtgcccagacttcccagtttcagcacccgaatttcatatcccaggaaactcttcagtttcaggaaaaccaggatgattggccaccttcacccagattatggtacctaattatcatttcccatgaaaatgaactagggcctttgggacagttggctgattccatacctggggcatggaatgcattaaaataagccttgagtatcttattttaccacagaacaagaaagctatcaaaaagacttaacatgatggtacgaacaggactcaggagccactctgaagaggttccctctggccaaaaataagacaattggaacatcaataagaataacaacttcagtagattgaaacacatcagttgtgctcagttcatgcgttcataatgtactaaaaacaaatttaaaaactcactggtcatctctagagaatgcttgggagctaactcattattttgaaaaacgataaagaaagagaagaatcaaatgctgcttttcctatataaattgaacctcagagtaaccacattgttgatgaggggcagtttatctttatgtgaagattgtagttagtaaagaaggaatgatagactaaaccactttgcaaacccttgatgaacttatggctctagacaatgatcttcagtggcactgacatcatgaaaagaaaagcaaccaggcatcgtatgccacctaagggaagtatacaaacactacttggggagtattattgccaaggaatatctgaattttgctactaaagaagggaaaatgatgttcgggggcacctagcagtttctggccagggtcttctcaaatctgaccaataggtgactgcctatttgctccaacacacctgtgttcctaataaaaggaaagtgtgatcatatccttattctcatttattcattcattttctctctctcttcctcctctcccttcctttcccttcctttcccatatccatgtcacatttgttcttagtgacccctccccaatcctttagcagtgcattgtgtactctgattttggattttcaatagctggatagagtttaccttgtgaacataccacagttttttgtgaaaacaaggagctgctgtgaaaacaacttaggttgtttttgccttatggtatattaagtaaggctgcagtaaatatctttgtgcctttttgcggggagtagaagggcacatcattgatattttccccaggataacatcttagaaatggaattgcagagtcacaagatattaatagagataccaataacatctactcaataggttaatgacagtatataacagctgttcttaaatgcaactaccctatgagataagtatatttattagtctcgagtatagttaccctgtgagaaaatggaggcactgagaggttaaggcacttgcccaacattgtaatgacttagtgagactataggcacatgacttagtgcaatgtctagatgcttcatgataaatatttttaaggcttattatatacaactgccagaattgccctaccaaacacaatgccaagttctgcttccactggcagtatgagatggtcagaaacaaaccttctagtggaacacttgcttcttttattaaataacacagggtctggaatgtatcaagcttgtgcatataagtttgtttagaaatagtcgaatcttgttattcatattagttctacagagtcaagttaacagtgaaatagcaagtagtgaagtaatgttcctgggggaaatacaggggtaggttcctgtgagcctctagtcataagatttttgttaatgatctgtttataaccttgttttatgtgtgtctctgtttaaataaaccttaatatatagtgttgatttattgaccttgaactcatagccaacagcactgtaactcatgcctaagtgaagcttatctaatacacctattttctctgcaaggcacatcgcagccttcttgcacttaggaactcttgtcagcccttcaacactatactttgggaccacttaaaatagtgaaatcaccaacaaaaaagcacaaaaatgcaaaatcatggcactaaatagactgcaaataggacacttgttaacagtgtaagaacttgaaacaagaaggcagagctttacctttttccacctctgctgggaatctgcttattgggtgactcaaagttttcatcactgttcttatgtctgagaatgactgctttgggtattgatttgtggattacaaataaatttcagtaaataagcaaaccgcaaggtggaatctgcaaataatgaggatccattttgatcagttcaactagttgaatttcttttcttttcttttttataggtcattcaagacacagatatgcacttatacccataccattagcagtaattacaacatgtattgtgctgtatatgaatggtatgtatgctttttaaaacaaaatagtttgaaaacttgcattgttttccaaaggtcagaaaatagtttaaggatgaaaataaagtttgaaattttagacatttgaaaagaaacaaaaacttttttgctttacgtgtgtgggactgctgagcatgctaggttcctccaaagatccacattatctcaaggtagaatgaatccttaggccacagagagctttacaggcctgggaacacagcctggacctgttgcatagcctccttttacctgtgatctgcttcaaaatatagttaaacttctggtctccaagtcagagtttgctaaagacctctttaggctgccacctctgtaattttcatgtcatataacacgaatggggctcccaggtaggaagggagttttggttgagttaagtgacttacgtaatacaagtaattgtgcttgtattacttcctgagccttctcagtcccctagcaatcttgggcagtcatacagcttggagaactgatgacttggagaatttgttcccagcctgttcattcctggtaatgagtaatccctctcaaatcccaaaggacagggagcaggctgtaattctgaagagtggatattcttgatgccacagcagtttccataccagccttcaccaaaaggaaatatgccagacagggaatgccgaagagtaaactttctacaagtgatagtatctaggatccattgtgtcatgaatcaagtttataaactagatttcagtttccttagacctgcactgtttagtatagtagccaattagccacatatgattatttaaatatatcatttaaaatgaaataccattaaatttaagattcattcctcagttacactaaccacctttcaagtgctcaatacctacatctggctagtggctaccatactggatagcccagataaggaataatcctatcattgcagaaagttttcttggtcagtgcagaactagactattttgcgatatcagtgctaaatataatttcctgatgataacattttcatattataagttgtaaataccatgaaaatccatccctaagtaatagattatcagtcagttgactctccactaaacagtattataacgatcagctgaagaaagttttcagctattgcccaatgcataaaatattttgggagctcaaattttttaaaaatctattttaatccccaaatagcagtataatagttaatcatctcctgaacaggttggttcccagaaaccaaaatcattttccactcagtgttgttgtagatctcaattaaagaactaacccaggatacctgaactaaagagaggtggcactgagtttccatagaacttcaaaacaattggttgatttcacttaaaaaaaaaaaaaaaagtcattcaatatacagaaaattactcccctggtcagtactgttagccccagataatctgaaaaaatttgttcttaaaaaaaaaaaacaatttggaggccaggcatggtggctcatgcctgtaatcccagcacattgagaggtcgagttgtgtgcatcacttgagcccaggagtttgagaccagcctggacaacatggtgaaacactatctctacaaaaaaatacaaaaattagccaggcatggtggtgcatgcctgtagtcccagctactcaggaggctgaggcgggagggaggcagatgttgcagtgagctgagattgtgccactgcactccagcctgggtgatggagtgagaccctgtctcaaaaaacaaacaaacaaaaaaactcagcaagcatctcaacctttaagcaaccttaaagtcattaattgggaaatagtgagatgtttggcatggaatcttcagaagaggaaagagttgaatggaaacagctccagctgcctagttgtagttgacagacaactttataagctctagtcaaccctattgactaagcttctgaaccactagcatagttctagggtcaggcggatgcctactgtgggcaggaaagtgatgcatgcatgtgtgggagcagtgtcttaatgtctgaaatagtagccatgagctacatgtggctatggagcacttgaaatgtgggagtccaaattatcatgtgctgtgagtgtaaaataatatgtttctaagaccgtgtgtgaaagaatataaaatatctcattaaaaaatgtttatattgagtacatgttgaaataattttatatttgtgacacattgtgttaaataaaatattaaaatttacatttttttttactttgtaatgtggataccaaaaattttaaattacttatgtggcttgcattatatttctattggacagcactggtccaaactattctagccttccctgcatcttcagccttatgcacgaggtaaaattagccattttgtcaacagtttttgcatttggttttctatcatgttctgaccaatttttgaacaactctttggaccagctctgtagccgatttgatttaaagcatataggatagcaggaaatcccagggtgatggggctctggcttagttttccatatttaggcctctaataggcagtcagtaactccacatttcaccttttcttttcagttctttaattgagaagacaatttcttcatttttaggtattctgaaatgtgacagaaaaccagacagaaccaagtaagtacactgcaggctgtgcactctgtgccagaacaacagcagccctgctgtagatgcccattacttgggaagccagattgtactcatctgttggttgccttgtacagtaataagaagtaacatcagcagatatactaaccatagtgtattaagtaccaactgtgtgccatgcactgcactagccactctctgcatatcgtttcctggaaccctctcaatgagccttgcaggaggagtatcataccccttgcttagagacagcgcatatgagattcatagaagtcaagtgagatatcaaagtcacgttgctagtaagtgatgggctgggatttaaatctaggtctttggactccaagagttatactgttaaccactacaatacactccctccacctcccatcccagaaaaagttggatcagggatagggttcacttcaggagccagggtcagagctgggcctgtagtcacatataaaagataggacacaaacacaattagcagcagtgttggtttaataaaccgccgtagggtgctccaagaggccccctcctggcagatcccactggtggtcaggaggcagaggcatgagctgggtgttgagggatgaggggaagagttaaggcccagggtgtgaagggcaggacaagaagtagcaagccatcctctttggagcagagagtgttgaggcattagagaaagatggggctgggctggcaggttgggccaggctgagactttgagagaggctttgggtcattctttagggagaaccgcagagttttctagcagaactatgctttagtaagatcactctgctggcaaagcatgggactaattaataggagatgagatgaggacactggttagtggagtaatgaaataatccagccaagcagagaagagggcctgagtcaaggtgatggtggcagaactgaatatgcagagctaggtttgagagaaacagcagaggtcctgttagcaaaactttcatctggcagtgtaggctctgatgccaaactccctggttcaaatgccagctccatttctcacaggccttggacaagtcacttaaactctctgtgctttggttgtcttctgtggaaaatgggcataatgataatatagaaatgacaatgatagcatagataatcacatagaaataactgtgtcaaaatatattaatataagtacaatgcttacaatagtggctggctcataatagttttcaataaatgttagccattatgactattgttactattatttttcaagaaaaataaaagcgacaggaccaagtgtcacagaggagtcacacaggaatcttggttgggaaggaaaattatgaatttttgctttgacaggttgattttggggtgctggtgtattacctggctagtgatgtccatgcacagaattggagcgtgggcttcacgctagagttacggattggggcgcctcttcatctggacagtaattgatgccgtgagcacctgaggtcactaagaaagaaaagctagatgccctagggtgatgggaagaggcagaggaggcgggactggggaagcaaagtccaggatcagagccagggtagccccgggttagagactcgagggaggaggctacatgttaaagctgcagagacaaggaggtaggcgaggggttaagacctttggttttgtggagtcggttgctgtggtcagtgcagggatgaagtgagggtggctaagcagcagcaagggcctaggtgaggtgggatcgatggatgggccacaggtgtcctttctcctcagctgccaggtggaacagtgcaggagaaacaagctgtggcaggaggcctgggggcaaggaagtacaaggggcagctcagccggccacagacccaagctgggaggacccaaggccatgaggggttgatgggccaggaggctgggcagagaggagccaagtagctggagatgaggtgaggtgggagaggtagggacctccaggcttgtggtcagaggaaggcatttcagatctgagcaatatgcgtgagccccaggtgagtgtgagagccaagtcaggtctctgctgagatctaggtggttacagtggaggggaactctgagtggatgggggaggcatagccatcactaccaatgatgggggtaggggggcatcatccagggccacggggaaaggggatgggcattctggaactcatcccttcctctgttcctttcatcacaacaaacgttatggagattatgcgataccaggcactgtgctagctgatagggtgggggtcagagtacccagcgaggctagacattgtgtgggattcagagaaagcatataatagggctcctcccacaagaagcttgtggccacaccagggagagagaatggatgcacatgagcatacgaaactcttagaaggacttaggcaggaagcacaggtgataggcagaatgtgtgatatgagggtaagggctgagcaaccaacgcagaggaattggagaggccagaataatcagaaaagctttggagggggtaggatgtgacctacattttcagaacaagagtggagtagaaaaggcattccaggtgggataaacagcggaggcaaatacatgagagggaattaaatctgttgtgatttatttgatagtaagattgacctgcctggcatcgagttgaagtagaggcaaaagacactgaatatttgcaaggaggtccttagaatggagtgatatggaaataagcagccattataggttcttgagcaggaacattttgcatgaaaagcactgctttggaatgatgagtctagaaaggtaacactgacctctctaaggtggcattctagggagagacctgagtatttggggctgagattgagagaggagcttacttttcttggtatatttttatttactattcaagttctgcatcatgtgtgtttactgcctatttaataattatttttaaatttaaagaacccattgtggcagcagggggaattctctaagctcagttactaaagggttatgaagctgggtatggtagcacacacctgtagtctcagctacttgggaggctgaggtgcgaggatcgcttgagtttaggagttagtgggaggatttcttgagcccaggagttaagagaccagcctgggcatcaaaaaaattaagttaaattaaaatgttaaaaggttctgtatatggtggagatggaggagatcgggggaggagatgagaaaggggcaagcataagtaggaacaaatgcaatatttccccagctgcgcgagggcaggagcaggaagaactaaacccaattaggaacaacagaggacagatgagtagatagcagacatctgacgggaaatggccacgccacacttctcacccaggcagttcaacgtaggcaatttctgagtgccctggtattttttgtgtaagtgtctagaaaacagatcacaaagttagccaaattaaaaaggaagcagggagtcctatttctccgagaagaaagatttacaggtgggatctcaggcaggagccaagctggagaagcaggcttgattccttgtagtgggtgaggagactgctgggagagggcagggaagcagagaccggcaaaaagctgccccaacaagaatcctgtgcctgccaacctggtttacaaacatttcccactttatccccctcagaaagtcacagcacccatttcatgttctgtgaggctcccaaggagggaaacttctagtttgctgtcctttacctcacccctgtgaccacagcactaatttctcatgaattcttgttaccaatgagatacaaatgtttggggagctctggcctggtctgattttgagctctgtggaaatacgcagaccacgggggaggaggccgggaaatggactcggtttgagggcttgctcaaggatgcggttttgtttttcggctgatttactccaagacagccagagattgttctgtcgttgccacagaggtgactaaacaggaaggtaagtttgaggtaggaagaaaaccatccccaggagtttcatgtagcaaagaaggaagtagctgttacaaatgggtgacagtttacatgtgggtctaacagtctcagctctgttgttcaatctttcagttatactcagagagtaagcgggaggagccttggggctgctattgagtgcagcatcctgaaggctgttcttcaagtgttactcagactactatcccaagagcactcaaggcagttcttcctccatccctgctccctagctcccttggctttgatgagtttattacaaaagggctattcactttagaataggagggtaattaagactcctggtctgcagcccagatttactgcattttacaagttaataatatgatttttttttgtagctccaattgattggtaacagaagatgaagacaacagcataactaaattattttaaaaactaaaaagccatctgatttctcatttgagtattacaatttttgaacaactgttggaaatgtaacttgaagcagctgctttaagaagaaatacccactaacaaagaacaagcattagttttggctgtcatcaacttattatatgactaggtgcttgctttttttgtcagtaaattgtttttactgatgatgtagatacttttgtaaataaatgtaaatatgtacacaagtga

SEQ ID NO: 15511 - DNA, 52327 bp, Homo sapiens
gaacttagggctgcttgtggctgggcactcgcgcagaggccggcccgacgagccatggttgctgggagcgacgcggggcgggccctgggggtcctcagcgtggtctgcctgctgcactgctttggtgagtgaagcctgccccaggggccccgcgccggccggcgggtactgggcagcacccaggctgggtggacgcgccgggctcgaggcggttgccgatcagagacgggtggggacgggtcgctgtgggccgggaacaactcagccgtgggagccttttcaggaagagaaagttgttatttcatcgccagtgtccctcatggagtcagcaaggaactgtgtggccttagggaaggacgggctccggcccgctagcctctcctgcggggcctgcgcccccccgccggccccctcccgagctccagtgaccaagttccttcctgggcttccccagtaacgtcgctgagcgcttcagcggactgcaaaatttttcccagccgtgaacgcgcccgggacggggagcgggcgcggatgccacctgctcgagggcgacgcctgctgccctccccgcgcggtgccgtccccgcccgcgcggcgtccgccgtatcagcagagaggacttttcagaatcgccccacagcgaggagcgggtaggcaactaggaagcccagtcggcagcggcctcacgttgggattcctaagtggtgcgactcctgctcctttttcctcccctcaaatcctaaaaactagtatcagaactggttccatcctctccgtgtgttgtcagccaagtcgtcacaacaacctcaggaaataggtccccttcttcccattttgcctccccatcctccttcaccctccacacattggccccagtcaggccatagcaaaaccccgggagtacagcagtaacctcccagcgagttcaactgtacttgaggggttctcatggctggctcctgcaccccactgccagccctccagcccgtccgtccgtttgctcagcgtccgctgcctgcccgggaggtgcgcgtgtgcatctatggaagacagccaagggggaggggttgagatagactcaaaagtacccgcacgatcagataagtcagtgttgtaagaggcctgggctgggcgtggtggcttacacctgtcatcctagcactttgggaggctgaggcaggtggatcacttgaggccaggaatcggagaccagcagggccaacacggtgaaagatcggctctacaaaaaatacaaaaattagctgagcgtggtggcgcatacctatagtcccagctactcggaaggctgaggtgggagaatcacctgagtcccggaggcagaggatgcagtgagctgtgattgtgccactgaactccagcctgggtgacagaatatgacctgtctcaaaaaaaaaaaaaaaaaaaaaaggtgagctgtgagggtacagagggaagaagaaggcagtctcttttgtgaaatcaagtgtcttttgtgaagcagtcttcatgggagggaggatatttgagcccagccttcaaggactggtgatgtgtggacatgtgataatgtgggaaaagattgctgagtgtccccttagggagtctggattctctgagctgagagagcttctcctgggccttacaggatcaggaccatgcgcctgggaagaagaatctgttagcaacaaagaggaaggctgcagtcaggaggaattggaggcagggaggccagaaggccagggtggactaccatcacagggcccaaatagctctggggagttcatgtgcgggtggctggggaaaagaagagatacaaacagggattaattgaatggatggggtaactctcctccaggcaagctggtccctcattccctggcaccttgggtcactgctgcctgtacctgtgttctcccttccactgcaaacccagtttgcccaagctccacctccaacagattatttgaactgtcccttcctggtgatctctctcacctaattcatgtattcattcagaagtcatttgattcagcaaacatgtatttataaactgctctgcataggccttaaactaaagacaagactgaatgggtatatccccttttggggacccaagcctgcctcattagggaagctgcaaatgcagtgattaacagcatcagctctggggtcagatgcctagctttggatcctggccccactcctcacctgagtcatgaacttgtgtgagttccctaacttctcttcacttcagtaccttcacttttgaagagagtaccactcacatgagggaaaggagaataataaacccacttcatagaattactgggaacatcagtcatgcaataaatatttactgagtgtcaattatatgttaagcactgcacaatggacgggggatacagcaagctatgcacagttccctgcctttgtgaagctcaccttatagtgagggagagagacagtaagtaaatgagtaaaaacatggatgctggatggtgataaagtaaacatttactagtacagagatgagtaaagcaaagaaaggggtgatggaagtcgttaatacttcagtttagggttttttttgaaattttagaacaattaaaatctttaggacagttgcaaaattagtacagtgaacatttgcgtactttctccttgaatcaccagttaactgtcacattagttttctttgttatttttgccatctgttatttttgccaaaccatttgagagtttcagatctcatgacacctcacctgtaattctttatcatatgtctcataagaacaagagcattctccaacaagtcacagaatcatcataatctggaaatgtggcattgatacaatactgtttcctggtagagaacccagaagccagtcctgcaccacatacttcatttgataatcatgcctttttaaccccctttaacctaaaactgttgcttttttttttttttttttttggtactttaagacatcatcatttttgaagtgtctgggctagttgctttaccgaatgtccctttggatgtggattgcctgcttgtttcctcatgatcagattctggttgtaactctttgtagcaggaatacttcatagctatgttgggtccttctcagtgtgtcacatcaggaagatgtggtctgtttgtcacattattggagatgttaactttgacatttggttaaagtgaagtttaccagatttctccattgtagaggcaccattttacctttgtaagtaataaatgatgtgttaagtgatgttttgaggttgagtgaatatcctgttctccagccattgttcattcagtggttttagtatcctatggtgattcttcccagaatccattatcactaaaatattttattttattttttgagacagggtctcactgtgtcacccaggctggagtacaggggtgctatcacagctaactccagcctcgacctctgaggctcaagcaattctgccacctcagccttctgagtagccaggactacaggtgcatgccaccatgcttggctaatttttttttagtttttgtagaaacagggtttccctatgttgcccagactggtcttaaactcctgggctcaagtgatcctccctccttggcctaccgaagtgttgggattacaggcatgaaccaccacatccagccactaaaatattttcaaatggtaattttcttcccccacccttgtccctttcttctccctccctcccttccttccatccttcctctctcccctcccctccctccctcccctcccctccctttccctcccctccccctcccttcctgtcccttcccttcccttcccttcccttcccttctttccttctttgtttcattgccttttctcttttcttttgagacacagtctcactctgttgcccaggctagagtatagtgacacaattatggctcactgcagccttgatctcccagactcaagcgatcctcccacctcagtttccaaatagctgggactacagggacatgccttcacgtccacctaatttttttgtattttttatagagacggggttttgccatgttgcccaggctggtcttgaactcctgggctcaagcaatcctcccaagtcagtttcccaaagtgtcgggattataggcatgagccacccagcaattttctcttctgtttctctctatatatatatttattagtttacattgttcagtaatggatagcttttgcacacacatcctccctttttttcttttattttagaaggttatgtggactcatggattcttttttaaatatggcattcctgtcatccattttgatgctcggcaaccccacatttgacaagtgggaacaccttcaagcttcagagtccttttgctctgtttgttcctgtttgattttaaacacttccttactttctggcacagaaagatgttctggactcatcttgtagtgttcctgcctcagccttcgaatcattaggttccctggtttcttttagtgagagatggtatttagaaatcaagttctgggtgcaaagtgtgcccacaggtaccagagtcattgcttctcagccttgtcagttttcaaagttaagaaatagagtttttacaaagtcaggagttcaccctgatacttctaacactaataatcttgctgcttagttcttctgcctcttctgctcttccatatttgcatctccttactcccacagtgagaactctgttcttagtagcatcagtatattttcctaatctacattaaaccccaaatcattttacagttgctataccaatctactaccaactacaaacttactaaatacagttaaagatttctttacagttccttttatttttcattacagtctccaacttagcaatggttcgacttaagatttttcaactctacaatgagtttttcaagatataactccataataagaaatatctgtatatcccagtgaatatgcaatactatattcaaaagttacttggattctggccgggtgcagtgactcatgactgtaatcccagcactttgggaggccaaggcgggcggatcacaaggtcaggagattgagaccatcctggctaacgcagtgaaaccctgtctctactaaaacaaaaaattagctgggcatggtggcacacgcctgtaattccagctacctaggaggctgaggcaggagaatggcctgaaccaggaggcagagactgcagtgagccaagattacaacactgcactccagcctgggtgacggagtgagactctgtctcaaaaaaaaaaaacaaaaaaacaaaacaaaacaaaaaaaagttatttggattcttttttttttttctaactacccttcttaaacaaggtaacactctatgtatttttttgtatctcatttttgtcacttaaccatacatctggaaaatcattccctatcacttcatagagatccacctcattctttttcacagctgtacagtccctcatagggtggctatatggtagttcattcagctaccctctgctggttagtattacatagtgtggtcagggagggtctctttaatagggtgacaattgatcatacacttaaggaagtgagagataggccacaaggctatctgggggagtgatattccaggtctactactcaggaccctgagataggcttcaagcgtttaagaaacttcaaggataccattgtggtggagagtggtagaaaatgaagttataaaagtagtcagggttggatcctgtagataaagtttttagggccttttaaatattttggcctttttgctttcagtgactggaaagttttgaaggattttgaacaggagtgaaattatgatgacttggatgtttaaaagaattattctggctgctggatgaatagtctgtagaggagagaaaaggaagagcagggaggttggttaggctgcaggggcaatgcaggaaaggaatcactgggggtgggagatatctggatgtgttttgaaggtggagctggcaggatttggtgtgggcttgcattagtggaatgacatgtggatagggcctggatagtgctgggcaagtagcaagaactcaaaagtatgaacttggctgagagtggtggtgcatgcctgtaatcctagcactgagaggctgaggtgggcagatcttttgagcccaggagttcgagaccatcctaagcaacatgctgaaaccccatgatatggtttggctctgtgttcccacccaaatcttacgttgaattgtaataatccccatatgtcaagggcagggctaggtggagataattgaatcataagggcagtttcccccatactgttctcagatagtgaataagtctcacaatatttgatgattttataaatggggattcccctgcacaagctctctcttgcctactgccatgtaagatgtgccttacttctcctttgcattctgccatgattgtggggcctccctggccaggtggaactgtgagttcattgaacttctttcctttataaattacccagtcttgggtatgtctttattagcagcatgagaatggactaatatagtaaattggtactgggtagtggggcactgctgcaaagatacctgaaaatgtggaagcaactttggaactgggtaacaggcagggattggaatagtttggaagactcagaagaagacaggaagatgtgggaaagtttggaacttcctagagacttgttgaatggctttgaccaaatgctgctcatctcagatggagatgaggaacaattgttgggaactggaataaaggtgactcttaatatgttttagcaaagagactggcagcattttgcctgtgccctaaagatacgtggaactttgaacttgagagaaattatttagggcatctggtggaagaaatttctaagcagcaaagcattcaagaggtggcttggttgctgttaaaagcattcagttttatatgttcacaaagatgtggtttggaattggaacttatgtttaaaaggatagcagggcataaaagttcaaaaaatttgcagcccaatgatgcaatagaaaagaaaaaccccttttctgaggaaaaattcaagccagctgcagaaatttgcattaagtaatgaggagccaaatgttaatcacgaagacaatggggaaaatgtctccagggcatatcagaaaccttcatggcagcccctcctatcacaggcctggaggccttggagggaaaaattgtttcatgggctggacccagggcccccctgctctttgcagcctccaaacatggagccctgcatgccagctgttttagctccagccatggctaaaaggggccaacataccactcaggctgttgcttcagagggtaagccttggtggcttacatgtggtgttgggcctgtggatgcacagaagtcaagaattgaggtttgagaacctctgcctagatttcagaggatgtatggaaatgcctggatgtccaggcagaagtttgctgcaggagtgggaccctcatggagaacctctgctagggcagtgtggaagggaaatgtggagttggagcccccacacagagtccccactggggcaccgcctagtggagctgtgagaagagggccatcatccaccagaccccggaatggtagatccaccgagagcttgcaccgtgtacctggaaaagccacagacacttaatgccagctcatgaaagcagccaggaggatggctgtaccctgcaaagccacaggggaagagctgcccaaggttgtgggagcccatctcttgcgtcacctggatgtgaggcatggagtcaaaggagatcattttggaactttaaggtttaagactgccctattggatttaggacttgcatggggcctgtagcccttttgttttggacaatttctcccatttggaatggatatatttactcagcacctgtacccccattgtatctaggaagtaactaacttgcctttgattttacaggctcataggtggaaggtacttgccttatctccgatgagactttggatttagacttttggattaatgctggaataagttaagattttgagggactgttggaagggcattattgtgttttgaaatgtgaggacatgagatttgggaggggccggggtggaatgatatggtttggctgtgtccccacccaaatctcaccttgaattgtaataatccccgtgtgtcaagggcagggccaggtggagataattgaatcatgagggcagtttcctctatactgttcttgtgatagtgaataagtctcacaagatctgatggtttcataaaggggagttcccctgcacacgctctctcttgcctgccaccattaagacatgactttgcttctcctttgccttctgccatgattgtgaggtttccctggccatgtggaactgtgagtccattgagcctctttccttgataaattacccagtctcatgtatgtcattattagcagtgcgagaatggactaatacaccccatctctacaaaaagttagccaggtgtggtggtgcacgcctgtagtcccagctactcaggaggctgagatgagcctggcaattgcttgagtctgggaatttgaggctgcagtgagccatgatgacacaactgcattccagcctgggtaacagagcaaaaaaataaaaaataaaaaggtaggaactattttattattaacagagtctgtcttattctgctgttgttgacattttacagatcctttattgccaactatctgcataactagattttaagttccttgtatgcagaagtcatgtattattttttaaaattttccttatattgatctgtttttttttaatagtaaagattgttgaatctgaacattagatgacaatgtatttgtccagcatttctccatttgaaattatctcacattattatgtgagacttgttcatgtgctttgctggagttgagacttagacagtctgtgtttttttatttagcaaagataatccaagttaaaatagtgttgtgtgttcctataggaaaactaggcccagtgttataacagagtgtaagtaataatagccactaggaggtaagtacctgctctgtgccaggagctatgcttcagatttgagatgtttttatttaattgtcacactgattttattacatagggaacatttaataggagaacaaagcttaggtaggttcagtaatgtgtccaagttcacacagcaaataagtggcagagtgaacttgaactttgattctctctgaatcagaacctattcctttatatgctctgttgtatccctagcctgagatccactaagcaactttttgaagatgagtactactgatttcttatatccaacatgtatacattgtccaatgaaattctgctaaaacatgggaaatataggtcagcacaattaccagtcatgcaaaattgtatttaatatcataatttgtaatggtgaggggtgcttctttgggacatagaatttacaatggcaatttattgacatatttattattaacattattatatttacattctctaggtacccacatttcactcctagacacttttgcataatctcaataacatcataacatctataaatattaacactaatcctgtaacatcacctaacttttacccgtattcagatttccccacttgtcacaagagtgtcttttgttaaaaaacccggatctaatcaagtttcactcattgtattcgttgctatgtttttttgttttaattttgatgggcatctttcagaagttttaaaatagtcttagaacctctttttaagaaccagatttgaataatttattttattgacctccttgtcactctaacatttctttagtaaatacaggctttgagggtaggtattggtttctctgtttaaaagtagaaactttgcataaatcagcccttatatgtgtaagttttctgccttttggtttcttctcatgctgtttctgcacaagtgcctaagcttttttgaagctttacttgaggggtgaccagaaggttttacttaaggacacagacccttaaattctgcaatgacaaatctcaacttccatctcagggttgtaagtgaaaccaggatgcagccgtttctcttttctcagataagttcaggtttgaatataaagtgtgactataagatacagagactgtccctagaaaaggaggggaaaacattttagcagttcctctttggagataactttcagtgcctgcccatcagcctccaaggaaaatgctttttggttactttataggttctagtgaactttgcttactttacaatgttccccaaaatgtctgttgagattagtgcctgaatttccactgggctgaccagtctgtagtttcttgaacattttcttcctatgccagttaaaaattagaagaaaattgaagtttaacatacacattcagaaaaaaataaaaaatcagattaataagaaactaatgaggctgtgccattgtaaactacttgcaatagagtttcccaacgatgaactgagtatctagaaaataacaaggattctcaaggaattttagtgaaatgatcagtactgtattgaaataccttgaatcagactttggagaatagatttaaaaacactcacagccttaaccgatctagtaagaaccttattccctaaagcatactgtggatctcagctgtatcctatctaaggtgagaacagtcaaagacaaatgtggcctttgagaaaggtgggatgtgagtgtcttgaaacaacaggctaaagaagtgctctcaaatagaagtataatatggaacatgtgaaattaattttaataatatattttagttaacctaatatatccataatattttcatttcgacatgtattaggttggtgcaaaagttattgtggtttttgctatttttttttaatggcaaaaaccggcaattacttttgcactaacctagtagttactacaaaaaaatattaacaagagattttatgttccactttttaataccaggtcttcagattctggtgtgtatttgatactcagaacacatctccatttgaactaaccatatttcaggttctcactagccacttgtagctggtagctactttgatggattgcataggtctaaagggaaacatcttgagaaagaagaaataggttaagtgcaagaacaagaattaaaaaggaaactattttagcatcatattagaaggaaagtacagaaagaagttgatttagagaaccaacatcttaattcttgatgaacttatcgaggaggcagattgacagctgagagcaaggtccgggaaccttgctctggccttggggaccgagggtttgtaaccgttgggagacaggtggctgcagtttcagtatgaagtagatgagggcagggaaactggtggtggtgtggctgaaatcagtaaatctctgtcttaaggaaataagagaagtcactaactgggaccggctaagggtggaatcgatcaggaaaaaagaggaatggccccaaccaaggcatctgatgttctggccaacagtgcaggctctggggccgactgcctgtgtctggacaccagctctgccccttgctagctgagtgaatgcagtcagctgaccctctcagtccatttcttcatctgtagcctggtgcttcggaatctttgaccttctctatcaaccaagtgtccagcggagcaaaccaccttactttgataggcgtgttctcaagaaataactcctttctcactctcaccccagatgttcttaggctcgctcccctgcttttctggactctgctcagatgccaacttatgactgccccccatgccatccaactcctttccttaccagtactcctcagcccccacactctgctttatttttctctatagcacttaacatcatccaacatcatccaaataaaagatatttactttttcatttattatgttcttccctccactgaaaaatagactccaagagggctgggattttgtctgttttgttcattgctatatcctgcctgcttatttcagtgtctggcacataggcaggactccatgaacatttgatgaacaaataaatgaataataagaactacctcagagttgagttgaggattaaatgagttaatacacaaacagctcttggaacaagtgcttgtcacatagtaagcctgcagtgaatcttcgtgctgctgctactgttaaatattattactgaggctgagctggcctagggctccttggattggacttgctaagagctaggcaagagtcacaactgtatgaaacttgattgagttaaaacaaacagtgctactcctctttattatctccatgcctggtaagcacattttctacccccaaaattgggactgactaatatgagaatatttatggccttaataggacaggttatttgatacaattactagcctagacattttaggagattggccgctcctcaatactataaatgcatatatgggtgtgtagatagagatgttgcttcccagattgccacacatcctgatactgcaagtaggcatcaactgaaaatgtgccgtgatgtgaagaccaaacgcagagaagtgagagggacaaggctgtgctcagtgacccatatccagatgagaaatccatctgctcacttgggagcaaaaatgccccaagaccctgctatctctgggcttgcacgaggctttaaatgaatcaccattatgatgtcttatattcagagggaaataccaatattcatatattcaggtactgaaacttttaagggaatttttcttttttctttcttttttttttttttttggtcaaatgaacttttactttacctgctaaaatctgcaggcagtgtgagccttaaaatattttagagagagagagagaagtatcttaaaattacattgtttatttctaagaacaaactcaagaaaaccctttccttcaaatcccggaagagtgattagcttgtctctaaggtatggcattggctgggcatggtggctcatgcttgtaatctcagcacttcagaaggcccagggaggaggatcacttgagcccacgagtttgagatcagcctgagcaacatagtgagaccttgtttctacaaaaaatataaaaattagctgggcgtggtggcatgcaactgtagttctagctacttgggaggctgaggcagaaggatcacttgagcccaggaggttgaagctacagtgagccacgattgcaccactgcacaccaacctgggtgacagaatgagaccctgtctccaaaaagaaaaaggaaggaaggaaggaaggggagggaaggagggagagagagagggaaagaaagagaaaaataaaaagaaagaaaagaaagaaatgacatcagtgaacctcctcaaaccatagcgaggctgttaagtttgattggggctgacatccatgagtgggtacaagtttatctggtgtggtgccctgcatcctataacacttagttggtaaaatctacttaaacttgagagggaacatctcaaaagggacagctgtggagttgggaaggtggagcccgcaggtcctcccatcttgctttggtgatgaggcagaaagtggggctgaaaaactgagtctgttttggttgtatatgagggctcctgagccattttatttttaagctccagttaaacttctttctccatctctccttacgaagtcctccttcttcagccaggttccacagcaatttgggatttcacaaagcccagggtttggggtgactgtcaaattttgctattctgtcaggaagccttatcttttgaactacatttaagttgtattttaatcattttagttaattcattcaacagatatttattgaaagtccatatgccagacatatggggatacagccaaaaacaggaacacctttgtccttgtcctgatagggctagcctggctggggttacccctaagctcagatttgaattagttgccaactttcaagaacaggaattttcacacaaaatgtgaatatctggctttttttgaaaaattgggaacctggcaatggtgggcctctgtttccacatggcaggagctgaggcacagctcctgtttccacatggcaggcccctccctgtaggctcactggtgcgcaagtcctcaccagtcccttctgactcacacttggcccgctggtatctcctctgtgggtggaattgctggtcttcgtctaatgcgtcatttgccacagttctgtttctttgtgactcctttgtttgctcgttttctttttattgtttctggtctggctttttcttccttgactggagtcttgctctctgaggccctcttcagctctagcattcgatgatttggaaaccacagagcttagtgcctcacctgtaggtttggaggtgtgcttaactcagtttgactttctcatttgcaacatctgctgttccaatgctgtctatagattgtatcctgagaaaccctgcatcatgtcactatctttaagagccttatgccatgtagcaagctaaataagaaacaatggttaagagcactgattctgcagtcagattgtccaggttcaaatctggcttcattacttaacattgttgtgcctcagtttcctcacctgcaaaataataaggttagaaataaaaccttcttaatatgtttttaggattctgattttttttttttttttttttttttttctgagatggagtcttgctctgtcacccaggctggagtgcagtggcacagtcttggccactgcaacctccacctcccgggttcaagcgattctcctgcctcagcctcccatgtaactgggattacaggcgagtgccaccacgcccagctaattttgtatttttagtagagacggggtttcaccatgttggccaggctggtctggaactcctgacctcaagtgatccacctgccttggcctcccaaagtgctgggattacaggcatgagccactgctcccagtggtgagtacctatttatagagcccttgcaacagtgcctggcacagagccagggccatacaagtgttagattaagtaaaaaaaaaaagtaccagtcaatctgaatctcaggccctgagtaataatttgcagaggaatttgtgctgggggttgagagttccttttcattaacccatagttaacggtgaccagattttctaaataagaaatcaggatacttcatctataaaacttgggttccagttacaacttcaggccatacaaaaagaactattaaaattgaggtgttgatgttttgtagaaacactgcaacagaatatttgagatcagacctgtttttagatatgtgatcactctatacatgtagtgctgattaggtattaggtaccctcatatctttatttaaaaaaaattcaaaattcttcaaaacaaaaaaaccttcaaaaattatctggctagcatagaaaatctttttaggcgatcactgataaaattttttccctccctccatctctctttgcttttaaacagcaaaaactcaccccatgcccagttctcacccagttaattcagacagtgtgaataccttgatgttgacctaactcattaaaagaaaaagagagaaaacctttgaaagcctattccatgtcaaccagtgtaaaaagactctcaattttattcaaacctgaaaacaatcttttatggtgggcattatgatttctacttcacagctgaggagatctagtgtggggaggcctttgggagttcaccctgggccttgctggcttcaaaatctgggcactctctgttctgcactctggcatggttattagcgtccctacagtcccttttctgaccactcagtggtatcagcaaagcaacaaactcactgttgacaccattcctttgctcctatttgtgtattcattcattcattcattcattcgttcatccatggtttgtgacctttgagaaaaaactcactcccctttcttctattgttcttttgttcattagaaattatcttagcaacttactttagtgttggccttggaagtgcaacagaaaagactttactgtaggaaggaaataatagatatacccatgcacacaaagtagaggtagatattagttttagagacagttcttaacaactcctcctcttggttgaataattctatttaaaaaaaatttacatagttttaatattataatagtaataggatatttgtcttcaaaagtaacatatttttcaatgtgacctgtattaagtaataagtaataaattgaaatctcaccatcaccacaatctctaaagtaaccgtggttactttaaaaacaaccactgttaatcatttagggtgtctctttccagtctaaaaaaagagcaagtgagaatgcatgtacacatgtattcatgtctttttatagttaaaatatatatatattttttggtagagacagggtctcactacattgcccaggctggtatcaaactcctgggctcaagtgatccttccactttggcctaccaaagtgctagaattgtaggcatgagccaccacatctggcctctttattgtttttaaaaagaggaatattctgcatatatatttctataactttttatttttaatattaagaaattttccaaattcccaataataaaaggagaatatcctgtttccttttttaaaataaccacatagtaagccatggcataatactaaattgtttaactattagactagattattatttactagtatagataactttaaaatgaatatcattatgcatatctctttatgtaggttatactattgttttatttgttaacatcctgaataaatatcacccagatcccagtattcagtgaaactacaggttcttttagagcataagcaaaaataaattgtatgcatgtgtttttgtatgtgtgtttaattctgcttacatttgaattttcttccatctttttcctactatctgagtaatatcactagtgccttttattcagtcaagtctccacatgttgactcttgtcttggagttatgatgccatccccctcctggcctttcttctacttcccaggtctctctcagtctccttagccagtgttttcccctctagccaagctttaaagcacaggtccaagctgccttttcccacttcatacgctctcccaaggtgatggtcctaatggcctccattggagccactagaaatgtgatgactcccaaatctgtatcctttcctgtgagtcccagacctgtgtacttagcagctactgggcatctttgcttggatgtctcacagacccctcacactgaacagtgtcaaactgaaagcatgatgttccaggccagtcttagtcttcctgctgtgtttcctttcttagggaaagacaccacaacccacctaggaggaagtaagagctgtgattcatcctggccctcctggcacctcctctcctcctcctttaccccatatgctgtcaatcatctagttctcccagttttacctccctaatgtctcttgaaccactttgcctagcacaatgctgcctcttgaccagtctgaaattgctgtctgatggatctcttgctatctagtcttacccctcccatcagtcttccacaccatagccagaaaagataaacactttcattatgtaaaaatatagaaactttgtatggaagatattcatttagtaaattcaataggcaaaggctgtatttgaaaaaaaactataatacagataaaaatatataacatataaggagcctttaaactttgagaagaaaaaaacaaacaatctaatacaaaaaaagaggatgtgaaaagacatttctcagaaaaagaaatccaaatcaacaagcagaagagatgcttaaatttttaaaggttgggaaaatgcaaattcaagtatcaatgaaatgtcactatttgcccaaaaattaaacataaaaaaaaaattacctaatgctgtcaggagtccaaggaaagggcaactcaggcattactgatggagatgtaaattgccaaagtcttttttgtaaacaatgcagcaacttctattaaaataaaaaaaatctatttaccttttgatgtagcaactcccagctccactctactcccacataaatatgaaaccataaatacatcaggacatatgtacaggatagttattgcggtgtaactgcaatagacaaagctagccacaaaaggagtgttcatcagtggtggatggcagattaattatggttccctcatgctctggaatattatgtagttattaaaaagaataaagtatagctataccagttgatttcaaggagattttatgacatattaatggaaaggcgggatgtagagaagtgtgcataagaccatttttattaaagaatggtaaatccctcaggcacacctccttttattgcatttcactttattgcacttcacagataatgtgctttttacaaattgaaggttcgtgacaacccagctttaagcaagtccatcagtgcctaactttatgttttgtctctctgttacattttagtaattcccacaatatttaacgctttttcattatcatatctgttatggtgatctgtgatcagtgatctttgatgttactgttgtcattgttttgggatgccaagaaccatgcgtataagacggtgaacttaattgataaatgctatgtgtgttctgactgctccactgactggctgttctccccatctttctccttctcctggcctcccttgtcacctgagacaatgatactgaaattaggccaatttaataaccctgcaatggcttctaagtgctcaagtgaaaagaagagttgcactgtctctcactttaaattaaaaactagaaatgattaagcttagtgaggaaggcatgtgaaaagccatgacaggtggccgggcgtggtggctcacaactgtaatcccagcactttgggaggccaaggtgggtggatcacctgaggtcagaagtttgagaccaacctggccaacatggcgaaaccccgtctctactaaaaatacaaaaattagctgggtgtggtggtgggcacctgtaatcccagctggttgggaggctgaggcaggagaatcgcttgaacctgaaaggcagatgttgcagtgagccaagatggcactattgcactccagtctgggctacaagaatgaaactctgtctgaagaaaaaaaaaaaaaaagaaagaaagaaaaaaaaaaagccacgatgggctgaaaactaggccttttatgccaaagagttagtgaagttgtgaattcaaaggaaaagttcttgaaggaaattaaaagtgctacttcagtgaacacataaataagaaagtgaaacagcgttattgcagatggagaaagttcgagtagtctgcatagaagatcaagccagctacaacattcccttaatccaaagcctaatccagagcaagaccctaactctctttagttctgtgaaggctgagagaggtgagaaagctgcaggagaaaagtttgaagctatcagaggttagttcatgagatcttaggaagaaagccatctccataacataaaactgtgaagtaaagcagcaagtgttgatgtagaagctgcaagaaattatccagaagatctaagattactggtgcaggatacatgaaacaacagattttcaatgtagacaaaacaaccttctactggaagaagatgccatctaggacttccatagctagacaggagaagtcaacttcaggcttgaaaggacagctgactctcttgttgtgtgggctaatgcagctgatgactttaagttgaagccagtgctcatttaccactctgaaaatttttagggcccttaagaattaggctaaatctattctgcttgtgctctataaaatggaacaacaggctggatgacagcacatctgtttacagcatggtttactgaatattgtaagcccactgttaatacttactgcttagaaaaaaaagattcatttcagtatattattgcttgttgacaatgcacctaatcacccaagagctctgatggagatgtacaaggagatgagtgttgttttcatgcttgctaatacaacatccattctgcagcccatggatcaaggagtaattttgcctttgaagtcttattatgtaggaatacacttggtaaggctatagctgccatagataattattcttctgatgaatctgggcaaagtaaattgacaaccttctgaaaggattcagcattctagatgtcattaagaatatttgtggttcatgggagaagatcaaaatatcaacattaacaggagtttggaagaatttgattccaatcgtcaggtcaaaatatcaatattaacaggagtttggaagaatttgattccgatcctcatggatgactttgaagggtggaaatagcaagaaaaatagaagtggagcctgaatatgtcactcagttgccacaatctcatgatgaaaattgagccaatgaggagttgcttcttatggatgagcaaagaaagtggtttcttcagatggcatctatactcctggtgaagatgctgtgaacattgtttaaatgacaacaaagggttaagagtattacataaatttagttgataaagcagcagcaggatttgagaaaatttactctaattttgaaagcagttttactgtgagtaaaattctatcaaacagcattggatgcctctgagaaatattttgtgaaaggaagggtccattgatgcagcaaaactcatcattgtcttcttttaagaaattgccacagccattgcagcctttagcaaccaacaccctgatcagtcagcagccatcaacattgaggcaagacctttcaccagcaaaaatattaggacttgctgaaggctcaaatgattgttagcatgttttttttttcagcaataaagtattttttaattaaatatgtacattgtgtttttagacataatgctattgaacactttaatagactacagtatagtgtaaacataacatttatatgccctgggaaaccagaaaatttgtgtgacacactttactctgatatttacatgattgctgttgtctgggaccaaacccacggtatcttcaagctatacctgtgtgtatccattatatgtgatacatgtttgtatctatttgactatatgagagaaaaatattgaaagatgtattctgatttgttaatgtagattatagaactggagattgttatggggttaagagagtgggtaaggcacccagataagaggactgaaaaaatacttatatgatcgtttttcattagtgtaaagttgtatgtatgtgtctatgtataatttatgttttaaaatacattttttaaagaaagagttactcttattttgtccccatcctgtttgaaactcttctatggctttctttacttcaatactagaattgtgtttgtttgatgccttgcaagggctggctgtgcttgtgtatgcagctcggcttatgctacttttctcatgccattgctcctgcttcaaggtctgcataattgttctcttaatggggacctgccctgctctcctgggcatagttaactgctgcttgtgcctcagaacttcttttagggaagggaactgccttccctaaccccttgttagttccctaagtaaatgttcttattgacacctgatgcttttacttagcagcaattatcacagttgcagttgggcattgtctaattatttgtgtaaattctgcctcccctaatagaatgtcaactctaagaaggaagggacggtgtctgtcttgttctcaaggatcttatatagaatagatgcccaatgaatatttcctgagtgaatgaataaatgaatcccatcctgaatgtgggaccacgctgttctgaaagggcactgaccaaggagtcagacaatgtgtgttctggtcattgtgccgccataaacttgctgagagacatggagcaaggtgatatgcctcttggagcctgctttcctacctgtaaatggggttaataacacctactgcaggtagacatggagagggataaaaaggaatacaagacaatgtgaacatataaccagcagagagtaagcattcaataaaattgccttatatttttcttggtgtcttgtcacttcaccagtgaaatgggagtaatttgactaaataatttttagagtttcttctagttcaaaattatagttgacccttgaacaacatggcaattaggggcaccaaccccttgagcagtcaaaaatttatgtataactcttgactcccaaaaacttaactgctaatagcctaccagaagccttaccaataacataaacaacacatattttctatgttatatgcattgcatgttgtattcttacactaaattaagctagagaaaagaacttattaggaaaagcataaggtgtagaagaatgaaactggatcctcatctttcaccttatataaaaatcaactcaaggtggatcaaaaacttaaatctaagacctgaagccataaaaattctagaagataacatcagaaaaactcttctagactttggcttaggcaaaaggtcatgaccaagaacccaaaaacaaatgcaacaaaaacaaagataaatagatggggcttaaattaaaaagcttctgtacagcaatataaacaatcagcagagtaaacacacaacccacaaagtgggagaaaatattcacaaactatgtatctgacaaaggaccaatatccagaatctataaggaagtcaaacaaatcagcaagaaaaaagcaaacaatcccatcaaaaagtgggccaaggacatgaatagacagttctcaaaggaggatatacaaatggccaacaaacatatgaaaaaatgctcaacattactaattatcagggaaatgcaaattgaaaccacaatgcaataccaccttactcctgcaagaatggccgtaatttaaaaatcaaaaaataatagatgttggcatgggtgtggtgggaaaagggaacacctgtacactgctggtgggaatgtaaactagtacaaccactatggagatttcttaagcaactaaaagtagaactaccatttgatccagcaatcccattactgggtatctacccagaggaaaacaagtcattttatgaaaaagacaacacacaacatgttgcacacaacatctttatagtggcacaactcgcaattgcaaaaatatggaatcagcataaatgcccatcaatcaatgagtggataaagaaaatgtgggagatatatatatatatgaatatgccataaaaaggaacataataggccaggcgcggtggctcgtgtctgtaatcccagcactttgggaggccaaggcgggcagatcacgaggtcaggagatcgagaccatcctggctaacatggtgaaaccccgtctttactaaaaatacaaaaaaaaaattagccgggcatggtggtgggcgcctgtagtcccagctactcaggaggctgaggcaggagaatggcgtgagcctgggaggtggaacttttagtgagccgagatcacgccactgcactccagcctggggacagagcgagactctgtctcaaaagaaaaaaaaaaaaaaaagaacaaaataatggcattcacagcaacctggatggaactggagaccattattctaagtgaagtaactcaggaatggaaaaccaaacatatgttctaacttacaagtgggagctaagctatgtaagaatgatacagtgaactttggggacttgtggagaagggtgggatggggatgagggataaaagactacacactgggtacagtgtacaccagaatctcagaaatcacacccaaataactaaaaaaaaaaaaaaaacttatccatgtaaccaaacatcacctgttcccccaaaactattgagataatagtaataaaaaaatttaaaaaagaaaaaaaagcataaggaagaaaatatacttactaagtgaaagtggatcatcaaaggtcttcatcctcattatcttcacgttaaagcaggctaagtgggaggaggggttggtcttgctatctcagggatggcagaggcggaagaaaatccacatgtaagtggacccacacagctcaaacccatgttgttcaagggtcaactgtactttgatttcttctgagctgcagtctcccctttctctaccctcacttccctccaccactagctccattcctgactactttcttctactgttctcaagcccaggatacatcagctctccctgggaaagacaaaagacatcttcatgccgccagggtatggcagtttatctcatacctactctttcaccaccaccctgccctctatcactcattgtttcatttacatttataagacatttttgagtttccactattgtgtgtggtagactctcaccccttgaattctgtactttttcttgtgccttcccacatactctgttgagtggaggaaataatgcataatcggcaaagcaatggaaagatgctggtgtgtttttgagggcagttccccttaattaagggagatgggttctaaaaagtccttgtagataaacaaatgggtgatatttgcttcttatctgaaattactaacacagttgtctacaactggtcattcagtgttcttgatttcccctgtattatttcaattaccctaattgctactaggcaaaaacttcagtcaaattttaattgctctttaatgttaacttaaaatagctgcagttttttgtttgtttgttgagacaggtcatgctctgtcacccaggctggagtgcagtggcacaatcatggctgactgcaatctctgcctcatggcttcaagtaatcctcttcagcctcccaagtagctggggaccacaggtgtgtgccatgcccagctaattttttgtacttttcgtaaagatggggtttcgccattttacccaggttggtcttgaactcctgaactcaagcaatccaaccaccttggcctcccaaaatgctggacttacaggcatgaaccacaggacccagctgctgttctctcttaacaagagacaagtcctagagcaagatgcatttaaacccactttggggtatcaaaaatatcccaatcttgtggttctaataaatgtttaacaactaggttggtatggaggttctgatgtgaagcattagtcagtttctgtgctgttactagatgttccctaatagggctgggcagagatgctaacaattggctcatgagggcaggtggacctggctccaacccaccactgcacccaatccctgagttcttaatcttcatcacaccctcgacttgcttcccagccattgtttctgatctcagttaatgatgcctctcagtcagccaaggagacctgacagtcccatccacttcccccaccctcatcactgaatcctgttgacttctctctccagcatctcctgagtctgtccgcttgtctgtccccactacaaacaccctgctctggtctgtcctgtccatggacttcattgctacagcattgactttcattataatttccctgcctctgtgctggcccctgtcagccgctctctactctaaagacagtcagcctgctgacacttaaattatgttaggccagtcttgttaaaaacctttctgtggcttcctctccattaggatcagtccaaacccttagcgttccttactttagcacacataggctgtgggctggcctttgtctgtcttgttccccaccagccaccccttgccctcctcattctagctgttaggaatcacgtgtgtatcctcaagcacaccatgctctttctccattcagggccttcctttgggggtgctgcttcctatatatctgtatgatcatctcttcttccactccccacccactcacctacccagccctgcggcctaactgccttttatccttcagtgatttgcacgttatgtcagttccagcatgacttccttggggaggccctagaccaggcagctcccctcatgcagcccctgatgtagagcctgctccctgtcttctccacacgtgaggctcctggagggcctggaacaaccccatattcccagcccagcccgtactacctggcagatggttggtgctccatgaatgtcgggtccatttcttggatttatgcaggtcccagttttctattaaagagtaagctccacatggtcaaacatgttcttacttcctgtattttgtgtcagcagtttgtcagcttagcacaaaaagtacctgatgaataatttctgccaccaaagtcatgttgttttttctaaccaatttttttttctctcctaggtttcatcagctgtttttcccaacaaatatatggtgttgtgtatgggaatgtaactttccatgtaccaagcaatgtgcctttaaaagaggtcctatggaaaaaacaaaaggataaagttgcagaactggaaaattctgaattcagagctttctcatcttttaaaaatagggtttatttagacactgtgtcaggtagcctcactatctacaacttaacatcatcagatgaagatgagtatgaaatggaatcgccaaatattactgataccatgaagttctttctttatgtgcttggtgagtattccataagttgatttgtttaaaatggcaaatttccatttttttagtctgttttcagagactagcacaaattaatggtctatgagaaaagaattagatgttacctgttgtcagggttttctccttttctggtatagaggagctagctactttcaattcctttgtcattcctctgggtgaggagagaatctaaccaaggtggggagaacagtatcagttgtcttactaggaatgttttggaaagagatgtagtgacagcagttagcttagaactctttgggctccactgatagatgttactctataaagttcctgcttccccacacagcggggagattgtttttcctcctgcaccattttatttaattaatttatttattttgagaaggagtctcactctgttaccaaggccagagtgcagtggcacaatcttggctgactgcaacctctgcctcccaggttcaaagtgattttactgtctcagcctcccaagtagctgggactacaggcccgcaccaccatgcccagctaatttttgtattttagtagagatggtgtttcactgtgttggccaggctggtctcaaactcctgagctcaggtgatccacccgcctcagcctcccaaagtgctgggattacactcatgagccaccacacccagctcctgcaccattttaaactgaaactagagagaggggacacatttctccctgcttctcactgacactcctccctggtctctaaagccccttttgtgttgcagtcttgtataggcccctgcctcacatgccagtgtttcttggtcattttaaggcctgcctcattttcattgtttctgacattcctggtgtcttggtggttgcaatatttaaattaaaattctttcaatattgtccttgatcgcctctcctgtaaggatcttttcctctacgttacccactacccatggatgtaaccgagaactcatcattacctcaatgtcaggtgtctcactctgaccaccatgccctgtccttgatgatgctgatgctgacagtccttcacacacctgatgtccctgctgccctccctactcagcctgagtgctgttgtcactcactagactcagtccgttgcagacacacttagcttccttgctcctttgctggcttgtcatactcgcatggccagattacagctagattaagtccgctgctttgcctattctgtgctcacacccatgtggttgcagaaaaatacaccaccctacaaagtcctgcacttttaatttctctaatcacttacctcaattaagttggtatttcctagcctgttcacttacccactctcctagcagttactttttctctcctcaaatcttgaatacctccttctctagactgactcttcagctgaaggctttgcttcttatttcactaaggagaataagcaatcagagggcaatttccacaagctctcaccacctgcctaccttcctacccatacctgagcctgtaggccctgctttctctcctgatatgaatggactttctgagttctcacctgaagttaaactttccacgtgtgccctggatcccacctcctcttgccgtcctcgggaatatcaccctagtgcttctacccactctctcctgatgagaatttcccccataagttgatggttcattttaagtggcatacatatatactgtcattaaaactttctcatgatccctgtacccctccagccaccaccacctgctgtcttcactttatagaaaatctccttgaagaagttgtccatattcacttattctgatcccttatattcacttttaacccactccaaataggctttcatctgcactgctatgccaaaactcctctagacctccttgttaataaatccagtggttcattctcagtccatgtcattcttgacttctcagcagcttttgacatagctgatcactccctcctccaagtactgtcttcacttgacatccaggataccaccctattcatgtttctttctcttttttccttgagagggggtttcgcccttgttgcccaggctggaatgcaatggcgcgatctcagctcactgcaacctatgcctcccgggttcaagtgaatcttctgcctcagcctcctgaacagttgagattacaggcatgcaccaccatgcctggctaattttgtatttttagtagagatggggtttcaccatgttggtcaggctggtcttgaactcctgacctcaggtgatccacctgccttggcctcccaaagtgttgggattacaggtgtgagccactgtgcctggcttcacatttctttctaacacactgactattccttttcagcttcttttgctagtttccttgtttccccaacctcttaacactggaaacatcaaggcttaagccttaggtctctttccttttctgtctgcgttcatagccagtgggtgagctcatcccatgtcagggctttaaatatcatctcaatgctaataatgtacagatctagagctctagcccagagtaccccgccgagctccttatgtgtatacctgactgcccagtgtacctctccagtcagacatctaattggcctttcaaatatcacaagtccaaaagtaagctcattatcttccccttaaaacctgctgctcctccccaaatcttttcccttttggttaatggcagccccatcctttcagctggtcagtctgaaaccgggatgtcatccttgatacctctctttttcttgaataccacattcactctaccaggaagttgtattggttctaccagaatgatctttttaaaacagaagtcagatcatgtcactcatctgtgtggaactttctaatggccccatctaactctgttaaagctaaaatgtgtaaagcgacttgcaaggctatgtgaggtctgacccctgtggactctatttagacaaatacagcttgctaagatgtcaaagtatcctcttagaagatttccttgaaaaagtagaatctttgaaacatggacattggggatctgataatttatagatagggccaacaaacaagaggattgagtcagaatttagatcacacattttaagagccctttttatagagtttgtaaaactaattcaaaacatttgaataaatttctcctcttaaacttgatgaactgttttaaaataatttaaaatattctaggccgggcattgtggctcaaggctataatcccagcactttgtgaggctgaggagggagggttgcttaagcccagtagttcaagaccatcctaggcaacatagcaagactccatctctacaaaaataaaataattaaccaggcatggtggtgcatgcctgtagtcccagctactcaagaggctgaggtgggaggatcccttgagcccaggaggctgaggctgcagtgagccatgattgcacctctgcactccagtctgggtgacagaccaagaccctgcctcaaaataactagctaaataaattaattaaataaaatattctatggcacctcagcaaaggtatggttttgttagtcagaccaactggatagaccttaggaagcctgcagaggagtaaagtacaggggaggtgagttttgatcaggaggcagtgatattgatagtattgagtgtgggacttaaagtcctggtttgagagtctggacatcagcttgtagcagtggggagccattgtgtcctatactggagcaaggaagtgacttgataaaatacatttttggaagattaatgtgatggtgcatacttatgatggattaaagagaggagatgtcaagttagaagctactatcatccaggtagatagagggtccaagaaagagtctgcaagatgtaggttttggttgtaaaaagacataagatgactctaggtttcacatctgcatgataaaatgattggtcatactatttttttttttttttaagaaaagaggaagtcatacttccttgaggtaatgttaacacttgttttagtaacctggtaatcttctagagacaccagacctaataggagacttccagtgagcatattttggacagggggatttcctggcacttcctaaattcagggcatccacttccttctgtgtgtacattgagatctggctttcctccatacccaaaagtccccttaaaatttctacttctgaggtttattagtcctttcccatctttttatggaccttcatcacatctcagatgatgatttttatgtaagtagaattaactgccctgtccttaactgggctggattgatacttgacctttactaaaattcgtgaaaatatacacatatttctataaaatgtcatcagatatgtgtaagaaattctcattttttacacagcagtgaactcaattcattaattataaattgactaattgtcttagggaggaagtaggcacatttcttgccagtttaatgctgcttaaagtagaggtataacgaatatttgttagatacagctgtggtaagtcccacgggcagcaagaaaatatgaaagatttatagaaggaaaagatctgaggtgtagaaactgtgatctaggtgctgcagaaaggcttgcacacttttagatgagttggataggcacttctacctttgccatctggcaactgttgtgtaatgagatagccagaaagagcttctacctagtcaagggagttctagcaacttagaagataatactaacacttcttcatgtttcccctgaaattactttcatattctgttttttttcttttcttttcttttcttttcttttttacaaaccctgcatgtggcactcagtcatattctgtttgacctttacagtgacctgatacagcattccctttcacagatgaaaataagacagtttaggagtccgtttctctgtaagtagaacaagagacctggatggatgctttcttaaaactcttccagctcctaaaaggactgtggccccaggtcacacagcaggccaaggctaaggcttgatcaaacctcccaactcctactcagtgactcttctcatcatatcacataccctccggggagcctcggcttcctggagttggaaactcacagccaatggccgtgtgctctattacagctagcatttgttaagtacttactctgtgcaggcactacatgttaattcatatgttgattattatctgtgttaactcatttaatctcattacagtctgatagagtaagtactatttgtgtccttattgtagagaggaggaaacctagacacaaggtgatttaagtaacttgcccaatgtcaaatggctcttagtcatgaagctgggatatgcactcaggcagctgggcttctgagtccatgctaaacaccatactgtacctctttggagatagcgggtagaagaatttacattttatttgaagactgtctctctgaatctatccttctatccatctgtctccccatctgtcctgtactgcttgtgaggagccatctgtgtgccttgcattatgtcatgtgctgtggttgaaaggtgagtcatacctagtctttgccctccaaagatacacagtctctggggctgatgatgcacctctgttcagttcagaaagtgctggatgaaagactagacattggcagagctagatcaatacattagaatctgcaacagaacaaacaggccacatacatcagaagcacctgggatggtggggctcaggaatctgtatttttaacaagcacccttggtgattcttaggcaccttaaaatttgagaaatgcttcaaaggaccatttctaaggaggtagaaagcttggttttctgcccctgagaaatgcccagcctagttacagaggcaggcataagtatatgaaatactgagaacaggcatttttgaactattctggggatgcatgttccttggaagtcccctgagggctgctatggggtggggtgggcaaaagggaccagaggaagttaggagagcagggctctaggctttcaattttgagtcaactagagcaacttcttatccattggattggattgccactgaagatttaattctgagaaattccactgcttaaaagatgattaaaagtctttttaattaaagaaaatcttaaggaagtatgtaaggacttgtgtgagctagattaaacttaaaaactaggaagccccaagtagaaagggaagtcagtgtgtgactctggtttctaccaaggcaggctgggtactttatttaactgagcgagaaggaattcaggaggaggagaagatgggggaaccattaaatgcttttatttttcagattataattggagcataagcattaacttgtcttagaaaacatcattttaaatgacaacatagtattccattatcttggtgaacctaaatttacttaaatgctctttttagtagacgtttataatgtatcaatactttattatcccagtgctaccatgaccattgttgtatattacatatgtttttgcatgtttcctcaggcctcttatgattaattgctggagggtagctgagacgcaagaaggcatatgaattaacaaataaatgactcataggacaaagtaattagccttgaggcttttaaagggcaacaatggcagaatgtgacatgttagtgtcttaactcatccttgtaggtccatgctgccttagccaataggaggcacttcctagaagaagggtgggagtgaggcctctggacaggcaggtctgtgacacatgctgctccctgcactgcctattaacaggtccagcccaaccaataggcagggcccgacaaggctctgtgtagctccacctttcacaaaatgtattgagtcagatgtattatggactttcctttcacaaaatgctttgagtcagacgtgttatggaattaaaatttttttttacattttggaaaggtaatacaaagtatttcctctgcatattaagcaccccacttaattatggggagcaccctatgggtcaagcataggaacaagtatttacttcattcctatatatttaaagacaaggtctcagtctgatgcaatcatagcccactgtgtgtagtgagctagagtgcactggcacaattataactcactgtagcttcagattccttggttcaagcagttgcaagtagctgagactacaggcaggagccatcatggctggctaatctttaaactttttataaagacagggtcttgctatgttgcccaggctggtcttgaactcctggcctcaagccatcctcctgcctcagcctcccaaagtgctgggagtatagccatgagccactgtgtcctgccaagcacaggaatatttttgtggtgaaacgataatgaatatttgaagtgagtgagaaagactcaaatccttgtgttaattcaggtcaggtcaggatttgcagctaaacgattttgctaccaacttgcgaagactcttttggcttcagagattttttgatttaagaattgaggataagggatttggggcctgtattggtctgttttcacactgctataaagaactacctgaaactgggtaatttataaagaaaagaggtttaattgactcacagttccacatggctggggaggcctcgggaaacttacaatcatggcagaaggcgaaggagaagcaagcacttttttcacaaggcagcaggagagagagagaactgccacacacttttaaaccaacagatgtcatgagaactcactctctatcactagaatagcatggggaaaccatcccccatggtacaatcacctcccaccaggtccctctctcgacacatgggaattacaattcaagatgagatttgggtgaggacccagagccaaaccatatcagggtctgaatttattctgttaaatttgaacaggtagatctgacctagcaaaagaaagaattctcgctccttgatgctcaaggagtttgtctgctcatcctttcaagcttgtaaggaggttgcgagctcttcataaatttgcagatgataagtctaaatattactattttctgtactaaatattatacttttttttccagagtctcttccatctcccacactaacttgtgcattgactaatggaagcattgaagtccaatgcatgataccagagcattacaacagccatcgaggacttataatgtactcatgggattgtcctatggagcaatgtaaacgtaactcaaccagtatatattttaagatggaaaatgatcttccacaaaaaatacagtgtactcttagcaatccattatttaatacaacatcatcaatcattttgacaacctgtatcccaagcagcggtgagtaaataactaaatgtgtcatggaggctttcagaccacagatgtggtgactaacacaaggttcacaattttgaaatgtaaaacaagttacaattttttttttttttttttttttttttttgagacagagtctcgctctgtcgcccaggctggagtgcagtggcgcgatctcggctcactgcaagctccgcctcctgggttcacgccattctcctgcctcagcctcccgagtagctgggactacaggcgcccgccaccacgcccggctaattttttgtatttttagtagagacggggtttcaccgtgttagccaggatggtctcgatctcctgacctcgtgatccgcccgcctcggcctcccaaagtgctgggattacaggcgtgagccaccgcgcccggccaacaagttacaatttttaacagaaaccccattatagatacaaagctaacattatttagcactttctgtgttgagcaccattctaatacatatgttaattaattcaatcttcacatcaatcctcatacaacctataagttgtgtactagtacttatccctgtttcctggtgagaaaccaacagagagagagtttaagttgtttgctcaaggtaacagctagtaagtggcagaacctggctttgagtagaggctatctggctctagagcccatggttttaactattcacaatgctgctttataatattgttataatatcattatgttctgaaaggttacatatctactacaggaacatgcatttgatatgtttccttaggcctaacactaagttaatatcatgacaatctgtcttggctatgattttctaatgttgttttagtattatttacatttgtaatttttattatctgttttttacattatatccccagtttaacaaacaaaaaggtcagtgacttgaaagtggtttattaaaatataaaagagacgaaaatagtaaatactattattcagaataatataattgtaaatagtgaacaggattccagggcaaatagagaatatgagtctctagggctgggataaggtgagtctatgaatgaaatttttctgaacaagcagctgaaacagataagggaaattagcaaatacaagaaatatatgaaacttggattttaactggtgagccattctaagtctcccatttattgtcttttctgaaccctttcaaacaataacttaaagccattaaagttatattattttcagacaaagcagagtcacttttgggaaaggaaagacatttttcaagaaaaagtagacgtcctcgtcagggtgggcagcgccgccgcggcgggcctggggcttggggcctggagcggcccctcccagcacccggtgcgcccctgccctgccgcccactgccctgaaggtcaagtcgctttgttctgcgctgcgggcggcttcctcgccggcggcccagcggaggaggcgtagagggcggcgagtgggggctggcagctcaaatctcccgctagcccagccagccccgcgtacccggagggccgcggcgcacccggaggagcattcaggcttcccgtttttaaggtggagacgtccaggacctctttattagatgtttaggaatttgagtttttccgtagggcgatggtcatcgtgagcatctgtggggtcaggctgggctaactggggttttgattgtaagtttcgtgtggacgagggcatgtctgatggggaagaaagtccttggcattgcatctcagctgttgggagctgtgcggtgcgagccagatgggcggcgtgtgctccccgaggactggcctgagtgccttagcctagttactcacgggacttggtttaccagacaaggggataaaaacattcagatggcagataacagtttttcagatggggttccttcagatttcgtggaagctgctaaaaatgcaagtaagacggaaaagctcacggatcaggtgatgcagaatcctggagttttggcagctttacaggagcgacttgacaatgcccctcacaccccttccagctacatcgaaactttacctaaagcagtaaaaagaagaattaatgcattgaaacaaattcaggtgagatgcgctcatatagaagccaagttctatgaagaagttcatgacttggaaagaaaatatgcagcattataccagcctctctttgacgagagaagagaatttatcaccggtgatgttgaaccaacatctgatatggaatcagaatggcaccgtgaaaatgaagaggaggagaaattggctggagacaggaaaaataaagtagtcataacagaaaaagcagcagcaacagctgaagagccaaatcccaaaggaattccagagttctggtttaccatctttagaaatgtagatatgctaagtgaattagtccaggaatatgatgaaccaatcttgaaatacctgcaggatattaaagtgaagttttctgaccctggacagcctatgtctttcatattaagagttccactttcaacccaatgactgctttgccaactcagtcctgacaaaaacctgcaagatgaaatcagaaccagataaggctgatcccttttcatttgcaggtcctgagatcatggactgcgatgggtgtactattgactggaagaaaggaaagaatgttactgtcaaaaccatcaagaaaaagcagaagcgtaagggtccaggcactgttagaacaattaccaaacaagtatccaatgagtcatttttcaacttcttcaatccactgaaagcatctggggacggagaatcactggataaagattctgaattcgtattagcctctgattttgaaattggacactttttccgtgagcggaccacaggctgtgctgtacttcgctggggaggccttaaaggatgatgacaattttgacgaaggtgaagaagaagaggacgaattagaaggtgatgaggagggagaagatgaggatgaggtggaaattaatcccaacaaggaacccagccagccggcggaatgcaagcagcagtaggaagtggaggtgggcgcctggcagaccggctgtcgcgactccgggcctgtagcgggaggcctcagtctttgccgcatgcggcacaatcccgtcgacagcgcttactccatctaatcgttttcaagtgcatgattttcactttcacttttcctttttccttattattttgcttaatgtgtacagtggcaactgaaatgcatttcagaaataggaggttttgtccaataccctctgcagccttggtgcctgtagctctggacttgcctggacccttccctgcgggagggccccatagaccccattggggtggggtgggatggggtggggatcacttggctaaaagggccgaggtctggtgatgaggttccagggatctagaacctctcctaccactcctgcagttggactgaattctttcctttcatttgaagaaacccactcgctgttttcagctgcttaatctgctgagtgtgcagcctgcatcacctgctgtatgctaatcatctcagaagggccgtgtagagtagggccgtattctccttaggatgttgctttttgatcttcttttttaagggttgggtcagggttgtggcacaccagctcaggcgagagctgccacgggtcacctcatatttatttatcccttcttgcctgtgaggactgcggccttttgctgtcgctcgtccttgccatttctgaaccaccctggtgacctgagcaggaagatgtgccacttcctagcaggagcaagggctgtgcggaagaaacactgcttcctgccaccagggctgaagacgcgagcctgtcctcgtgacacaggcaccgccctgctgccggagttgggattcggcagtgttctccagtgaggggctgggctgggaagtcctgcgtttcatttgagcatatgagcgtcaagtcctgctttctcagtagtcccattgctgggccccaccattcatcctgtctgaaggtcctggttggtgtgaccggttggtggctggtgagtggggtttccaagtgggtgacagcgctctgtggcagccggggatggccttgtccgcgctgaccaggcctgtagagagtgctcagcctaaccttagaacacatttataactgaatacagtgttttcaatttgtacataatagttagaatattctattaaagttatgaaacacggagaaaaaaaagaaaaagtgcaaatgagtcccaatttataactgatagatttgatttttgaagacagagaaaagatcaaacccacagaggtgtcactcaaaggagcactgtttgtacaagtcacacaattgcaagaagtttttaaaacgagctgcaaagttaaaatagttaagcttggagcaaacattcctttattaattccaccttttgagtgttacataatacccaaggcatacgatatggaaatgcaatttgttgtaaaagcagatagttgctttataatgggaacaacaaaaaataaaaccagtgtgcttttgccttttggtatatgtgtgctgcatctaactgacaagggggaagaagatgaccacatatagacagagcaagcaagttgaaatcttgaaaagttttaagtgttccaagagacaaaatacttgaaggaaataatttctgagtaagatccctctatagaattacatggaatattttaggggatttttaaaggttttgcccttgcaaaactttatgtttaactttatgtttgccattagaatttgaagacacaaagtaaaattactcttactgaaagtaagattactttccctgtaaatagtctggtaaaagatcataagaggaatgatattcctcttattgatttgaaataagtactattaatttgaaaaaattcttttaattattaaataatggtgatttatccttcttttacattttcttccaaattgatagttcacatatatacaacagattttgaaagtttgaggaatgttgcttgataggtcttaggtttaaatcctggagtagtgttgacatctgagacatatgtctgggcttctgaccctggtttctgttaaccaaatattggaggaccttctccttttaaaatgcaaaccaggagctgaacttaatgatcttaatggttcttttgaacagtaacagtctaggatctttttttttctgagatgatttttgaatgcttttgtgtggaaccacatgcatcataatagatacaaatccatgaaagtataacagttaaatactagatcttactttttcaggttttgatttctcatctaaactttccaatgctttatcagtgaagcaaactaactcacattgactagcctgctctcctttagcaaacccttcaaataaatgcctcatttgctcctcaccactatcattttagattggccagacagttgttacttaccttttaagaatgaggagacaggtagccgggtgcggtggctcacacctgtaatcccaacactttgggaggctgaggcgggtggatcacgaggtcaggagatcaagaccatcctggctaacacggtgaaaccccgtctgtactaaaaatacaaaaaattagtcaggtgtgttggtgggcacctgtagtcccagctacttgggaggctgaggcaggagaatggcatgaacccgggaggcggagctggcagtgagctgagaccacaccactgcactccagcctgggtgacagagtgagattccgtctcaaaaaaaaaaaaaagaatgaggagacagggtcaaccaggtggggtgacttgcccagggtcacttaagtattggagatagaattaaaatttaggtctttgaattccagagtgtttttgtatgataccatcctgactctctatacgtttcaaaataaatcaaattttaaagttttctttgatttattcatatgaatgagctagagaaacccatactatatagatatacatagtagatattggtcaaatgtaacttaattttttacctcattatctcatgtttcttgtaacattttgtctagtaggacctttttgtggtttgtcatcattttagtcatgacatctactgtcataccgtcactgcaacccagaaatggggcgatggggttactaactagttaaacacaatctaaaggagaattttagagacagttaagattgaggacagagttcttgtccaactcgtattgtactgggggaatgaactaatacttactgaaggcctgctccacaacaaactcctgtaaatgatttacataaatgtgtcacatttaatccacacaacaacccagtggtgtgggtatttataaaggaggaatctgaggcacagtgaggttaaataacttgaccaaatatacacatttattaagagcaaagccaggatttgacatccaactccatctgaactcaaagcactgtgtcttccccactgtactgggaagtaaaagtaagaagatgactcagagatggagaattataatctggaatttggaatttacttccattggttaaccgtttgaaaattgcagctccaaggcattgggagatggaaagaaagctagtgagcaattatttcttgcctttgtgtcatgctcctacattttgctcctccttatctccttatctgcggtcagagtagatagcatggaggttttatgcccatgctacagatgttcagagatctcaaggtcagaaagctggtttatggcagcacgtgaatatagacagacttatacagattagaaaattgagaagttgagggcaggagaaaattctggatagaagagaacatgggattgggagcaagaaaacctaggtcctagacctgatttcattgcttactggcagtgtgaatgtgggggataataatacttactttacaagggctgaggaaattaaataaaatagcatgtgggaaagagtattgatggttagtcactataaaactgctagttgttattcaggatacaggaagagtttcaagagaggacatttggtataacattatatacagccaatggtttaaggaggacaatgtagaagaggttgtggatttggcacttaggaggtcattgttgacagaccttgtgaatagatgagggtaggaaccagattcctgggctttaagtaagaagaggggtagtccaataggccagttatatatttggctgtgaaagaggaaaataaaatctgagtacctttgagagtcaaaggctatttccaggtaaagaaacccagtgcacttcaccattctcttttagataactgctgggaagaagtaggatgattgtaacaccctccacattgacacagaactctaaatgggagcctagggaaagggcacattttttgaaggggtaggcaagaggatattctctagagtaccagtttccaactgttgtacacatttatggaccaagaacataaaagaaacattgttcagttccgacctgaagttatgtagaacaaacattgttctgagttcaactagatgatctttctttcatagctgtgtggacattatgttacctgcagggagtaagtcactgaaggtagagcctcaaaaaaacaccctttgatcttactcctaagaaaaaagagagaaattggaaaaattcatcatagaaacacaaaaatatgcggaaataggaaaaaggagaagaaggaaagaaatgcaacataggaaataatattatgtagactgagataaagaatgttaagaatatttgaacaaagtttgaaccagatgaaatgtaacaggcagaaacagaagtaggaggatttttggactgatttaagttggtctcttgtgacttttatgactttccactgggaagaatagtgattaagaatgttcactctgcttttaaaaattgagaaagaacgctgcgtgcagtggcttatgcctataatcccaacactttgtgaggccaagacgggaggattgcttgaggctgagagttcgagaccagcctgggcaacatagggagaccctatctctactaaaaattaaaaagttactgaggtgttgtggcatgtgtctgtagtcctagctacttgggagactgaggtgggaggatcacttcagcctggcagtttaaataaatcagatcagtaattaataatcttccaaaacagaaagcaccaggttcagatgggttcattggtgaattctaccagatatttaaggaagaaatactaattctctataatctcttttagaagatagaagcagagggcatactttccaattcattttatgaggccagcattattcttgtgctaaaaccaaagaacaatacaagaaaagaaaattaagacaaatatttctcatgaacatacatgtagaaaccttaaacaaaatattagcaaattggatccaacagcatatagaaagaattatacatcatgactaagtggtatttatctcaggtgtgcaaggcaggttcaacatatgaaaatcaattaatgtaatccatcacattgacagactatgaaagaaaaatcacatgatcataccaatagatacagaaaaagcatttgacaaaatccaacatcaatttatgataaaaactctcagtaaactaggaatagaggggaaactttttcaacttgttaacaaatgcctacaaaaaaccctgcagctaacatcatctgtaatggtgagaaacttgaagctttccaactaagaccaagaataaggaaataatgttcttctcaccactccttttcagtattgtactataagcactaactaatgccataagacaagaaaaggaaataaaagttatacagatgagaagaaagaaagaaaattgttttagttctcagatgacatgaatatctatgtatacaatccaaacgaattgaccaaaaacctcctggaactaataaaaaactatagcacatttgtaggatacaaagttaatatacaaaagtcaatcacttttctataacagcaatgaacaagtggaatttgaagtttaaaacacaacaccatttaccttagcaccccaaaaatgcaatacttaggtacaataacaaaatatgtcccagatttatatgagaaaatcaacaaaactgatgaacaaaatcaaagaagaactaaataaatggagagatattctatgttcatagataggaagactccttattgtgaagatgtcagttatttccaatttactctataaattcagtgcaatcccaagcaaaatatcagaagtcatttgtggatatcagcaaactgattttaaggttaaatgggcaggcaaaagaccagaatagccagcaaaatattgaaggagaacaaaattgtaggactgatactactcaacttcaagacttactataaagctacagtagtcaacatagtgtggtactggtggaaaaataaaagacaaatagatcagtgaatcggaatagagagcccagaaataaaccaacataaatatggtcaactgatctttgacaaaggagcaaaggcaatacaatggagcaaagatgatcttttcaacaaatagtgctgtaacaactggacatccacatgcaaaaaaatgaatctaaacacagaccttatgcccttcacaaaattttactcaaaatggaccatagatctaaatgtaaaatgcaaaaccataagactcctaaaacataagagaaaacctagataactttggatatgatgactttttagatacaacaccaaagacatgattcatgaaagaaagaattggtaagctgtacttcattaaaattaaaaacattgctctatgaaagacaatttcaagagaatgagaagccaagccacagactgggagaaaatatttgcaaaagacacatctgataaaagactgttatccaaaatatacaaaaaacttttaaaactcaacaagaaaaacacaaacaacccaattaaaaaatgagtcaaagatctcatcacacacttctccaaggaaggtatacagatggcaaatagggatataaaaagatactcctgggccgggtgcggtggctcacacctgtaatcccagcactttgggaggccgaggcaggcggatcacctgaggtcaggagttcaagaccagcctggccaacatggggaaaccccatttctactattttctattttgtaaaaatacaaaaattagctaggcatgtcctatgtcaacaggcaacagggaaatggaaactaagacaacaatgaaataccacttcacgcctatcacactggccaaaatctagaacactgacagcaccaaatgccagtgaggatgtggagcaactctcattcattgcaggtgggaatgcaaaatggtacagccactttggaagacagtttggcagtttcttacaaaactgtatgtactcttaccattcaacacaactgtcatgcttcttgctatttacccgaaggcattaaaaacttatgttgacataaaaaccttcacatggatggttatagcatctttattaataattgtcaaaacttggaagcaaccaagatgtccttcagtaagtgaatggacaaataaactgtggtacatacagacaatagaatattattcagcactgaaaagaactatcaagccatgaaaagacatggaggaaacttaaatgcatattataagtcaaagaatccaatctgaacaggctacatgctatgcaaattttacctatgtgacattctggaaaaggcaaaactgtggagactgtaaaaagattagtagttggcaggggatatgaataggtggaacacagaggagtttgggggcagtgaaaatactctgtatgatactgtaacgatgttattatacatttgtccaaacccacagaatgtacaactgaatgctaatgtaaagtgtggattttttaatgataatgatgtatcagaatggtttcattaattctaaaaaatgtaccactctggtgagggatattgataatggggaggctatgcatgtgtaggggcaggatgtatgtacaaactttctgtaacttctgctcagttttgttgtgaacctgaaactcaaaatatttaaagccaagtgaagctaacttactaagccatgaatcaagtttgtggaataaccccaaatagaggaaccattccaagtgttttcaaaacatagtaatttgggtgcatatttcaaggggctgcattctaaggataaaaagaactataaagaaaaaaattgtaatgttttaagtaattatgtagttagcagtaatgctggtatttggttactgttgagtatgtattgcaggaaaatgcaaatgaatatttatattgttgttattgaatattgggatgtttggcatgaaagaaaggagattcagctgtaaattgattaggttaagtaaacattgtagccctggatttatttaaaggtattaatttgaaccatatgaaattgctgtttctctagtcaaaaaccattgaatcttggcagcttaatagggttcagcataatgccagcatgacccattaatgtattttgtctcttagaaaattgtgtatttcctggttctgtccattgaaatgttctagaaacaagagccagtcctgtagcaatttgcatgcttcttggttcttggacccagatttgagtgaccagtgttacctggtgtgcccagacttcccagtttcagcacccgaatttcatatcccaggaaactcttcagtttcaggaaaaccaggatgattggccaccttcacccagattatggtacctaattatcatttcccatgaaaatgaactagggcctttgggacagttggctgattccatacctggggcatggaatgcattaaaataagccttgagtatcttattttaccacagaacaagaaagctatcaaaaagacttaacatgatggtacgaacaggactcaggagccactctgaagaggttccctctggccaaaaataagacaattggaacatcaataagaataacaacttcagtagattgaaacacatcagttgtgctcagttcatgcgttcataatgtactaaaaacaaatttaaaaactcactggtcatctctagagaatgcttgggagctaactcattattttgaaaaacgataaagaaagagaagaatcaaatgctgcttttcctatataaattgaacctcagagtaaccacattgttgatgaggggcagtttatctttatgtgaagattgtagttagtaaagaaggaatgatagactaaaccactttgcaaacccttgatgaacttatggctctagacaatgatcttcagtggcactgacatcatgaaaagaaaagcaaccaggcatcgtatgccacctaagggaagtatacaaacactacttggggagtattattgccaaggaatatctgaattttgctactaaagaagggaaaatgatgttcgggggcacctagcagtttctggccagggtcttctcaaatctgaccaataggtgactgcctatttgctccaacacacctgtgttcctaataaaaggaaagtgtgatcatatccttattctcatttattcattcattttctctctctcttcctcctctcccttcctttcccttcctttcccatatccatgtcacatttgttcttagtgacccctccccaatcctttagcagtgcattgtgtactctgattttggattttcaatagctggatagagtttaccttgtgaacataccacagttttttgtgaaaacaaggagctgctgtgaaaacaacttaggttgtttttgccttatggtatattaagtaaggctgcagtaaatatctttgtgcctttttgcggggagtagaagggcacatcattgatattttccccaggataacatcttagaaatggaattgcagagtcacaagatattaatagagataccaataacatctactcaataggttaatgacagtatataacagctgttcttaaatgcaactaccctatgagataagtatatttattagtctcgagtatagttaccctgtgagaaaatggaggcactgagaggttaaggcacttgcccaacattgtaatgacttagtgagactataggcacatgacttagtgcaatgtctagatgcttcatgataaatatttttaaggcttattatatacaactgccagaattgccctaccaaacacaatgccaagttctgcttccactggcagtatgagatggtcagaaacaaaccttctagtggaacacttgcttcttttattaaataacacagggtctggaatgtatcaagcttgtgcatataagtttgtttagaaatagtcgaatcttgttattcatattagttctacagagtcaagttaacagtgaaatagcaagtagtgaagtaatgttcctgggggaaatacaggggtaggttcctgtgagcctctagtcataagatttttgttaatgatctgtttataaccttgttttatgtgtgtctctgtttaaataaaccttaatatatagtgttgatttattgaccttgaactcatagccaacagcactgtaactcatgcctaagtgaagcttatctaatacacctattttctctgcaaggcacatcgcagccttcttgcacttaggaactcttgtcagcccttcaacactatactttgggaccacttaaaatagtgaaatcaccaacaaaaaagcacaaaaatgcaaaatcatggcactaaatagactgcaaataggacacttgttaacagtgtaagaacttgaaacaagaaggcagagctttacctttttccacctctgctgggaatctgcttattgggtgactcaaagttttcatcactgttcttatgtctgagaatgactgctttgggtattgatttgtggattacaaataaatttcagtaaataagcaaaccgcaaggtggaatctgcaaataatgaggatccattttgatcagttcaactagttgaatttcttttcttttcttttttataggtcattcaagacacagatatgcacttatacccataccattagcagtaattacaacatgtattgtgctgtatatgaatggtatgtatgctttttaaaacaaaatagtttgaaaacttgcattgttttccaaaggtcagaaaatagtttaaggatgaaaataaagtttgaaattttagacatttgaaaagaaacaaaaacttttttgctttacgtgtgtgggactgctgagcatgctaggttcctccaaagatccacattatctcaaggtagaatgaatccttaggccacagagagctttacaggcctgggaacacagcctggacctgttgcatagcctccttttacctgtgatctgcttcaaaatatagttaaacttctggtctccaagtcagagtttgctaaagacctctttaggctgccacctctgtaattttcatgtcatataacacgaatggggctcccaggtaggaagggagttttggttgagttaagtgacttacgtaatacaagtaattgtgcttgtattacttcctgagccttctcagtcccctagcaatcttgggcagtcatacagcttggagaactgatgacttggagaatttgttcccagcctgttcattcctggtaatgagtaatccctctcaaatcccaaaggacagggagcaggctgtaattctgaagagtggatattcttgatgccacagcagtttccataccagccttcaccaaaaggaaatatgccagacagggaatgccgaagagtaaactttctacaagtgatagtatctaggatccattgtgtcatgaatcaagtttataaactagatttcagtttccttagacctgcactgtttagtatagtagccaattagccacatatgattatttaaatatatcatttaaaatgaaataccattaaatttaagattcattcctcagttacactaaccacctttcaagtgctcaatacctacatctggctagtggctaccatactggatagcccagataaggaataatcctatcattgcagaaagttttcttggtcagtgcagaactagactattttgcgatatcagtgctaaatataatttcctgatgataacattttcatattataagttgtaaataccatgaaaatccatccctaagtaatagattatcagtcagttgactctccactaaacagtattataacgatcagctgaagaaagttttcagctattgcccaatgcataaaatattttgggagctcaaattttttaaaaatctattttaatccccaaatagcagtataatagttaatcatctcctgaacaggttggttcccagaaaccaaaatcattttccactcagtgttgttgtagatctcaattaaagaactaacccaggatacctgaactaaagagaggtggcactgagtttccatagaacttcaaaacaattggttgatttcacttaaaaaaaaaaaaaaaagtcattcaatatacagaaaattactcccctggtcagtactgttagccccagataatctgaaaaaatttgttcttaaaaaaaaaaaacaatttggaggccaggcatggtggctcatgcctgtaatcccagcacattgagaggtcgagttgtgtgcatcacttgagcccaggagtttgagaccagcctggacaacatggtgaaacactatctctacaaaaaaatacaaaaattagccaggcatggtggtgcatgcctgtagtcccagctactcaggaggctgaggcgggagggaggcagatgttgcagtgagctgagattgtgccactgcactccagcctgggtgatggagtgagaccctgtctcaaaaaacaaacaaacaaaaaaactcagcaagcatctcaacctttaagcaaccttaaagtcattaattgggaaatagtgagatgtttggcatggaatcttcagaagaggaaagagttgaatggaaacagctccagctgcctagttgtagttgacagacaactttataagctctagtcaaccctattgactaagcttctgaaccactagcatagttctagggtcaggcggatgcctactgtgggcaggaaagtgatgcatgcatgtgtgggagcagtgtcttaatgtctgaaatagtagccatgagctacatgtggctatggagcacttgaaatgtgggagtccaaattatcatgtgctgtgagtgtaaaataatatgtttctaagaccgtgtgtgaaagaatataaaatatctcattaaaaaatgtttatattgagtacatgttgaaataattttatatttgtgacacattgtgttaaataaaatattaaaatttacatttttttttactttgtaatgtggataccaaaaattttaaattacttatgtggcttgcattatatttctattggacagcactggtccaaactattctagccttccctgcatcttcagccttatgcacgaggtaaaattagccattttgtcaacagtttttgcatttggttttctatcatgttctgaccaatttttgaacaactctttggaccagctctgtagccgatttgatttaaagcatataggatagcaggaaatcccagggtgatggggctctggcttagttttccatatttaggcctctaataggcagtcagtaactccacatttcaccttttcttttcagttctttaattgagaagacaatttcttcatttttaggtattctgaaatgtgacagaaaaccagacagaaccaagtaagtacactgcaggctgtgcactctgtgccagaacaacagcagccctgctgtagatgcccattacttgggaagccagattgtactcatctgttggttgccttgtacagtaataagaagtaacatcagcagatatactaaccatagtgtattaagtaccaactgtgtgccatgcactgcactagccactctctgcatatcgtttcctggaaccctctcaatgagccttgcaggaggagtatcataccccttgcttagagacagcgcatatgagattcatagaagtcaagtgagatatcaaagtcacgttgctagtaagtgatgggctgggatttaaatctaggtctttggactccaagagttatactgttaaccactacaatacactccctccacctcccatcccagaaaaagttggatcagggatagggttcacttcaggagccagggtcagagctgggcctgtagtcacatataaaagataggacacaaacacaattagcagcagtgttggtttaataaaccgccgta

SEQ ID NO: 15512 - DNA, 56246 bp, Homo sapiens
gcccgacgagccatggttgctgggagcgacgcggggcgggccctgggggtcctcagcgtggtctgcctgctgcactgctttggtgagtgaagcctgccccaggggccccgcgccggccggcgggtactgggcagcacccaggctgggtggacgcgccgggctcgaggcggttgccgatcagagacgggtggggacgggtcgctgtgggccgggaacaactcagccgtgggagccttttcaggaagagaaagttgttatttcatcgccagtgtccctcatggagtcagcaaggaactgtgtggccttagggaaggacgggctccggcccgctagcctctcctgcggggcctgcgcccccccgccggccccctcccgagctccagtgaccaagttccttcctgggcttccccagtaacgtcgctgagcgcttcagcggactgcaaaatttttcccagccgtgaacgcgcccgggacggggagcgggcgcggatgccacctgctcgagggcgacgcctgctgccctccccgcgcggtgccgtccccgcccgcgcggcgtccgccgtatcagcagagaggacttttcagaatcgccccacagcgaggagcgggtaggcaactaggaagcccagtcggcagcggcctcacgttgggattcctaagtggtgcgactcctgctcctttttcctcccctcaaatcctaaaaactagtatcagaactggttccatcctctccgtgtgttgtcagccaagtcgtcacaacaacctcaggaaataggtccccttcttcccattttgcctccccatcctccttcaccctccacacattggccccagtcaggccatagcaaaaccccgggagtacagcagtaacctcccagcgagttcaactgtacttgaggggttctcatggctggctcctgcaccccactgccagccctccagcccgtccgtccgtttgctcagcgtccgctgcctgcccgggaggtgcgcgtgtgcatctatggaagacagccaagggggaggggttgagatagactcaaaagtacccgcacgatcagataagtcagtgttgtaagaggcctgggctgggcgtggtggcttacacctgtcatcctagcactttgggaggctgaggcaggtggatcacttgaggccaggaatcggagaccagcagggccaacacggtgaaagatcggctctacaaaaaatacaaaaattagctgagcgtggtggcgcatacctatagtcccagctactcggaaggctgaggtgggagaatcacctgagtcccggaggcagaggatgcagtgagctgtgattgtgccactgaactccagcctgggtgacagaatatgacctgtctcaaaaaaaaaaaaaaaaaaaaaaggtgagctgtgagggtacagagggaagaagaaggcagtctcttttgtgaaatcaagtgtcttttgtgaagcagtcttcatgggagggaggatatttgagcccagccttcaaggactggtgatgtgtggacatgtgataatgtgggaaaagattgctgagtgtccccttagggagtctggattctctgagctgagagagcttctcctgggccttacaggatcaggaccatgcgcctgggaagaagaatctgttagcaacaaagaggaaggctgcagtcaggaggaattggaggcagggaggccagaaggccagggtggactaccatcacagggcccaaatagctctggggagttcatgtgcgggtggctggggaaaagaagagatacaaacagggattaattgaatggatggggtaactctcctccaggcaagctggtccctcattccctggcaccttgggtcactgctgcctgtacctgtgttctcccttccactgcaaacccagtttgcccaagctccacctccaacagattatttgaactgtcccttcctggtgatctctctcacctaattcatgtattcattcagaagtcatttgattcagcaaacatgtatttataaactgctctgcataggccttaaactaaagacaagactgaatgggtatatccccttttggggacccaagcctgcctcattagggaagctgcaaatgcagtgattaacagcatcagctctggggtcagatgcctagctttggatcctggccccactcctcacctgagtcatgaacttgtgtgagttccctaacttctcttcacttcagtaccttcacttttgaagagagtaccactcacatgagggaaaggagaataataaacccacttcatagaattactgggaacatcagtcatgcaataaatatttactgagtgtcaattatatgttaagcactgcacaatggacgggggatacagcaagctatgcacagttccctgcctttgtgaagctcaccttatagtgagggagagagacagtaagtaaatgagtaaaaacatggatgctggatggtgataaagtaaacatttactagtacagagatgagtaaagcaaagaaaggggtgatggaagtcgttaatacttcagtttagggttttttttgaaattttagaacaattaaaatctttaggacagttgcaaaattagtacagtgaacatttgcgtactttctccttgaatcaccagttaactgtcacattagttttctttgttatttttgccatctgttatttttgccaaaccatttgagagtttcagatctcatgacacctcacctgtaattctttatcatatgtctcataagaacaagagcattctccaacaagtcacagaatcatcataatctggaaatgtggcattgatacaatactgtttcctggtagagaacccagaagccagtcctgcaccacatacttcatttgataatcatgcctttttaaccccctttaacctaaaactgttgcttttttttttttttttttttggtactttaagacatcatcatttttgaagtgtctgggctagttgctttaccgaatgtccctttggatgtggattgcctgcttgtttcctcatgatcagattctggttgtaactctttgtagcaggaatacttcatagctatgttgggtccttctcagtgtgtcacatcaggaagatgtggtctgtttgtcacattattggagatgttaactttgacatttggttaaagtgaagtttaccagatttctccattgtagaggcaccattttacctttgtaagtaataaatgatgtgttaagtgatgttttgaggttgagtgaatatcctgttctccagccattgttcattcagtggttttagtatcctatggtgattcttcccagaatccattatcactaaaatattttattttattttttgagacagggtctcactgtgtcacccaggctggagtacaggggtgctatcacagctaactccagcctcgacctctgaggctcaagcaattctgccacctcagccttctgagtagccaggactacaggtgcatgccaccatgcttggctaatttttttttagtttttgtagaaacagggtttccctatgttgcccagactggtcttaaactcctgggctcaagtgatcctccctccttggcctaccgaagtgttgggattacaggcatgaaccaccacatccagccactaaaatattttcaaatggtaattttcttcccccacccttgtccctttcttctccctccctcccttccttccatccttcctctctcccctcccctccctccctcccctcccctccctttccctcccctccccctcccttcctgtcccttcccttcccttcccttcccttcccttctttccttctttgtttcattgccttttctcttttcttttgagacacagtctcactctgttgcccaggctagagtatagtgacacaattatggctcactgcagccttgatctcccagactcaagcgatcctcccacctcagtttccaaatagctgggactacagggacatgccttcacgtccacctaatttttttgtattttttatagagacggggttttgccatgttgcccaggctggtcttgaactcctgggctcaagcaatcctcccaagtcagtttcccaaagtgtcgggattataggcatgagccacccagcaattttctcttctgtttctctctatatatatatttattagtttacattgttcagtaatggatagcttttgcacacacatcctccctttttttcttttattttagaaggttatgtggactcatggattcttttttaaatatggcattcctgtcatccattttgatgctcggcaaccccacatttgacaagtgggaacaccttcaagcttcagagtccttttgctctgtttgttcctgtttgattttaaacacttccttactttctggcacagaaagatgttctggactcatcttgtagtgttcctgcctcagccttcgaatcattaggttccctggtttcttttagtgagagatggtatttagaaatcaagttctgggtgcaaagtgtgcccacaggtaccagagtcattgcttctcagccttgtcagttttcaaagttaagaaatagagtttttacaaagtcaggagttcaccctgatacttctaacactaataatcttgctgcttagttcttctgcctcttctgctcttccatatttgcatctccttactcccacagtgagaactctgttcttagtagcatcagtatattttcctaatctacattaaaccccaaatcattttacagttgctataccaatctactaccaactacaaacttactaaatacagttaaagatttctttacagttccttttatttttcattacagtctccaacttagcaatggttcgacttaagatttttcaactctacaatgagtttttcaagatataactccataataagaaatatctgtatatcccagtgaatatgcaatactatattcaaaagttacttggattctggccgggtgcagtgactcatgactgtaatcccagcactttgggaggccaaggcgggcggatcacaaggtcaggagattgagaccatcctggctaacgcagtgaaaccctgtctctactaaaacaaaaaattagctgggcatggtggcacacgcctgtaattccagctacctaggaggctgaggcaggagaatggcctgaaccaggaggcagagactgcagtgagccaagattacaacactgcactccagcctgggtgacggagtgagactctgtctcaaaaaaaaaaaacaaaaaaacaaaacaaaacaaaaaaaagttatttggattcttttttttttttctaactacccttcttaaacaaggtaacactctatgtatttttttgtatctcatttttgtcacttaaccatacatctggaaaatcattccctatcacttcatagagatccacctcattctttttcacagctgtacagtccctcatagggtggctatatggtagttcattcagctaccctctgctggttagtattacatagtgtggtcagggagggtctctttaatagggtgacaattgatcatacacttaaggaagtgagagataggccacaaggctatctgggggagtgatattccaggtctactactcaggaccctgagataggcttcaagcgtttaagaaacttcaaggataccattgtggtggagagtggtagaaaatgaagttataaaagtagtcagggttggatcctgtagataaagtttttagggccttttaaatattttggcctttttgctttcagtgactggaaagttttgaaggattttgaacaggagtgaaattatgatgacttggatgtttaaaagaattattctggctgctggatgaatagtctgtagaggagagaaaaggaagagcagggaggttggttaggctgcaggggcaatgcaggaaaggaatcactgggggtgggagatatctggatgtgttttgaaggtggagctggcaggatttggtgtgggcttgcattagtggaatgacatgtggatagggcctggatagtgctgggcaagtagcaagaactcaaaagtatgaacttggctgagagtggtggtgcatgcctgtaatcctagcactgagaggctgaggtgggcagatcttttgagcccaggagttcgagaccatcctaagcaacatgctgaaaccccatgatatggtttggctctgtgttcccacccaaatcttacgttgaattgtaataatccccatatgtcaagggcagggctaggtggagataattgaatcataagggcagtttcccccatactgttctcagatagtgaataagtctcacaatatttgatgattttataaatggggattcccctgcacaagctctctcttgcctactgccatgtaagatgtgccttacttctcctttgcattctgccatgattgtggggcctccctggccaggtggaactgtgagttcattgaacttctttcctttataaattacccagtcttgggtatgtctttattagcagcatgagaatggactaatatagtaaattggtactgggtagtggggcactgctgcaaagatacctgaaaatgtggaagcaactttggaactgggtaacaggcagggattggaatagtttggaagactcagaagaagacaggaagatgtgggaaagtttggaacttcctagagacttgttgaatggctttgaccaaatgctgctcatctcagatggagatgaggaacaattgttgggaactggaataaaggtgactcttaatatgttttagcaaagagactggcagcattttgcctgtgccctaaagatacgtggaactttgaacttgagagaaattatttagggcatctggtggaagaaatttctaagcagcaaagcattcaagaggtggcttggttgctgttaaaagcattcagttttatatgttcacaaagatgtggtttggaattggaacttatgtttaaaaggatagcagggcataaaagttcaaaaaatttgcagcccaatgatgcaatagaaaagaaaaaccccttttctgaggaaaaattcaagccagctgcagaaatttgcattaagtaatgaggagccaaatgttaatcacgaagacaatggggaaaatgtctccagggcatatcagaaaccttcatggcagcccctcctatcacaggcctggaggccttggagggaaaaattgtttcatgggctggacccagggcccccctgctctttgcagcctccaaacatggagccctgcatgccagctgttttagctccagccatggctaaaaggggccaacataccactcaggctgttgcttcagagggtaagccttggtggcttacatgtggtgttgggcctgtggatgcacagaagtcaagaattgaggtttgagaacctctgcctagatttcagaggatgtatggaaatgcctggatgtccaggcagaagtttgctgcaggagtgggaccctcatggagaacctctgctagggcagtgtggaagggaaatgtggagttggagcccccacacagagtccccactggggcaccgcctagtggagctgtgagaagagggccatcatccaccagaccccggaatggtagatccaccgagagcttgcaccgtgtacctggaaaagccacagacacttaatgccagctcatgaaagcagccaggaggatggctgtaccctgcaaagccacaggggaagagctgcccaaggttgtgggagcccatctcttgcgtcacctggatgtgaggcatggagtcaaaggagatcattttggaactttaaggtttaagactgccctattggatttaggacttgcatggggcctgtagcccttttgttttggacaatttctcccatttggaatggatatatttactcagcacctgtacccccattgtatctaggaagtaactaacttgcctttgattttacaggctcataggtggaaggtacttgccttatctccgatgagactttggatttagacttttggattaatgctggaataagttaagattttgagggactgttggaagggcattattgtgttttgaaatgtgaggacatgagatttgggaggggccggggtggaatgatatggtttggctgtgtccccacccaaatctcaccttgaattgtaataatccccgtgtgtcaagggcagggccaggtggagataattgaatcatgagggcagtttcctctatactgttcttgtgatagtgaataagtctcacaagatctgatggtttcataaaggggagttcccctgcacacgctctctcttgcctgccaccattaagacatgactttgcttctcctttgccttctgccatgattgtgaggtttccctggccatgtggaactgtgagtccattgagcctctttccttgataaattacccagtctcatgtatgtcattattagcagtgcgagaatggactaatacaccccatctctacaaaaagttagccaggtgtggtggtgcacgcctgtagtcccagctactcaggaggctgagatgagcctggcaattgcttgagtctgggaatttgaggctgcagtgagccatgatgacacaactgcattccagcctgggtaacagagcaaaaaaataaaaaataaaaaggtaggaactattttattattaacagagtctgtcttattctgctgttgttgacattttacagatcctttattgccaactatctgcataactagattttaagttccttgtatgcagaagtcatgtattattttttaaaattttccttatattgatctgtttttttttaatagtaaagattgttgaatctgaacattagatgacaatgtatttgtccagcatttctccatttgaaattatctcacattattatgtgagacttgttcatgtgctttgctggagttgagacttagacagtctgtgtttttttatttagcaaagataatccaagttaaaatagtgttgtgtgttcctataggaaaactaggcccagtgttataacagagtgtaagtaataatagccactaggaggtaagtacctgctctgtgccaggagctatgcttcagatttgagatgtttttatttaattgtcacactgattttattacatagggaacatttaataggagaacaaagcttaggtaggttcagtaatgtgtccaagttcacacagcaaataagtggcagagtgaacttgaactttgattctctctgaatcagaacctattcctttatatgctctgttgtatccctagcctgagatccactaagcaactttttgaagatgagtactactgatttcttatatccaacatgtatacattgtccaatgaaattctgctaaaacatgggaaatataggtcagcacaattaccagtcatgcaaaattgtatttaatatcataatttgtaatggtgaggggtgcttctttgggacatagaatttacaatggcaatttattgacatatttattattaacattattatatttacattctctaggtacccacatttcactcctagacacttttgcataatctcaataacatcataacatctataaatattaacactaatcctgtaacatcacctaacttttacccgtattcagatttccccacttgtcacaagagtgtcttttgttaaaaaacccggatctaatcaagtttcactcattgtattcgttgctatgtttttttgttttaattttgatgggcatctttcagaagttttaaaatagtcttagaacctctttttaagaaccagatttgaataatttattttattgacctccttgtcactctaacatttctttagtaaatacaggctttgagggtaggtattggtttctctgtttaaaagtagaaactttgcataaatcagcccttatatgtgtaagttttctgccttttggtttcttctcatgctgtttctgcacaagtgcctaagcttttttgaagctttacttgaggggtgaccagaaggttttacttaaggacacagacccttaaattctgcaatgacaaatctcaacttccatctcagggttgtaagtgaaaccaggatgcagccgtttctcttttctcagataagttcaggtttgaatataaagtgtgactataagatacagagactgtccctagaaaaggaggggaaaacattttagcagttcctctttggagataactttcagtgcctgcccatcagcctccaaggaaaatgctttttggttactttataggttctagtgaactttgcttactttacaatgttccccaaaatgtctgttgagattagtgcctgaatttccactgggctgaccagtctgtagtttcttgaacattttcttcctatgccagttaaaaattagaagaaaattgaagtttaacatacacattcagaaaaaaataaaaaatcagattaataagaaactaatgaggctgtgccattgtaaactacttgcaatagagtttcccaacgatgaactgagtatctagaaaataacaaggattctcaaggaattttagtgaaatgatcagtactgtattgaaataccttgaatcagactttggagaatagatttaaaaacactcacagccttaaccgatctagtaagaaccttattccctaaagcatactgtggatctcagctgtatcctatctaaggtgagaacagtcaaagacaaatgtggcctttgagaaaggtgggatgtgagtgtcttgaaacaacaggctaaagaagtgctctcaaatagaagtataatatggaacatgtgaaattaattttaataatatattttagttaacctaatatatccataatattttcatttcgacatgtattaggttggtgcaaaagttattgtggtttttgctatttttttttaatggcaaaaaccggcaattacttttgcactaacctagtagttactacaaaaaaatattaacaagagattttatgttccactttttaataccaggtcttcagattctggtgtgtatttgatactcagaacacatctccatttgaactaaccatatttcaggttctcactagccacttgtagctggtagctactttgatggattgcataggtctaaagggaaacatcttgagaaagaagaaataggttaagtgcaagaacaagaattaaaaaggaaactattttagcatcatattagaaggaaagtacagaaagaagttgatttagagaaccaacatcttaattcttgatgaacttatcgaggaggcagattgacagctgagagcaaggtccgggaaccttgctctggccttggggaccgagggtttgtaaccgttgggagacaggtggctgcagtttcagtatgaagtagatgagggcagggaaactggtggtggtgtggctgaaatcagtaaatctctgtcttaaggaaataagagaagtcactaactgggaccggctaagggtggaatcgatcaggaaaaaagaggaatggccccaaccaaggcatctgatgttctggccaacagtgcaggctctggggccgactgcctgtgtctggacaccagctctgccccttgctagctgagtgaatgcagtcagctgaccctctcagtccatttcttcatctgtagcctggtgcttcggaatctttgaccttctctatcaaccaagtgtccagcggagcaaaccaccttactttgataggcgtgttctcaagaaataactcctttctcactctcaccccagatgttcttaggctcgctcccctgcttttctggactctgctcagatgccaacttatgactgccccccatgccatccaactcctttccttaccagtactcctcagcccccacactctgctttatttttctctatagcacttaacatcatccaacatcatccaaataaaagatatttactttttcatttattatgttcttccctccactgaaaaatagactccaagagggctgggattttgtctgttttgttcattgctatatcctgcctgcttatttcagtgtctggcacataggcaggactccatgaacatttgatgaacaaataaatgaataataagaactacctcagagttgagttgaggattaaatgagttaatacacaaacagctcttggaacaagtgcttgtcacatagtaagcctgcagtgaatcttcgtgctgctgctactgttaaatattattactgaggctgagctggcctagggctccttggattggacttgctaagagctaggcaagagtcacaactgtatgaaacttgattgagttaaaacaaacagtgctactcctctttattatctccatgcctggtaagcacattttctacccccaaaattgggactgactaatatgagaatatttatggccttaataggacaggttatttgatacaattactagcctagacattttaggagattggccgctcctcaatactataaatgcatatatgggtgtgtagatagagatgttgcttcccagattgccacacatcctgatactgcaagtaggcatcaactgaaaatgtgccgtgatgtgaagaccaaacgcagagaagtgagagggacaaggctgtgctcagtgacccatatccagatgagaaatccatctgctcacttgggagcaaaaatgccccaagaccctgctatctctgggcttgcacgaggctttaaatgaatcaccattatgatgtcttatattcagagggaaataccaatattcatatattcaggtactgaaacttttaagggaatttttcttttttctttcttttttttttttttttggtcaaatgaacttttactttacctgctaaaatctgcaggcagtgtgagccttaaaatattttagagagagagagagaagtatcttaaaattacattgtttatttctaagaacaaactcaagaaaaccctttccttcaaatcccggaagagtgattagcttgtctctaaggtatggcattggctgggcatggtggctcatgcttgtaatctcagcacttcagaaggcccagggaggaggatcacttgagcccacgagtttgagatcagcctgagcaacatagtgagaccttgtttctacaaaaaatataaaaattagctgggcgtggtggcatgcaactgtagttctagctacttgggaggctgaggcagaaggatcacttgagcccaggaggttgaagctacagtgagccacgattgcaccactgcacaccaacctgggtgacagaatgagaccctgtctccaaaaagaaaaaggaaggaaggaaggaaggggagggaaggagggagagagagagggaaagaaagagaaaaataaaaagaaagaaaagaaagaaatgacatcagtgaacctcctcaaaccatagcgaggctgttaagtttgattggggctgacatccatgagtgggtacaagtttatctggtgtggtgccctgcatcctataacacttagttggtaaaatctacttaaacttgagagggaacatctcaaaagggacagctgtggagttgggaaggtggagcccgcaggtcctcccatcttgctttggtgatgaggcagaaagtggggctgaaaaactgagtctgttttggttgtatatgagggctcctgagccattttatttttaagctccagttaaacttctttctccatctctccttacgaagtcctccttcttcagccaggttccacagcaatttgggatttcacaaagcccagggtttggggtgactgtcaaattttgctattctgtcaggaagccttatcttttgaactacatttaagttgtattttaatcattttagttaattcattcaacagatatttattgaaagtccatatgccagacatatggggatacagccaaaaacaggaacacctttgtccttgtcctgatagggctagcctggctggggttacccctaagctcagatttgaattagttgccaactttcaagaacaggaattttcacacaaaatgtgaatatctggctttttttgaaaaattgggaacctggcaatggtgggcctctgtttccacatggcaggagctgaggcacagctcctgtttccacatggcaggcccctccctgtaggctcactggtgcgcaagtcctcaccagtcccttctgactcacacttggcccgctggtatctcctctgtgggtggaattgctggtcttcgtctaatgcgtcatttgccacagttctgtttctttgtgactcctttgtttgctcgttttctttttattgtttctggtctggctttttcttccttgactggagtcttgctctctgaggccctcttcagctctagcattcgatgatttggaaaccacagagcttagtgcctcacctgtaggtttggaggtgtgcttaactcagtttgactttctcatttgcaacatctgctgttccaatgctgtctatagattgtatcctgagaaaccctgcatcatgtcactatctttaagagccttatgccatgtagcaagctaaataagaaacaatggttaagagcactgattctgcagtcagattgtccaggttcaaatctggcttcattacttaacattgttgtgcctcagtttcctcacctgcaaaataataaggttagaaataaaaccttcttaatatgtttttaggattctgattttttttttttttttttttttttttctgagatggagtcttgctctgtcacccaggctggagtgcagtggcacagtcttggccactgcaacctccacctcccgggttcaagcgattctcctgcctcagcctcccatgtaactgggattacaggcgagtgccaccacgcccagctaattttgtatttttagtagagacggggtttcaccatgttggccaggctggtctggaactcctgacctcaagtgatccacctgccttggcctcccaaagtgctgggattacaggcatgagccactgctcccagtggtgagtacctatttatagagcccttgcaacagtgcctggcacagagccagggccatacaagtgttagattaagtaaaaaaaaaaagtaccagtcaatctgaatctcaggccctgagtaataatttgcagaggaatttgtgctgggggttgagagttccttttcattaacccatagttaacggtgaccagattttctaaataagaaatcaggatacttcatctataaaacttgggttccagttacaacttcaggccatacaaaaagaactattaaaattgaggtgttgatgttttgtagaaacactgcaacagaatatttgagatcagacctgtttttagatatgtgatcactctatacatgtagtgctgattaggtattaggtaccctcatatctttatttaaaaaaaattcaaaattcttcaaaacaaaaaaaccttcaaaaattatctggctagcatagaaaatctttttaggcgatcactgataaaattttttccctccctccatctctctttgcttttaaacagcaaaaactcaccccatgcccagttctcacccagttaattcagacagtgtgaataccttgatgttgacctaactcattaaaagaaaaagagagaaaacctttgaaagcctattccatgtcaaccagtgtaaaaagactctcaattttattcaaacctgaaaacaatcttttatggtgggcattatgatttctacttcacagctgaggagatctagtgtggggaggcctttgggagttcaccctgggccttgctggcttcaaaatctgggcactctctgttctgcactctggcatggttattagcgtccctacagtcccttttctgaccactcagtggtatcagcaaagcaacaaactcactgttgacaccattcctttgctcctatttgtgtattcattcattcattcattcattcgttcatccatggtttgtgacctttgagaaaaaactcactcccctttcttctattgttcttttgttcattagaaattatcttagcaacttactttagtgttggccttggaagtgcaacagaaaagactttactgtaggaaggaaataatagatatacccatgcacacaaagtagaggtagatattagttttagagacagttcttaacaactcctcctcttggttgaataattctatttaaaaaaaatttacatagttttaatattataatagtaataggatatttgtcttcaaaagtaacatatttttcaatgtgacctgtattaagtaataagtaataaattgaaatctcaccatcaccacaatctctaaagtaaccgtggttactttaaaaacaaccactgttaatcatttagggtgtctctttccagtctaaaaaaagagcaagtgagaatgcatgtacacatgtattcatgtctttttatagttaaaatatatatatattttttggtagagacagggtctcactacattgcccaggctggtatcaaactcctgggctcaagtgatccttccactttggcctaccaaagtgctagaattgtaggcatgagccaccacatctggcctctttattgtttttaaaaagaggaatattctgcatatatatttctataactttttatttttaatattaagaaattttccaaattcccaataataaaaggagaatatcctgtttccttttttaaaataaccacatagtaagccatggcataatactaaattgtttaactattagactagattattatttactagtatagataactttaaaatgaatatcattatgcatatctctttatgtaggttatactattgttttatttgttaacatcctgaataaatatcacccagatcccagtattcagtgaaactacaggttcttttagagcataagcaaaaataaattgtatgcatgtgtttttgtatgtgtgtttaattctgcttacatttgaattttcttccatctttttcctactatctgagtaatatcactagtgccttttattcagtcaagtctccacatgttgactcttgtcttggagttatgatgccatccccctcctggcctttcttctacttcccaggtctctctcagtctccttagccagtgttttcccctctagccaagctttaaagcacaggtccaagctgccttttcccacttcatacgctctcccaaggtgatggtcctaatggcctccattggagccactagaaatgtgatgactcccaaatctgtatcctttcctgtgagtcccagacctgtgtacttagcagctactgggcatctttgcttggatgtctcacagacccctcacactgaacagtgtcaaactgaaagcatgatgttccaggccagtcttagtcttcctgctgtgtttcctttcttagggaaagacaccacaacccacctaggaggaagtaagagctgtgattcatcctggccctcctggcacctcctctcctcctcctttaccccatatgctgtcaatcatctagttctcccagttttacctccctaatgtctcttgaaccactttgcctagcacaatgctgcctcttgaccagtctgaaattgctgtctgatggatctcttgctatctagtcttacccctcccatcagtcttccacaccatagccagaaaagataaacactttcattatgtaaaaatatagaaactttgtatggaagatattcatttagtaaattcaataggcaaaggctgtatttgaaaaaaaactataatacagataaaaatatataacatataaggagcctttaaactttgagaagaaaaaaacaaacaatctaatacaaaaaaagaggatgtgaaaagacatttctcagaaaaagaaatccaaatcaacaagcagaagagatgcttaaatttttaaaggttgggaaaatgcaaattcaagtatcaatgaaatgtcactatttgcccaaaaattaaacataaaaaaaaaattacctaatgctgtcaggagtccaaggaaagggcaactcaggcattactgatggagatgtaaattgccaaagtcttttttgtaaacaatgcagcaacttctattaaaataaaaaaaatctatttaccttttgatgtagcaactcccagctccactctactcccacataaatatgaaaccataaatacatcaggacatatgtacaggatagttattgcggtgtaactgcaatagacaaagctagccacaaaaggagtgttcatcagtggtggatggcagattaattatggttccctcatgctctggaatattatgtagttattaaaaagaataaagtatagctataccagttgatttcaaggagattttatgacatattaatggaaaggcgggatgtagagaagtgtgcataagaccatttttattaaagaatggtaaatccctcaggcacacctccttttattgcatttcactttattgcacttcacagataatgtgctttttacaaattgaaggttcgtgacaacccagctttaagcaagtccatcagtgcctaactttatgttttgtctctctgttacattttagtaattcccacaatatttaacgctttttcattatcatatctgttatggtgatctgtgatcagtgatctttgatgttactgttgtcattgttttgggatgccaagaaccatgcgtataagacggtgaacttaattgataaatgctatgtgtgttctgactgctccactgactggctgttctccccatctttctccttctcctggcctcccttgtcacctgagacaatgatactgaaattaggccaatttaataaccctgcaatggcttctaagtgctcaagtgaaaagaagagttgcactgtctctcactttaaattaaaaactagaaatgattaagcttagtgaggaaggcatgtgaaaagccatgacaggtggccgggcgtggtggctcacaactgtaatcccagcactttgggaggccaaggtgggtggatcacctgaggtcagaagtttgagaccaacctggccaacatggcgaaaccccgtctctactaaaaatacaaaaattagctgggtgtggtggtgggcacctgtaatcccagctggttgggaggctgaggcaggagaatcgcttgaacctgaaaggcagatgttgcagtgagccaagatggcactattgcactccagtctgggctacaagaatgaaactctgtctgaagaaaaaaaaaaaaaaagaaagaaagaaaaaaaaaaagccacgatgggctgaaaactaggccttttatgccaaagagttagtgaagttgtgaattcaaaggaaaagttcttgaaggaaattaaaagtgctacttcagtgaacacataaataagaaagtgaaacagcgttattgcagatggagaaagttcgagtagtctgcatagaagatcaagccagctacaacattcccttaatccaaagcctaatccagagcaagaccctaactctctttagttctgtgaaggctgagagaggtgagaaagctgcaggagaaaagtttgaagctatcagaggttagttcatgagatcttaggaagaaagccatctccataacataaaactgtgaagtaaagcagcaagtgttgatgtagaagctgcaagaaattatccagaagatctaagattactggtgcaggatacatgaaacaacagattttcaatgtagacaaaacaaccttctactggaagaagatgccatctaggacttccatagctagacaggagaagtcaacttcaggcttgaaaggacagctgactctcttgttgtgtgggctaatgcagctgatgactttaagttgaagccagtgctcatttaccactctgaaaatttttagggcccttaagaattaggctaaatctattctgcttgtgctctataaaatggaacaacaggctggatgacagcacatctgtttacagcatggtttactgaatattgtaagcccactgttaatacttactgcttagaaaaaaaagattcatttcagtatattattgcttgttgacaatgcacctaatcacccaagagctctgatggagatgtacaaggagatgagtgttgttttcatgcttgctaatacaacatccattctgcagcccatggatcaaggagtaattttgcctttgaagtcttattatgtaggaatacacttggtaaggctatagctgccatagataattattcttctgatgaatctgggcaaagtaaattgacaaccttctgaaaggattcagcattctagatgtcattaagaatatttgtggttcatgggagaagatcaaaatatcaacattaacaggagtttggaagaatttgattccaatcgtcaggtcaaaatatcaatattaacaggagtttggaagaatttgattccgatcctcatggatgactttgaagggtggaaatagcaagaaaaatagaagtggagcctgaatatgtcactcagttgccacaatctcatgatgaaaattgagccaatgaggagttgcttcttatggatgagcaaagaaagtggtttcttcagatggcatctatactcctggtgaagatgctgtgaacattgtttaaatgacaacaaagggttaagagtattacataaatttagttgataaagcagcagcaggatttgagaaaatttactctaattttgaaagcagttttactgtgagtaaaattctatcaaacagcattggatgcctctgagaaatattttgtgaaaggaagggtccattgatgcagcaaaactcatcattgtcttcttttaagaaattgccacagccattgcagcctttagcaaccaacaccctgatcagtcagcagccatcaacattgaggcaagacctttcaccagcaaaaatattaggacttgctgaaggctcaaatgattgttagcatgttttttttttcagcaataaagtattttttaattaaatatgtacattgtgtttttagacataatgctattgaacactttaatagactacagtatagtgtaaacataacatttatatgccctgggaaaccagaaaatttgtgtgacacactttactctgatatttacatgattgctgttgtctgggaccaaacccacggtatcttcaagctatacctgtgtgtatccattatatgtgatacatgtttgtatctatttgactatatgagagaaaaatattgaaagatgtattctgatttgttaatgtagattatagaactggagattgttatggggttaagagagtgggtaaggcacccagataagaggactgaaaaaatacttatatgatcgtttttcattagtgtaaagttgtatgtatgtgtctatgtataatttatgttttaaaatacattttttaaagaaagagttactcttattttgtccccatcctgtttgaaactcttctatggctttctttacttcaatactagaattgtgtttgtttgatgccttgcaagggctggctgtgcttgtgtatgcagctcggcttatgctacttttctcatgccattgctcctgcttcaaggtctgcataattgttctcttaatggggacctgccctgctctcctgggcatagttaactgctgcttgtgcctcagaacttcttttagggaagggaactgccttccctaaccccttgttagttccctaagtaaatgttcttattgacacctgatgcttttacttagcagcaattatcacagttgcagttgggcattgtctaattatttgtgtaaattctgcctcccctaatagaatgtcaactctaagaaggaagggacggtgtctgtcttgttctcaaggatcttatatagaatagatgcccaatgaatatttcctgagtgaatgaataaatgaatcccatcctgaatgtgggaccacgctgttctgaaagggcactgaccaaggagtcagacaatgtgtgttctggtcattgtgccgccataaacttgctgagagacatggagcaaggtgatatgcctcttggagcctgctttcctacctgtaaatggggttaataacacctactgcaggtagacatggagagggataaaaaggaatacaagacaatgtgaacatataaccagcagagagtaagcattcaataaaattgccttatatttttcttggtgtcttgtcacttcaccagtgaaatgggagtaatttgactaaataatttttagagtttcttctagttcaaaattatagttgacccttgaacaacatggcaattaggggcaccaaccccttgagcagtcaaaaatttatgtataactcttgactcccaaaaacttaactgctaatagcctaccagaagccttaccaataacataaacaacacatattttctatgttatatgcattgcatgttgtattcttacactaaattaagctagagaaaagaacttattaggaaaagcataaggtgtagaagaatgaaactggatcctcatctttcaccttatataaaaatcaactcaaggtggatcaaaaacttaaatctaagacctgaagccataaaaattctagaagataacatcagaaaaactcttctagactttggcttaggcaaaaggtcatgaccaagaacccaaaaacaaatgcaacaaaaacaaagataaatagatggggcttaaattaaaaagcttctgtacagcaatataaacaatcagcagagtaaacacacaacccacaaagtgggagaaaatattcacaaactatgtatctgacaaaggaccaatatccagaatctataaggaagtcaaacaaatcagcaagaaaaaagcaaacaatcccatcaaaaagtgggccaaggacatgaatagacagttctcaaaggaggatatacaaatggccaacaaacatatgaaaaaatgctcaacattactaattatcagggaaatgcaaattgaaaccacaatgcaataccaccttactcctgcaagaatggccgtaatttaaaaatcaaaaaataatagatgttggcatgggtgtggtgggaaaagggaacacctgtacactgctggtgggaatgtaaactagtacaaccactatggagatttcttaagcaactaaaagtagaactaccatttgatccagcaatcccattactgggtatctacccagaggaaaacaagtcattttatgaaaaagacaacacacaacatgttgcacacaacatctttatagtggcacaactcgcaattgcaaaaatatggaatcagcataaatgcccatcaatcaatgagtggataaagaaaatgtgggagatatatatatatatgaatatgccataaaaaggaacataataggccaggcgcggtggctcgtgtctgtaatcccagcactttgggaggccaaggcgggcagatcacgaggtcaggagatcgagaccatcctggctaacatggtgaaaccccgtctttactaaaaatacaaaaaaaaaattagccgggcatggtggtgggcgcctgtagtcccagctactcaggaggctgaggcaggagaatggcgtgagcctgggaggtggaacttttagtgagccgagatcacgccactgcactccagcctggggacagagcgagactctgtctcaaaagaaaaaaaaaaaaaaaagaacaaaataatggcattcacagcaacctggatggaactggagaccattattctaagtgaagtaactcaggaatggaaaaccaaacatatgttctaacttacaagtgggagctaagctatgtaagaatgatacagtgaactttggggacttgtggagaagggtgggatggggatgagggataaaagactacacactgggtacagtgtacaccagaatctcagaaatcacacccaaataactaaaaaaaaaaaaaaaacttatccatgtaaccaaacatcacctgttcccccaaaactattgagataatagtaataaaaaaatttaaaaaagaaaaaaaagcataaggaagaaaatatacttactaagtgaaagtggatcatcaaaggtcttcatcctcattatcttcacgttaaagcaggctaagtgggaggaggggttggtcttgctatctcagggatggcagaggcggaagaaaatccacatgtaagtggacccacacagctcaaacccatgttgttcaagggtcaactgtactttgatttcttctgagctgcagtctcccctttctctaccctcacttccctccaccactagctccattcctgactactttcttctactgttctcaagcccaggatacatcagctctccctgggaaagacaaaagacatcttcatgccgccagggtatggcagtttatctcatacctactctttcaccaccaccctgccctctatcactcattgtttcatttacatttataagacatttttgagtttccactattgtgtgtggtagactctcaccccttgaattctgtactttttcttgtgccttcccacatactctgttgagtggaggaaataatgcataatcggcaaagcaatggaaagatgctggtgtgtttttgagggcagttccccttaattaagggagatgggttctaaaaagtccttgtagataaacaaatgggtgatatttgcttcttatctgaaattactaacacagttgtctacaactggtcattcagtgttcttgatttcccctgtattatttcaattaccctaattgctactaggcaaaaacttcagtcaaattttaattgctctttaatgttaacttaaaatagctgcagttttttgtttgtttgttgagacaggtcatgctctgtcacccaggctggagtgcagtggcacaatcatggctgactgcaatctctgcctcatggcttcaagtaatcctcttcagcctcccaagtagctggggaccacaggtgtgtgccatgcccagctaattttttgtacttttcgtaaagatggggtttcgccattttacccaggttggtcttgaactcctgaactcaagcaatccaaccaccttggcctcccaaaatgctggacttacaggcatgaaccacaggacccagctgctgttctctcttaacaagagacaagtcctagagcaagatgcatttaaacccactttggggtatcaaaaatatcccaatcttgtggttctaataaatgtttaacaactaggttggtatggaggttctgatgtgaagcattagtcagtttctgtgctgttactagatgttccctaatagggctgggcagagatgctaacaattggctcatgagggcaggtggacctggctccaacccaccactgcacccaatccctgagttcttaatcttcatcacaccctcgacttgcttcccagccattgtttctgatctcagttaatgatgcctctcagtcagccaaggagacctgacagtcccatccacttcccccaccctcatcactgaatcctgttgacttctctctccagcatctcctgagtctgtccgcttgtctgtccccactacaaacaccctgctctggtctgtcctgtccatggacttcattgctacagcattgactttcattataatttccctgcctctgtgctggcccctgtcagccgctctctactctaaagacagtcagcctgctgacacttaaattatgttaggccagtcttgttaaaaacctttctgtggcttcctctccattaggatcagtccaaacccttagcgttccttactttagcacacataggctgtgggctggcctttgtctgtcttgttccccaccagccaccccttgccctcctcattctagctgttaggaatcacgtgtgtatcctcaagcacaccatgctctttctccattcagggccttcctttgggggtgctgcttcctatatatctgtatgatcatctcttcttccactccccacccactcacctacccagccctgcggcctaactgccttttatccttcagtgatttgcacgttatgtcagttccagcatgacttccttggggaggccctagaccaggcagctcccctcatgcagcccctgatgtagagcctgctccctgtcttctccacacgtgaggctcctggagggcctggaacaaccccatattcccagcccagcccgtactacctggcagatggttggtgctccatgaatgtcgggtccatttcttggatttatgcaggtcccagttttctattaaagagtaagctccacatggtcaaacatgttcttacttcctgtattttgtgtcagcagtttgtcagcttagcacaaaaagtacctgatgaataatttctgccaccaaagtcatgttgttttttctaaccaatttttttttctctcctaggtttcatcagctgtttttcccaacaaatatatggtgttgtgtatgggaatgtaactttccatgtaccaagcaatgtgcctttaaaagaggtcctatggaaaaaacaaaaggataaagttgcagaactggaaaattctgaattcagagctttctcatcttttaaaaatagggtttatttagacactgtgtcaggtagcctcactatctacaacttaacatcatcagatgaagatgagtatgaaatggaatcgccaaatattactgataccatgaagttctttctttatgtgcttggtgagtattccataagttgatttgtttaaaatggcaaatttccatttttttagtctgttttcagagactagcacaaattaatggtctatgagaaaagaattagatgttacctgttgtcagggttttctccttttctggtatagaggagctagctactttcaattcctttgtcattcctctgggtgaggagagaatctaaccaaggtggggagaacagtatcagttgtcttactaggaatgttttggaaagagatgtagtgacagcagttagcttagaactctttgggctccactgatagatgttactctataaagttcctgcttccccacacagcggggagattgtttttcctcctgcaccattttatttaattaatttatttattttgagaaggagtctcactctgttaccaaggccagagtgcagtggcacaatcttggctgactgcaacctctgcctcccaggttcaaagtgattttactgtctcagcctcccaagtagctgggactacaggcccgcaccaccatgcccagctaatttttgtattttagtagagatggtgtttcactgtgttggccaggctggtctcaaactcctgagctcaggtgatccacccgcctcagcctcccaaagtgctgggattacactcatgagccaccacacccagctcctgcaccattttaaactgaaactagagagaggggacacatttctccctgcttctcactgacactcctccctggtctctaaagccccttttgtgttgcagtcttgtataggcccctgcctcacatgccagtgtttcttggtcattttaaggcctgcctcattttcattgtttctgacattcctggtgtcttggtggttgcaatatttaaattaaaattctttcaatattgtccttgatcgcctctcctgtaaggatcttttcctctacgttacccactacccatggatgtaaccgagaactcatcattacctcaatgtcaggtgtctcactctgaccaccatgccctgtccttgatgatgctgatgctgacagtccttcacacacctgatgtccctgctgccctccctactcagcctgagtgctgttgtcactcactagactcagtccgttgcagacacacttagcttccttgctcctttgctggcttgtcatactcgcatggccagattacagctagattaagtccgctgctttgcctattctgtgctcacacccatgtggttgcagaaaaatacaccaccctacaaagtcctgcacttttaatttctctaatcacttacctcaattaagttggtatttcctagcctgttcacttacccactctcctagcagttactttttctctcctcaaatcttgaatacctccttctctagactgactcttcagctgaaggctttgcttcttatttcactaaggagaataagcaatcagagggcaatttccacaagctctcaccacctgcctaccttcctacccatacctgagcctgtaggccctgctttctctcctgatatgaatggactttctgagttctcacctgaagttaaactttccacgtgtgccctggatcccacctcctcttgccgtcctcgggaatatcaccctagtgcttctacccactctctcctgatgagaatttcccccataagttgatggttcattttaagtggcatacatatatactgtcattaaaactttctcatgatccctgtacccctccagccaccaccacctgctgtcttcactttatagaaaatctccttgaagaagttgtccatattcacttattctgatcccttatattcacttttaacccactccaaataggctttcatctgcactgctatgccaaaactcctctagacctccttgttaataaatccagtggttcattctcagtccatgtcattcttgacttctcagcagcttttgacatagctgatcactccctcctccaagtactgtcttcacttgacatccaggataccaccctattcatgtttctttctcttttttccttgagagggggtttcgcccttgttgcccaggctggaatgcaatggcgcgatctcagctcactgcaacctatgcctcccgggttcaagtgaatcttctgcctcagcctcctgaacagttgagattacaggcatgcaccaccatgcctggctaattttgtatttttagtagagatggggtttcaccatgttggtcaggctggtcttgaactcctgacctcaggtgatccacctgccttggcctcccaaagtgttgggattacaggtgtgagccactgtgcctggcttcacatttctttctaacacactgactattccttttcagcttcttttgctagtttccttgtttccccaacctcttaacactggaaacatcaaggcttaagccttaggtctctttccttttctgtctgcgttcatagccagtgggtgagctcatcccatgtcagggctttaaatatcatctcaatgctaataatgtacagatctagagctctagcccagagtaccccgccgagctccttatgtgtatacctgactgcccagtgtacctctccagtcagacatctaattggcctttcaaatatcacaagtccaaaagtaagctcattatcttccccttaaaacctgctgctcctccccaaatcttttcccttttggttaatggcagccccatcctttcagctggtcagtctgaaaccgggatgtcatccttgatacctctctttttcttgaataccacattcactctaccaggaagttgtattggttctaccagaatgatctttttaaaacagaagtcagatcatgtcactcatctgtgtggaactttctaatggccccatctaactctgttaaagctaaaatgtgtaaagcgacttgcaaggctatgtgaggtctgacccctgtggactctatttagacaaatacagcttgctaagatgtcaaagtatcctcttagaagatttccttgaaaaagtagaatctttgaaacatggacattggggatctgataatttatagatagggccaacaaacaagaggattgagtcagaatttagatcacacattttaagagccctttttatagagtttgtaaaactaattcaaaacatttgaataaatttctcctcttaaacttgatgaactgttttaaaataatttaaaatattctaggccgggcattgtggctcaaggctataatcccagcactttgtgaggctgaggagggagggttgcttaagcccagtagttcaagaccatcctaggcaacatagcaagactccatctctacaaaaataaaataattaaccaggcatggtggtgcatgcctgtagtcccagctactcaagaggctgaggtgggaggatcccttgagcccaggaggctgaggctgcagtgagccatgattgcacctctgcactccagtctgggtgacagaccaagaccctgcctcaaaataactagctaaataaattaattaaataaaatattctatggcacctcagcaaaggtatggttttgttagtcagaccaactggatagaccttaggaagcctgcagaggagtaaagtacaggggaggtgagttttgatcaggaggcagtgatattgatagtattgagtgtgggacttaaagtcctggtttgagagtctggacatcagcttgtagcagtggggagccattgtgtcctatactggagcaaggaagtgacttgataaaatacatttttggaagattaatgtgatggtgcatacttatgatggattaaagagaggagatgtcaagttagaagctactatcatccaggtagatagagggtccaagaaagagtctgcaagatgtaggttttggttgtaaaaagacataagatgactctaggtttcacatctgcatgataaaatgattggtcatactatttttttttttttttaagaaaagaggaagtcatacttccttgaggtaatgttaacacttgttttagtaacctggtaatcttctagagacaccagacctaataggagacttccagtgagcatattttggacagggggatttcctggcacttcctaaattcagggcatccacttccttctgtgtgtacattgagatctggctttcctccatacccaaaagtccccttaaaatttctacttctgaggtttattagtcctttcccatctttttatggaccttcatcacatctcagatgatgatttttatgtaagtagaattaactgccctgtccttaactgggctggattgatacttgacctttactaaaattcgtgaaaatatacacatatttctataaaatgtcatcagatatgtgtaagaaattctcattttttacacagcagtgaactcaattcattaattataaattgactaattgtcttagggaggaagtaggcacatttcttgccagtttaatgctgcttaaagtagaggtataacgaatatttgttagatacagctgtggtaagtcccacgggcagcaagaaaatatgaaagatttatagaaggaaaagatctgaggtgtagaaactgtgatctaggtgctgcagaaaggcttgcacacttttagatgagttggataggcacttctacctttgccatctggcaactgttgtgtaatgagatagccagaaagagcttctacctagtcaagggagttctagcaacttagaagataatactaacacttcttcatgtttcccctgaaattactttcatattctgttttttttcttttcttttcttttcttttcttttttacaaaccctgcatgtggcactcagtcatattctgtttgacctttacagtgacctgatacagcattccctttcacagatgaaaataagacagtttaggagtccgtttctctgtaagtagaacaagagacctggatggatgctttcttaaaactcttccagctcctaaaaggactgtggccccaggtcacacagcaggccaaggctaaggcttgatcaaacctcccaactcctactcagtgactcttctcatcatatcacataccctccggggagcctcggcttcctggagttggaaactcacagccaatggccgtgtgctctattacagctagcatttgttaagtacttactctgtgcaggcactacatgttaattcatatgttgattattatctgtgttaactcatttaatctcattacagtctgatagagtaagtactatttgtgtccttattgtagagaggaggaaacctagacacaaggtgatttaagtaacttgcccaatgtcaaatggctcttagtcatgaagctgggatatgcactcaggcagctgggcttctgagtccatgctaaacaccatactgtacctctttggagatagcgggtagaagaatttacattttatttgaagactgtctctctgaatctatccttctatccatctgtctccccatctgtcctgtactgcttgtgaggagccatctgtgtgccttgcattatgtcatgtgctgtggttgaaaggtgagtcatacctagtctttgccctccaaagatacacagtctctggggctgatgatgcacctctgttcagttcagaaagtgctggatgaaagactagacattggcagagctagatcaatacattagaatctgcaacagaacaaacaggccacatacatcagaagcacctgggatggtggggctcaggaatctgtatttttaacaagcacccttggtgattcttaggcaccttaaaatttgagaaatgcttcaaaggaccatttctaaggaggtagaaagcttggttttctgcccctgagaaatgcccagcctagttacagaggcaggcataagtatatgaaatactgagaacaggcatttttgaactattctggggatgcatgttccttggaagtcccctgagggctgctatggggtggggtgggcaaaagggaccagaggaagttaggagagcagggctctaggctttcaattttgagtcaactagagcaacttcttatccattggattggattgccactgaagatttaattctgagaaattccactgcttaaaagatgattaaaagtctttttaattaaagaaaatcttaaggaagtatgtaaggacttgtgtgagctagattaaacttaaaaactaggaagccccaagtagaaagggaagtcagtgtgtgactctggtttctaccaaggcaggctgggtactttatttaactgagcgagaaggaattcaggaggaggagaagatgggggaaccattaaatgcttttatttttcagattataattggagcataagcattaacttgtcttagaaaacatcattttaaatgacaacatagtattccattatcttggtgaacctaaatttacttaaatgctctttttagtagacgtttataatgtatcaatactttattatcccagtgctaccatgaccattgttgtatattacatatgtttttgcatgtttcctcaggcctcttatgattaattgctggagggtagctgagacgcaagaaggcatatgaattaacaaataaatgactcataggacaaagtaattagccttgaggcttttaaagggcaacaatggcagaatgtgacatgttagtgtcttaactcatccttgtaggtccatgctgccttagccaataggaggcacttcctagaagaagggtgggagtgaggcctctggacaggcaggtctgtgacacatgctgctccctgcactgcctattaacaggtccagcccaaccaataggcagggcccgacaaggctctgtgtagctccacctttcacaaaatgtattgagtcagatgtattatggactttcctttcacaaaatgctttgagtcagacgtgttatggaattaaaatttttttttacattttggaaaggtaatacaaagtatttcctctgcatattaagcaccccacttaattatggggagcaccctatgggtcaagcataggaacaagtatttacttcattcctatatatttaaagacaaggtctcagtctgatgcaatcatagcccactgtgtgtagtgagctagagtgcactggcacaattataactcactgtagcttcagattccttggttcaagcagttgcaagtagctgagactacaggcaggagccatcatggctggctaatctttaaactttttataaagacagggtcttgctatgttgcccaggctggtcttgaactcctggcctcaagccatcctcctgcctcagcctcccaaagtgctgggagtatagccatgagccactgtgtcctgccaagcacaggaatatttttgtggtgaaacgataatgaatatttgaagtgagtgagaaagactcaaatccttgtgttaattcaggtcaggtcaggatttgcagctaaacgattttgctaccaacttgcgaagactcttttggcttcagagattttttgatttaagaattgaggataagggatttggggcctgtattggtctgttttcacactgctataaagaactacctgaaactgggtaatttataaagaaaagaggtttaattgactcacagttccacatggctggggaggcctcgggaaacttacaatcatggcagaaggcgaaggagaagcaagcacttttttcacaaggcagcaggagagagagagaactgccacacacttttaaaccaacagatgtcatgagaactcactctctatcactagaatagcatggggaaaccatcccccatggtacaatcacctcccaccaggtccctctctcgacacatgggaattacaattcaagatgagatttgggtgaggacccagagccaaaccatatcagggtctgaatttattctgttaaatttgaacaggtagatctgacctagcaaaagaaagaattctcgctccttgatgctcaaggagtttgtctgctcatcctttcaagcttgtaaggaggttgcgagctcttcataaatttgcagatgataagtctaaatattactattttctgtactaaatattatacttttttttccagagtctcttccatctcccacactaacttgtgcattgactaatggaagcattgaagtccaatgcatgataccagagcattacaacagccatcgaggacttataatgtactcatgggattgtcctatggagcaatgtaaacgtaactcaaccagtatatattttaagatggaaaatgatcttccacaaaaaatacagtgtactcttagcaatccattatttaatacaacatcatcaatcattttgacaacctgtatcccaagcagcggtgagtaaataactaaatgtgtcatggaggctttcagaccacagatgtggtgactaacacaaggttcacaattttgaaatgtaaaacaagttacaattttttttttttttttttttttttttttgagacagagtctcgctctgtcgcccaggctggagtgcagtggcgcgatctcggctcactgcaagctccgcctcctgggttcacgccattctcctgcctcagcctcccgagtagctgggactacaggcgcccgccaccacgcccggctaattttttgtatttttagtagagacggggtttcaccgtgttagccaggatggtctcgatctcctgacctcgtgatccgcccgcctcggcctcccaaagtgctgggattacaggcgtgagccaccgcgcccggccaacaagttacaatttttaacagaaaccccattatagatacaaagctaacattatttagcactttctgtgttgagcaccattctaatacatatgttaattaattcaatcttcacatcaatcctcatacaacctataagttgtgtactagtacttatccctgtttcctggtgagaaaccaacagagagagagtttaagttgtttgctcaaggtaacagctagtaagtggcagaacctggctttgagtagaggctatctggctctagagcccatggttttaactattcacaatgctgctttataatattgttataatatcattatgttctgaaaggttacatatctactacaggaacatgcatttgatatgtttccttaggcctaacactaagttaatatcatgacaatctgtcttggctatgattttctaatgttgttttagtattatttacatttgtaatttttattatctgttttttacattatatccccagtttaacaaacaaaaaggtcagtgacttgaaagtggtttattaaaatataaaagagacgaaaatagtaaatactattattcagaataatataattgtaaatagtgaacaggattccagggcaaatagagaatatgagtctctagggctgggataaggtgagtctatgaatgaaatttttctgaacaagcagctgaaacagataagggaaattagcaaatacaagaaatatatgaaacttggattttaactggtgagccattctaagtctcccatttattgtcttttctgaaccctttcaaacaataacttaaagccattaaagttatattattttcagacaaagcagagtcacttttgggaaaggaaagacatttttcaagaaaaagtagacgtcctcgtcagggtgggcagcgccgccgcggcgggcctggggcttggggcctggagcggcccctcccagcacccggtgcgcccctgccctgccgcccactgccctgaaggtcaagtcgctttgttctgcgctgcgggcggcttcctcgccggcggcccagcggaggaggcgtagagggcggcgagtgggggctggcagctcaaatctcccgctagcccagccagccccgcgtacccggagggccgcggcgcacccggaggagcattcaggcttcccgtttttaaggtggagacgtccaggacctctttattagatgtttaggaatttgagtttttccgtagggcgatggtcatcgtgagcatctgtggggtcaggctgggctaactggggttttgattgtaagtttcgtgtggacgagggcatgtctgatggggaagaaagtccttggcattgcatctcagctgttgggagctgtgcggtgcgagccagatgggcggcgtgtgctccccgaggactggcctgagtgccttagcctagttactcacgggacttggtttaccagacaaggggataaaaacattcagatggcagataacagtttttcagatggggttccttcagatttcgtggaagctgctaaaaatgcaagtaagacggaaaagctcacggatcaggtgatgcagaatcctggagttttggcagctttacaggagcgacttgacaatgcccctcacaccccttccagctacatcgaaactttacctaaagcagtaaaaagaagaattaatgcattgaaacaaattcaggtgagatgcgctcatatagaagccaagttctatgaagaagttcatgacttggaaagaaaatatgcagcattataccagcctctctttgacgagagaagagaatttatcaccggtgatgttgaaccaacatctgatatggaatcagaatggcaccgtgaaaatgaagaggaggagaaattggctggagacaggaaaaataaagtagtcataacagaaaaagcagcagcaacagctgaagagccaaatcccaaaggaattccagagttctggtttaccatctttagaaatgtagatatgctaagtgaattagtccaggaatatgatgaaccaatcttgaaatacctgcaggatattaaagtgaagttttctgaccctggacagcctatgtctttcatattaagagttccactttcaacccaatgactgctttgccaactcagtcctgacaaaaacctgcaagatgaaatcagaaccagataaggctgatcccttttcatttgcaggtcctgagatcatggactgcgatgggtgtactattgactggaagaaaggaaagaatgttactgtcaaaaccatcaagaaaaagcagaagcgtaagggtccaggcactgttagaacaattaccaaacaagtatccaatgagtcatttttcaacttcttcaatccactgaaagcatctggggacggagaatcactggataaagattctgaattcgtattagcctctgattttgaaattggacactttttccgtgagcggaccacaggctgtgctgtacttcgctggggaggccttaaaggatgatgacaattttgacgaaggtgaagaagaagaggacgaattagaaggtgatgaggagggagaagatgaggatgaggtggaaattaatcccaacaaggaacccagccagccggcggaatgcaagcagcagtaggaagtggaggtgggcgcctggcagaccggctgtcgcgactccgggcctgtagcgggaggcctcagtctttgccgcatgcggcacaatcccgtcgacagcgcttactccatctaatcgttttcaagtgcatgattttcactttcacttttcctttttccttattattttgcttaatgtgtacagtggcaactgaaatgcatttcagaaataggaggttttgtccaataccctctgcagccttggtgcctgtagctctggacttgcctggacccttccctgcgggagggccccatagaccccattggggtggggtgggatggggtggggatcacttggctaaaagggccgaggtctggtgatgaggttccagggatctagaacctctcctaccactcctgcagttggactgaattctttcctttcatttgaagaaacccactcgctgttttcagctgcttaatctgctgagtgtgcagcctgcatcacctgctgtatgctaatcatctcagaagggccgtgtagagtagggccgtattctccttaggatgttgctttttgatcttcttttttaagggttgggtcagggttgtggcacaccagctcaggcgagagctgccacgggtcacctcatatttatttatcccttcttgcctgtgaggactgcggccttttgctgtcgctcgtccttgccatttctgaaccaccctggtgacctgagcaggaagatgtgccacttcctagcaggagcaagggctgtgcggaagaaacactgcttcctgccaccagggctgaagacgcgagcctgtcctcgtgacacaggcaccgccctgctgccggagttgggattcggcagtgttctccagtgaggggctgggctgggaagtcctgcgtttcatttgagcatatgagcgtcaagtcctgctttctcagtagtcccattgctgggccccaccattcatcctgtctgaaggtcctggttggtgtgaccggttggtggctggtgagtggggtttccaagtgggtgacagcgctctgtggcagccggggatggccttgtccgcgctgaccaggcctgtagagagtgctcagcctaaccttagaacacatttataactgaatacagtgttttcaatttgtacataatagttagaatattctattaaagttatgaaacacggagaaaaaaaagaaaaagtgcaaatgagtcccaatttataactgatagatttgatttttgaagacagagaaaagatcaaacccacagaggtgtcactcaaaggagcactgtttgtacaagtcacacaattgcaagaagtttttaaaacgagctgcaaagttaaaatagttaagcttggagcaaacattcctttattaattccaccttttgagtgttacataatacccaaggcatacgatatggaaatgcaatttgttgtaaaagcagatagttgctttataatgggaacaacaaaaaataaaaccagtgtgcttttgccttttggtatatgtgtgctgcatctaactgacaagggggaagaagatgaccacatatagacagagcaagcaagttgaaatcttgaaaagttttaagtgttccaagagacaaaatacttgaaggaaataatttctgagtaagatccctctatagaattacatggaatattttaggggatttttaaaggttttgcccttgcaaaactttatgtttaactttatgtttgccattagaatttgaagacacaaagtaaaattactcttactgaaagtaagattactttccctgtaaatagtctggtaaaagatcataagaggaatgatattcctcttattgatttgaaataagtactattaatttgaaaaaattcttttaattattaaataatggtgatttatccttcttttacattttcttccaaattgatagttcacatatatacaacagattttgaaagtttgaggaatgttgcttgataggtcttaggtttaaatcctggagtagtgttgacatctgagacatatgtctgggcttctgaccctggtttctgttaaccaaatattggaggaccttctccttttaaaatgcaaaccaggagctgaacttaatgatcttaatggttcttttgaacagtaacagtctaggatctttttttttctgagatgatttttgaatgcttttgtgtggaaccacatgcatcataatagatacaaatccatgaaagtataacagttaaatactagatcttactttttcaggttttgatttctcatctaaactttccaatgctttatcagtgaagcaaactaactcacattgactagcctgctctcctttagcaaacccttcaaataaatgcctcatttgctcctcaccactatcattttagattggccagacagttgttacttaccttttaagaatgaggagacaggtagccgggtgcggtggctcacacctgtaatcccaacactttgggaggctgaggcgggtggatcacgaggtcaggagatcaagaccatcctggctaacacggtgaaaccccgtctgtactaaaaatacaaaaaattagtcaggtgtgttggtgggcacctgtagtcccagctacttgggaggctgaggcaggagaatggcatgaacccgggaggcggagctggcagtgagctgagaccacaccactgcactccagcctgggtgacagagtgagattccgtctcaaaaaaaaaaaaaagaatgaggagacagggtcaaccaggtggggtgacttgcccagggtcacttaagtattggagatagaattaaaatttaggtctttgaattccagagtgtttttgtatgataccatcctgactctctatacgtttcaaaataaatcaaattttaaagttttctttgatttattcatatgaatgagctagagaaacccatactatatagatatacatagtagatattggtcaaatgtaacttaattttttacctcattatctcatgtttcttgtaacattttgtctagtaggacctttttgtggtttgtcatcattttagtcatgacatctactgtcataccgtcactgcaacccagaaatggggcgatggggttactaactagttaaacacaatctaaaggagaattttagagacagttaagattgaggacagagttcttgtccaactcgtattgtactgggggaatgaactaatacttactgaaggcctgctccacaacaaactcctgtaaatgatttacataaatgtgtcacatttaatccacacaacaacccagtggtgtgggtatttataaaggaggaatctgaggcacagtgaggttaaataacttgaccaaatatacacatttattaagagcaaagccaggatttgacatccaactccatctgaactcaaagcactgtgtcttccccactgtactgggaagtaaaagtaagaagatgactcagagatggagaattataatctggaatttggaatttacttccattggttaaccgtttgaaaattgcagctccaaggcattgggagatggaaagaaagctagtgagcaattatttcttgcctttgtgtcatgctcctacattttgctcctccttatctccttatctgcggtcagagtagatagcatggaggttttatgcccatgctacagatgttcagagatctcaaggtcagaaagctggtttatggcagcacgtgaatatagacagacttatacagattagaaaattgagaagttgagggcaggagaaaattctggatagaagagaacatgggattgggagcaagaaaacctaggtcctagacctgatttcattgcttactggcagtgtgaatgtgggggataataatacttactttacaagggctgaggaaattaaataaaatagcatgtgggaaagagtattgatggttagtcactataaaactgctagttgttattcaggatacaggaagagtttcaagagaggacatttggtataacattatatacagccaatggtttaaggaggacaatgtagaagaggttgtggatttggcacttaggaggtcattgttgacagaccttgtgaatagatgagggtaggaaccagattcctgggctttaagtaagaagaggggtagtccaataggccagttatatatttggctgtgaaagaggaaaataaaatctgagtacctttgagagtcaaaggctatttccaggtaaagaaacccagtgcacttcaccattctcttttagataactgctgggaagaagtaggatgattgtaacaccctccacattgacacagaactctaaatgggagcctagggaaagggcacattttttgaaggggtaggcaagaggatattctctagagtaccagtttccaactgttgtacacatttatggaccaagaacataaaagaaacattgttcagttccgacctgaagttatgtagaacaaacattgttctgagttcaactagatgatctttctttcatagctgtgtggacattatgttacctgcagggagtaagtcactgaaggtagagcctcaaaaaaacaccctttgatcttactcctaagaaaaaagagagaaattggaaaaattcatcatagaaacacaaaaatatgcggaaataggaaaaaggagaagaaggaaagaaatgcaacataggaaataatattatgtagactgagataaagaatgttaagaatatttgaacaaagtttgaaccagatgaaatgtaacaggcagaaacagaagtaggaggatttttggactgatttaagttggtctcttgtgacttttatgactttccactgggaagaatagtgattaagaatgttcactctgcttttaaaaattgagaaagaacgctgcgtgcagtggcttatgcctataatcccaacactttgtgaggccaagacgggaggattgcttgaggctgagagttcgagaccagcctgggcaacatagggagaccctatctctactaaaaattaaaaagttactgaggtgttgtggcatgtgtctgtagtcctagctacttgggagactgaggtgggaggatcacttcagcctggcagtttaaataaatcagatcagtaattaataatcttccaaaacagaaagcaccaggttcagatgggttcattggtgaattctaccagatatttaaggaagaaatactaattctctataatctcttttagaagatagaagcagagggcatactttccaattcattttatgaggccagcattattcttgtgctaaaaccaaagaacaatacaagaaaagaaaattaagacaaatatttctcatgaacatacatgtagaaaccttaaacaaaatattagcaaattggatccaacagcatatagaaagaattatacatcatgactaagtggtatttatctcaggtgtgcaaggcaggttcaacatatgaaaatcaattaatgtaatccatcacattgacagactatgaaagaaaaatcacatgatcataccaatagatacagaaaaagcatttgacaaaatccaacatcaatttatgataaaaactctcagtaaactaggaatagaggggaaactttttcaacttgttaacaaatgcctacaaaaaaccctgcagctaacatcatctgtaatggtgagaaacttgaagctttccaactaagaccaagaataaggaaataatgttcttctcaccactccttttcagtattgtactataagcactaactaatgccataagacaagaaaaggaaataaaagttatacagatgagaagaaagaaagaaaattgttttagttctcagatgacatgaatatctatgtatacaatccaaacgaattgaccaaaaacctcctggaactaataaaaaactatagcacatttgtaggatacaaagttaatatacaaaagtcaatcacttttctataacagcaatgaacaagtggaatttgaagtttaaaacacaacaccatttaccttagcaccccaaaaatgcaatacttaggtacaataacaaaatatgtcccagatttatatgagaaaatcaacaaaactgatgaacaaaatcaaagaagaactaaataaatggagagatattctatgttcatagataggaagactccttattgtgaagatgtcagttatttccaatttactctataaattcagtgcaatcccaagcaaaatatcagaagtcatttgtggatatcagcaaactgattttaaggttaaatgggcaggcaaaagaccagaatagccagcaaaatattgaaggagaacaaaattgtaggactgatactactcaacttcaagacttactataaagctacagtagtcaacatagtgtggtactggtggaaaaataaaagacaaatagatcagtgaatcggaatagagagcccagaaataaaccaacataaatatggtcaactgatctttgacaaaggagcaaaggcaatacaatggagcaaagatgatcttttcaacaaatagtgctgtaacaactggacatccacatgcaaaaaaatgaatctaaacacagaccttatgcccttcacaaaattttactcaaaatggaccatagatctaaatgtaaaatgcaaaaccataagactcctaaaacataagagaaaacctagataactttggatatgatgactttttagatacaacaccaaagacatgattcatgaaagaaagaattggtaagctgtacttcattaaaattaaaaacattgctctatgaaagacaatttcaagagaatgagaagccaagccacagactgggagaaaatatttgcaaaagacacatctgataaaagactgttatccaaaatatacaaaaaacttttaaaactcaacaagaaaaacacaaacaacccaattaaaaaatgagtcaaagatctcatcacacacttctccaaggaaggtatacagatggcaaatagggatataaaaagatactcctgggccgggtgcggtggctcacacctgtaatcccagcactttgggaggccgaggcaggcggatcacctgaggtcaggagttcaagaccagcctggccaacatggggaaaccccatttctactattttctattttgtaaaaatacaaaaattagctaggcatgtcctatgtcaacaggcaacagggaaatggaaactaagacaacaatgaaataccacttcacgcctatcacactggccaaaatctagaacactgacagcaccaaatgccagtgaggatgtggagcaactctcattcattgcaggtgggaatgcaaaatggtacagccactttggaagacagtttggcagtttcttacaaaactgtatgtactcttaccattcaacacaactgtcatgcttcttgctatttacccgaaggcattaaaaacttatgttgacataaaaaccttcacatggatggttatagcatctttattaataattgtcaaaacttggaagcaaccaagatgtccttcagtaagtgaatggacaaataaactgtggtacatacagacaatagaatattattcagcactgaaaagaactatcaagccatgaaaagacatggaggaaacttaaatgcatattataagtcaaagaatccaatctgaacaggctacatgctatgcaaattttacctatgtgacattctggaaaaggcaaaactgtggagactgtaaaaagattagtagttggcaggggatatgaataggtggaacacagaggagtttgggggcagtgaaaatactctgtatgatactgtaacgatgttattatacatttgtccaaacccacagaatgtacaactgaatgctaatgtaaagtgtggattttttaatgataatgatgtatcagaatggtttcattaattctaaaaaatgtaccactctggtgagggatattgataatggggaggctatgcatgtgtaggggcaggatgtatgtacaaactttctgtaacttctgctcagttttgttgtgaacctgaaactcaaaatatttaaagccaagtgaagctaacttactaagccatgaatcaagtttgtggaataaccccaaatagaggaaccattccaagtgttttcaaaacatagtaatttgggtgcatatttcaaggggctgcattctaaggataaaaagaactataaagaaaaaaattgtaatgttttaagtaattatgtagttagcagtaatgctggtatttggttactgttgagtatgtattgcaggaaaatgcaaatgaatatttatattgttgttattgaatattgggatgtttggcatgaaagaaaggagattcagctgtaaattgattaggttaagtaaacattgtagccctggatttatttaaaggtattaatttgaaccatatgaaattgctgtttctctagtcaaaaaccattgaatcttggcagcttaatagggttcagcataatgccagcatgacccattaatgtattttgtctcttagaaaattgtgtatttcctggttctgtccattgaaatgttctagaaacaagagccagtcctgtagcaatttgcatgcttcttggttcttggacccagatttgagtgaccagtgttacctggtgtgcccagacttcccagtttcagcacccgaatttcatatcccaggaaactcttcagtttcaggaaaaccaggatgattggccaccttcacccagattatggtacctaattatcatttcccatgaaaatgaactagggcctttgggacagttggctgattccatacctggggcatggaatgcattaaaataagccttgagtatcttattttaccacagaacaagaaagctatcaaaaagacttaacatgatggtacgaacaggactcaggagccactctgaagaggttccctctggccaaaaataagacaattggaacatcaataagaataacaacttcagtagattgaaacacatcagttgtgctcagttcatgcgttcataatgtactaaaaacaaatttaaaaactcactggtcatctctagagaatgcttgggagctaactcattattttgaaaaacgataaagaaagagaagaatcaaatgctgcttttcctatataaattgaacctcagagtaaccacattgttgatgaggggcagtttatctttatgtgaagattgtagttagtaaagaaggaatgatagactaaaccactttgcaaacccttgatgaacttatggctctagacaatgatcttcagtggcactgacatcatgaaaagaaaagcaaccaggcatcgtatgccacctaagggaagtatacaaacactacttggggagtattattgccaaggaatatctgaattttgctactaaagaagggaaaatgatgttcgggggcacctagcagtttctggccagggtcttctcaaatctgaccaataggtgactgcctatttgctccaacacacctgtgttcctaataaaaggaaagtgtgatcatatccttattctcatttattcattcattttctctctctcttcctcctctcccttcctttcccttcctttcccatatccatgtcacatttgttcttagtgacccctccccaatcctttagcagtgcattgtgtactctgattttggattttcaatagctggatagagtttaccttgtgaacataccacagttttttgtgaaaacaaggagctgctgtgaaaacaacttaggttgtttttgccttatggtatattaagtaaggctgcagtaaatatctttgtgcctttttgcggggagtagaagggcacatcattgatattttccccaggataacatcttagaaatggaattgcagagtcacaagatattaatagagataccaataacatctactcaataggttaatgacagtatataacagctgttcttaaatgcaactaccctatgagataagtatatttattagtctcgagtatagttaccctgtgagaaaatggaggcactgagaggttaaggcacttgcccaacattgtaatgacttagtgagactataggcacatgacttagtgcaatgtctagatgcttcatgataaatatttttaaggcttattatatacaactgccagaattgccctaccaaacacaatgccaagttctgcttccactggcagtatgagatggtcagaaacaaaccttctagtggaacacttgcttcttttattaaataacacagggtctggaatgtatcaagcttgtgcatataagtttgtttagaaatagtcgaatcttgttattcatattagttctacagagtcaagttaacagtgaaatagcaagtagtgaagtaatgttcctgggggaaatacaggggtaggttcctgtgagcctctagtcataagatttttgttaatgatctgtttataaccttgttttatgtgtgtctctgtttaaataaaccttaatatatagtgttgatttattgaccttgaactcatagccaacagcactgtaactcatgcctaagtgaagcttatctaatacacctattttctctgcaaggcacatcgcagccttcttgcacttaggaactcttgtcagcccttcaacactatactttgggaccacttaaaatagtgaaatcaccaacaaaaaagcacaaaaatgcaaaatcatggcactaaatagactgcaaataggacacttgttaacagtgtaagaacttgaaacaagaaggcagagctttacctttttccacctctgctgggaatctgcttattgggtgactcaaagttttcatcactgttcttatgtctgagaatgactgctttgggtattgatttgtggattacaaataaatttcagtaaataagcaaaccgcaaggtggaatctgcaaataatgaggatccattttgatcagttcaactagttgaatttcttttcttttcttttttataggtcattcaagacacagatatgcacttatacccataccattagcagtaattacaacatgtattgtgctgtatatgaatggtatgtatgctttttaaaacaaaatagtttgaaaacttgcattgttttccaaaggtcagaaaatagtttaaggatgaaaataaagtttgaaattttagacatttgaaaagaaacaaaaacttttttgctttacgtgtgtgggactgctgagcatgctaggttcctccaaagatccacattatctcaaggtagaatgaatccttaggccacagagagctttacaggcctgggaacacagcctggacctgttgcatagcctccttttacctgtgatctgcttcaaaatatagttaaacttctggtctccaagtcagagtttgctaaagacctctttaggctgccacctctgtaattttcatgtcatataacacgaatggggctcccaggtaggaagggagttttggttgagttaagtgacttacgtaatacaagtaattgtgcttgtattacttcctgagccttctcagtcccctagcaatcttgggcagtcatacagcttggagaactgatgacttggagaatttgttcccagcctgttcattcctggtaatgagtaatccctctcaaatcccaaaggacagggagcaggctgtaattctgaagagtggatattcttgatgccacagcagtttccataccagccttcaccaaaaggaaatatgccagacagggaatgccgaagagtaaactttctacaagtgatagtatctaggatccattgtgtcatgaatcaagtttataaactagatttcagtttccttagacctgcactgtttagtatagtagccaattagccacatatgattatttaaatatatcatttaaaatgaaataccattaaatttaagattcattcctcagttacactaaccacctttcaagtgctcaatacctacatctggctagtggctaccatactggatagcccagataaggaataatcctatcattgcagaaagttttcttggtcagtgcagaactagactattttgcgatatcagtgctaaatataatttcctgatgataacattttcatattataagttgtaaataccatgaaaatccatccctaagtaatagattatcagtcagttgactctccactaaacagtattataacgatcagctgaagaaagttttcagctattgcccaatgcataaaatattttgggagctcaaattttttaaaaatctattttaatccccaaatagcagtataatagttaatcatctcctgaacaggttggttcccagaaaccaaaatcattttccactcagtgttgttgtagatctcaattaaagaactaacccaggatacctgaactaaagagaggtggcactgagtttccatagaacttcaaaacaattggttgatttcacttaaaaaaaaaaaaaaaagtcattcaatatacagaaaattactcccctggtcagtactgttagccccagataatctgaaaaaatttgttcttaaaaaaaaaaaacaatttggaggccaggcatggtggctcatgcctgtaatcccagcacattgagaggtcgagttgtgtgcatcacttgagcccaggagtttgagaccagcctggacaacatggtgaaacactatctctacaaaaaaatacaaaaattagccaggcatggtggtgcatgcctgtagtcccagctactcaggaggctgaggcgggagggaggcagatgttgcagtgagctgagattgtgccactgcactccagcctgggtgatggagtgagaccctgtctcaaaaaacaaacaaacaaaaaaactcagcaagcatctcaacctttaagcaaccttaaagtcattaattgggaaatagtgagatgtttggcatggaatcttcagaagaggaaagagttgaatggaaacagctccagctgcctagttgtagttgacagacaactttataagctctagtcaaccctattgactaagcttctgaaccactagcatagttctagggtcaggcggatgcctactgtgggcaggaaagtgatgcatgcatgtgtgggagcagtgtcttaatgtctgaaatagtagccatgagctacatgtggctatggagcacttgaaatgtgggagtccaaattatcatgtgctgtgagtgtaaaataatatgtttctaagaccgtgtgtgaaagaatataaaatatctcattaaaaaatgtttatattgagtacatgttgaaataattttatatttgtgacacattgtgttaaataaaatattaaaatttacatttttttttactttgtaatgtggataccaaaaattttaaattacttatgtggcttgcattatatttctattggacagcactggtccaaactattctagccttccctgcatcttcagccttatgcacgaggtaaaattagccattttgtcaacagtttttgcatttggttttctatcatgttctgaccaatttttgaacaactctttggaccagctctgtagccgatttgatttaaagcatataggatagcaggaaatcccagggtgatggggctctggcttagttttccatatttaggcctctaataggcagtcagtaactccacatttcaccttttcttttcagttctttaattgagaagacaatttcttcatttttaggtattctgaaatgtgacagaaaaccagacagaaccaagtaagtacactgcaggctgtgcactctgtgccagaacaacagcagccctgctgtagatgcccattacttgggaagccagattgtactcatctgttggttgccttgtacagtaataagaagtaacatcagcagatatactaaccatagtgtattaagtaccaactgtgtgccatgcactgcactagccactctctgcatatcgtttcctggaaccctctcaatgagccttgcaggaggagtatcataccccttgcttagagacagcgcatatgagattcatagaagtcaagtgagatatcaaagtcacgttgctagtaagtgatgggctgggatttaaatctaggtctttggactccaagagttatactgttaaccactacaatacactccctccacctcccatcccagaaaaagttggatcagggatagggttcacttcaggagccagggtcagagctgggcctgtagtcacatataaaagataggacacaaacacaattagcagcagtgttggtttaataaaccgccgtagggtgctccaagaggccccctcctggcagatcccactggtggtcaggaggcagaggcatgagctgggtgttgagggatgaggggaagagttaaggcccagggtgtgaagggcaggacaagaagtagcaagccatcctctttggagcagagagtgttgaggcattagagaaagatggggctgggctggcaggttgggccaggctgagactttgagagaggctttgggtcattctttagggagaaccgcagagttttctagcagaactatgctttagtaagatcactctgctggcaaagcatgggactaattaataggagatgagatgaggacactggttagtggagtaatgaaataatccagccaagcagagaagagggcctgagtcaaggtgatggtggcagaactgaatatgcagagctaggtttgagagaaacagcagaggtcctgttagcaaaactttcatctggcagtgtaggctctgatgccaaactccctggttcaaatgccagctccatttctcacaggccttggacaagtcacttaaactctctgtgctttggttgtcttctgtggaaaatgggcataatgataatatagaaatgacaatgatagcatagataatcacatagaaataactgtgtcaaaatatattaatataagtacaatgcttacaatagtggctggctcataatagttttcaataaatgttagccattatgactattgttactattatttttcaagaaaaataaaagcgacaggaccaagtgtcacagaggagtcacacaggaatcttggttgggaaggaaaattatgaatttttgctttgacaggttgattttggggtgctggtgtattacctggctagtgatgtccatgcacagaattggagcgtgggcttcacgctagagttacggattggggcgcctcttcatctggacagtaattgatgccgtgagcacctgaggtcactaagaaagaaaagctagatgccctagggtgatgggaagaggcagaggaggcgggactggggaagcaaagtccaggatcagagccagggtagccccgggttagagactcgagggaggaggctacatgttaaagctgcagagacaaggaggtaggcgaggggttaagacctttggttttgtggagtcggttgctgtggtcagtgcagggatgaagtgagggtggctaagcagcagcaagggcctaggtgaggtgggatcgatggatgggccacaggtgtcctttctcctcagctgccaggtggaacagtgcaggagaaacaagctgtggcaggaggcctgggggcaaggaagtacaaggggcagctcagccggccacagacccaagctgggaggacccaaggccatgaggggttgatgggccaggaggctgggcagagaggagccaagtagctggagatgaggtgaggtgggagaggtagggacctccaggcttgtggtcagaggaaggcatttcagatctgagcaatatgcgtgagccccaggtgagtgtgagagccaagtcaggtctctgctgagatctaggtggttacagtggaggggaactctgagtggatgggggaggcatagccatcactaccaatgatgggggtaggggggcatcatccagggccacggggaaaggggatgggcattctggaactcatcccttcctctgttcctttcatcacaacaaacgttatggagattatgcgataccaggcactgtgctagctgatagggtgggggtcagagtacccagcgaggctagacattgtgtgggattcagagaaagcatataatagggctcctcccacaagaagcttgtggccacaccagggagagagaatggatgcacatgagcatacgaaactcttagaaggacttaggcaggaagcacaggtgataggcagaatgtgtgatatgagggtaagggctgagcaaccaacgcagaggaattggagaggccagaataatcagaaaagctttggagggggtaggatgtgacctacattttcagaacaagagtggagtagaaaaggcattccaggtgggataaacagcggaggcaaatacatgagagggaattaaatctgttgtgatttatttgatagtaagattgacctgcctggcatcgagttgaagtagaggcaaaagacactgaatatttgcaaggaggtccttagaatggagtgatatggaaataagcagccattataggttcttgagcaggaacattttgcatgaaaagcactgctttggaatgatgagtctagaaaggtaacactgacctctctaaggtggcattctagggagagacctgagtatttggggctgagattgagagaggagcttacttttcttggtatatttttatttactattcaagttctgcatcatgtgtgtttactgcctatttaataattatttttaaatttaaagaacccattgtggcagcagggggaattctctaagctcagttactaaagggttatgaagctgggtatggtagcacacacctgtagtctcagctacttgggaggctgaggtgcgaggatcgcttgagtttaggagttagtgggaggatttcttgagcccaggagttaagagaccagcctgggcatcaaaaaaattaagttaaattaaaatgttaaaaggttctgtatatggtggagatggaggagatcgggggaggagatgagaaaggggcaagcataagtaggaacaaatgcaatatttccccagctgcgcgagggcaggagcaggaagaactaaacccaattaggaacaacagaggacagatgagtagatagcagacatctgacgggaaatggccacgccacacttctcacccaggcagttcaacgtaggcaatttctgagtgccctggtattttttgtgtaagtgtctagaaaacagatcacaaagttagccaaattaaaaaggaagcagggagtcctatttctccgagaagaaagatttacaggtgggatctcaggcaggagccaagctggagaagcaggcttgattccttgtagtgggtgaggagactgctgggagagggcagggaagcagagaccggcaaaaagctgccccaacaagaatcctgtgcctgccaacctggtttacaaacatttcccactttatccccctcagaaagtcacagcacccatttcatgttctgtgaggctcccaaggagggaaacttctagtttgctgtcctttacctcacccctgtgaccacagcactaatttctcatgaattcttgttaccaatgagatacaaatgtttggggagctctggcctggtctgattttgagctctgtggaaatacgcagaccacgggggaggaggccgggaaatggactcggtttgagggcttgctcaaggatgcggttttgtttttcggctgatttactccaagacagccagagattgttctgtcgttgccacagaggtgactaaacaggaaggtaagtttgaggtaggaagaaaaccatccccaggagtttcatgtagcaaagaaggaagtagctgttacaaatgggtgacagtttacatgtgggtctaacagtctcagctctgttgttcaatctttcagttatactcagagagtaagcgggaggagccttggggctgctattgagtgcagcatcctgaaggctgttcttcaagtgttactcagactactatcccaagagcactcaaggcagttcttcctccatccctgctccctagctcccttggctttgatgagtttattacaaaagggctattcactttagaataggagggtaattaagactcctggtctgcagcccagatttactgcattttacaagttaataatatgatttttttttgtagctccaattgattggtaacagaagatgaagacaacagcataactaaattattttaaaaactaaaaagccatctgatttctcattt

SEQ ID NO: 15513 - DNA, 55242 bp, Homo sapiens
ctcttgacagcggcggcggcgcagccggttccgggttcggcgcggggcgggggtaagcgcggctggcgagggggctgcggcgggcggcgaagggggacctggttgcggccgtgggagggggcgcccgccggcgtccaggccgggctgcggggctgcgtgggcgcgggcggccgggccggggcccgcggggtggggcgggcgccgagtctcggcctctggggtcgggagtctccatgggcgtttccggggtctccgcagatgtgaatcccgatggagcggcccgaggaaggcaagcagtcgccgccgccgcagccctggggacggctcctgcgtctgggcgcggaggagggcgagccgcacgtcctcctgaggaagcgggagtggaccatcgggcggagacgaggtgcggggctgaggccggggccgggggccggggccgggcagagccaccgggttgcgggcaggccacacgggcggcggtgcagtgtgcgctccagatttttccgtggagtgaaatgtcatgtaagaactggtatttattcggtgttctgcccaccgattcttgcgcatgattcacgcacatcatttagccttcgttacaactgtataagttagttgtgttcatatactctccagaatgcaatattgtcacgttcgttgccgtacagagtatcttttctgactgtaatggaacgaaattaaaaataatagaaggaaaagtggaaaattcacagatatgtggacatgaaacaccacactcttaaagcaaccggtgggtcaaataagtctttacaacggggaccttgttttgagacaaatgaaacaaaaatagaatacaccaaaaggtatttaggatgcagccaaggcagtactcagagggaaatttatagctgtagtgcttatattaaaaaagatctcaagtcccagcccctagaatatttatttatttaataaacctggaaagctaaaaacttgaacaaagtcatacaacgggtgagagaaagttccctcagcctccacattcactgcctccagtctcccaagtgaccatctggttgtttgatttcctctgaagcctttgtatggggagagaaatgcgctggtcctgtcaacaaaaatgtttagtttgtctgaaaattaatgaattagctccgacattatactctaaaaaggagcgaggatgggaaatatttgctgtttggaagcaattttttttttttttttggttaatttcaccccttataatgtgcttgcacctggttttttttgtttttttgtttgtttttttgagataagagtcttgctctgtggcccagactggggtgcagtggtgtgatctcagctcactgcaccctctgcctcccggttcaagtgattctcccgcctcagcctcggagtagctgggactacaggcgtgcgccaccatgcctggctaatttttgtatttttagtagagatgagctttcgccatattgcccaggctggtcttgaacaactgaactaaagtgattcacctgcttcggcctccgaaagtgctgggattacaggtgtgaaccactgtgtctgacctggttttgttttttggggtgttttggtagtcttacattccagtatcaagtcaaagtttattttacaactttgaaagtatttagatatcatcataacatatcaaaattatccctttaagacaagaggaagtatttgaagatttttccctttgtctttacttgatagactaggaggtttggtgaagagcagaggccctagagacaaattatgtgggtttccaatctgtcaacacattactctgggctaacgacatctttctgcgcctatgtacctacttcatagatttgctctgaggagttaatgagatcatacacggactgcttagaaggaactttagcgttagcacttagcattagccattgttattgtaacatgttatacatgttattacatggtaggacattacatgttaagacaaggagagaaaatatgtcgttgagtttatcttttaataggaacgattttagtgaatttataaataatgttgccagcaaaaactttaagattattgtattagtttgttcatactaccatagcaaaatactacattctgggtggcttaagcaacagaaatttatttatttatttatttatttatttatttatttatatattttttgagacagagtctcactctatcacccaggctggagtgcagtggcgcgatctcggcccactgcaagctccacctcccgggttcttgccattcttctgcctcagcctcccgagtagctgggactacaggcgcccaccaccacgcctggcagtggtattttgtatttttagtagagacggggtttcaccatgttagccaggatggtctcaatctcctgacctcgtgatctgcctgcctcagcctcccaaagtgctgggattacaggcgtgagctatcgcgcccggccagaaatttattttttattttattttatttttttaatttttgagatagagtcctgctctgtcacccaggctggagtgcagtggcatgatctcggctcactgcaacttccctcttccaggttcaagcgattctcctgcctcagcctcccgagtagctgggactacaggcacgtaccaccacacctggcttatttttttctattttagtagagatggggtttcactgtgttgcccaggctggtctcgaactcctgagctccagcaatctgtctgcctcggcctctcaaagtgctaggattacaggtgtgagccactgtgcctggccagaaatttattttcatggttcaggaggctgggaagtccaagatcaaggtgttggcagattgggttcctggtgagggctctcttggcttgcaggtggccactttcttgctgtgtcctcacatggcagagagggggactctgcttgctctctctgcctcctcttaagagggcaccagccctgtgacatctgattcccacctagtgacctcatttaacatttatcagctcacaggccccatttccaaatacagtcacattggggattaggacttaaatatatgaattttaggggggtacagacactcagttacaaacattcagttcctaacagttgtagaacttgattattttatttatttattttatatatatatatgtatttttttttttgagacggagttttgctcttattgcccaggctgtagtgcagtggtgccttcttggctcaacctccaacctcccgggttcaagcaattctcctgcctcagcctcccgagtagctgggattacaagtatgtgctaccacgctcagctactttttgtatttttagtagagacggggtttctccatgttcgtcaggctggtcttgaactcctgacctcaggtgatccacccgcctcggcttcccaaagtgctgggattacaggcgtgagccactgtgcccggcctgatatatttattttttgagacggagtcttactctgtcacccaggctggagtgcagtggtgcgatcttcactcactacaacctgcatcttccaggttaaagtgattctcctgcctgagcctccagactagctgagatttcaggcgtgtgccaccacacctggctagttttttggtatttttagtagagatgaggttttaccatgttggtcaggctggtcttgaactcctggcctcaaatcaaatgatccacctgccttggcctcccaaagcgttgggattacagccatgagccacctcgcccagacagaacttgattattttaaagcaatgatgtgcctgccatttataaggcattatttgggggaaaagggaaagcctaggtaacgtgtaggaaggggtgcaacaaccttgttttcccaaagagctctttatccagtctggagtgcagtggcacgatctcggctcactgcaagctctgcctcttgggttcacaccattctcctgcctcaacctcccaagtagctgggactacaggcacccgccaccatgcccggctaattttttttgtatttttagtagagacagggtttcaccatgttagccaggatggtcttgatctcctgacctcatgatccacccgcctcggcctcccaaagtgctgggattagaggcgtgagccactgcgcccagtctttttttttttttttttgagacggagtttcactcctatttctcaggctggagtgcaatgatgtgatctcggctcactgcaacctccgcctcccaggttcaagtgattctccttcctcagcatccagagtagctgggattacaggcactcaccaccatgcttggctaatttttgtattttgtagagacagggtttcatcatgttggctaggctagtctctaagtcctgacctcaggtgatcctcccgcctcggcctcccaatgtgctgggattacaggtgtgatccaccgcgcccagccaagagctctttattctaagagagtggcagaaatgtacatcaactgcttgaaagatttaacccaccaagcgtcaagcgcagcaaatgctgtgaatagaactttagcacaaagcatctcggttccagattagaatgctgatattcaggccaggcacggtggctcatgcctgtaatcccagcagtttgggaggccaaaacaggaggatctcttgaccctatgagtttgagaccagctagggcaacatagaccctgtatctacaaaaacttaaaaaattagctgagcgtggtggtgcatattggtagtctcagctactcaggaggctgaagtgggaggatcacatgagcctgggagttcaaggctgcagtgagctgtgattgctccactgcaccacagctggggtaacagcgcaaggccttgtctcaaagaaaaaaaaaaaaacctgatgttctggcatggagacgcctctgttacaaactggctctggcgacaccgtgacttgcactggttttggggcttgaaggagactgtcctggcagttaacgctcaatggaatgggaagagcttgaccacaggtgatacttgccttggatacagtacttccaatagtacagaatgtttgcacaaataagatttttaatatccggtttcatggcagtatcatttacttgtagtaaaattcaccttttttggggttcagttccatgagttttgggaaatgtactcaccagtgcagtcaagatgtagaacatgttcgtcaccctgaaaggtccccctgagtcccggctcctggcagccactgatctggtttctttgccttctgctgcttccagcgtgtcgtgacacagggtcacagggtgtctgccatcatcttctgcgcctggcttctttccctggcacgcaccttgttgcatggatgagcagtttgctcctttctgttaccgggtagtgttctgtggtttggatgcaccatggcttgttagtttacaaccagtggatggacatttatactgcttcctgtttttgtaagaaataaagctaatataaacataagtgtgcagtctttgtagggacatacatttttctcttagctaagtaactatgaatggaattgctgggccacgtggccagtgtctgtttaacttgctgagaaactgccgcattgtttcccatgtgcttgtccattttgcagtcccacagcacagtacgagagttccaggttttccacttcccttttggccacttgtaggtggtcagtctttttttttttttttttttttgagacagcgtcttgccctgtcgccaggctggatttgcagtggcgcaatctcagctcactgcaacctccgcctcccgggttcaagccattctcttgcctcagcctcctgagtagctgggactacaggcacgtgccaccatgcccggctaatttttttgtatctttagtagagacggggtttcaccatgttggccaggatggtctcaatctcttgaccatgtgatccgcccgcctcggcctcccaaagtgctgggattacaggcgtgagccaccgtgcccggcccgtggtcagtattttcagccaattcttatttggtgtgtagtggtatttcatggttttaatttgcatttctctgaagattaatgatgttgagcattttgtcatgtgcttaatttgccatccatatctcttctttgataaagtgtttaaattgttttaagttgcattatttactttctatttattgagttatcagagttctctatacattctggatacaagatctttgtcagatatgtgttttacaaatatttccaccagtccatagcttgtcttttcatctttttaaacaatatctttgaagaacagatttttacttttttttttttttgagatggagtctcgctctgttgccaggctggagtgcagtggcacgatctcagctcactgcaacctccacctcccatgttctcccacctcagcctctcaagtagctgggattacaggtgcatgctaccatgcccggctaattttttgtatttttagtcgagatggggtctcatcctgttggccaggctggtctcgaagtcctggtctgaagtgatccgcccgccttggccacccaaagtgatgggattataggcgtgaaccaccgcccccagccttactttttttgttgttgttgagccagagtctcgctctgtcgcccaggctggagtgcagtggcgtgatctcggctcactgtaacctccgcttcctgggttcccaccattctcctgccttagcctcccgtgtagctgggattataggcgcccgccaccatgcctggctaagttttgtatttttagtagagactgggtttcaccatgttggtcaggctggtcttgaactcctgaccttgtgatccgcccgcctcggcctcccaacgtgctgagattacaggtgtgagccaccacgcctggcccagaattgactttttttttctttttttgagtcggagtcttgctctgttgcccaggctggagtgcagtggcaccatcttggctcactgcaagctccacctcctgggttcacgccattcttctgcctcagcctcctgagtagctgggactacaggcgcccgccatcacgcccagctaattttttgtagttttggtagagacgtggtttcaccatgttagccaggatggtctcgatctcctgaccttgtgatccgccccccccttggcctcccaaagtgctgggattacaggtgtgagccacggcacctggcccacattttacttttgacaaacctcagcttattattattattttttcctggtttgtgctttttatatcctatctgcgaagtccatgcaagacccaacggcactaagatttttgcctgtcttttccactggaagtttcatagttttagattttacatttgtctctgtctggccatccttacacagccacaatactgtattgtttactatagcatgatggtaagtcagttaagtaatatgagtcttccagcttcattctttttcaaaattgctttggtttttctacacgttttttctgtgaactttagaatcagcttgtcagtgtctacaagccctctgggattttgactggaattgcattgaatgtatgaaacaatctggaggacagctgacattttaacaatactgagtcttctgattcacacacccataggtcagtgatgggagcaaggctcaggctaaagcagattcagggtgtctttctgtgtggaacgtttaggaaaagtatgtttgcatgccactgtctcctgaccaaacccttcgcttttttgtcttctagtatctttatgtatccttatagattattataggcagtaatgattaatgatgagatattaaaacgcctttgttcttttgatttaaggagagggcaagtattgaggattttccctcttgcttttgtattcagggccgggcgctggtggctcacgcctgtaatcccagcactttgagaagccgaggcgggcatatcacgaggtcaagagatcgagaccatcctggccaacattgtgaaacctcatctctactaaaaatacaaaaattaactggccctggtggtgtgcgcctgtaatcccagctactcaggaggctgaggcaggagaatcgcttgaacccgggaggcagaggttgcagtgagctgagatcgtgccactgcactccagcctgggccacagaaagagactccgtctcaaaaaaaaaaaaagaaaaaaaaaatcccaaagtgtcagaattactgtattcagctatagatgcatccctgtatataagatgcagtttcttatacgtgtacaaatgcctatcgcaggccaggtgcggtggctcaagcctgtaatcccaacactttgggaggctgaggcgggtggatcaagaggtcaggagttcaagaccagcatggtgaaaccccgtctctactaaaaatacaaaaaattagctgggtatggtggcgcatgcctgtagtcccagctgctcaggaggctgaggcaggagaatggcttgaacctgggaggtggaggttgtggtgagccgagatggtgccactgcactccagcctgggcgacagtgcgagactccatctcaaaaaaaaaaaaacaaacaaaaacaaaaaaaaaaacaaatgcctatcacagttggctcagtcactttttctgtgactgtcattgcttcaattttatgttgatttatgaaacctaagtttacacagaaaagaaattaaggactaaattaagatactgaagaattacttaagcccctgagtttttttttttctttttttttttttgagacagagtcttgctctgtcacccaggctggagtgcagtggcgccatatcggctcactgcaagctcctcctcccgggttctcgccattctcctgcctcatcctcctgagtagctgggattacaaggcgcccgccaccacgcccggctaattttttgtatttttagtagagatggggtttcactgtgttagccaggatggtctcgatctcctgaccttgtgatctgcccgcctcggtgtgagccaccggacctagccaaccccctgagtttttttaaagttctaataatactcatcaggttagctgtgtatgcaagcatattgtaaaattgcttttttttttttttatttccagttggagtctagctctgtcgccaaggctggagtgcagtggcgcgatctcagctcactgcaacctctgcctcctgggttcatgcgattctcctgcctcagcctcccaagtagctgggattataggcaaccgccaccatgcccagctaatttttgtatttttagtagatatggggtttcactgtgttggccaggctggtctcgaactcctgacctcgtgatccattcacctcagcttctcaaagtgctgggtttacaagtatgagccactgcgcctggctgtaaaattgccatttaagaggctgtgtgtaactggaggtattgatgggtgtctttgagagggtggggattcagaaaggttcaggatgggccgggcgcggtggctcacgcctgtaatctcagcactttgggaggccaaggtgggcagatcatgaggtcaaaagatcgagaccatcctggctaacatggtgaaaccccgtctctactaaaaacacaaaaaattagccaggcgtgatggcgggcgcctgcagtcccagctactctggaggctgaggcaggagaatggtgtgaacctgggaggcggagcttgcagtgagccgagatggtgccactgcactccagcctgggcgacagagcgagactccgtctcaagaaaaaaaaaaaaatttctttatgtctttcttggtcaagtgtttttttttacatatgtacaatggggatcctgagttggaaccacatactttggtaaacaaagtgcagtagtgttcacagttaccacgatcatatcccgtgttgacccaccctctcttttttaggttgcgacctttccttccccagcaataaactggtctctggagatcactgtagaattgtagtggatgaaaaatcaggtcaggtgacactggaagataccaggtgagtatgttctgagcttcttttggtgtttcttcttgtagcttaagaagcctgacttcgtgctctgtgctgtgtgccacggctgaggaggagaagaaatgctgtctttagtgtgataacagcggctcatttttataacagcacagtcatgtgtcccttagcaacagggatccagtctgagaaatgtgtcagacaatttgatcatcttgcaaacatcatggagtatacttaaacaaacctagatggtgtagcctactacatacctaggctatatggtatagccgattgctcctaggctatcaacctatacagcgtgctactgtactgaatgctataggcagttgtaacacaatggtaagagtatttatctaaacacagaacaggtgcagtaaaaatatgatattttaatcttgtgggactcctatcgtatatgcgtctgttgaaaaaaacattattatcagcccgggcgcggtggctcacacctgtaatcccagcactttgggaggctgaggcagttggatcacctgaggtcaggagctcaagcccagcctggccaacatggagaaaccctgtctctcttaaaaatataaaaattagccgggcgttgtggcatgcgcctgtaatcccagctactcgggaggctgagacaggagaatcacttgaacccgggagtcggagattgtggtgagctgagatggcaccactgcactccagcctgggaaacgagtgaaactccatctcaaaacaaaacgaaacaaaagtttattatctggggcatgactgtagttaattaggctcccaaggtattagaagatgtatttcctggtttccaggatgggacacttagtgacactttggtgtctatgacccttcttgaatgtattcaaattaagtatgtctcagaaataagacttaaaagatgctggtaatttttggttcttgcaagcctattcaagtttgatttctttccctcaaatcaaaaaatcattttttaaaactaataaattctcgttcttgtacaactgaagtacagattgagtatctgaaatgattgaaactagactgtttagattttggattgtttcagattttagaatattttcattatacttaccagttgagcatgtctgaatcaaaattctgaaatgttccagtgagtatttttttgagtgtcttgttggtgctcaaaaagttttggatttcacatttctgattagggacattcagcttagggatattcaacttggaaagtggaaagctttccaaaatcctattcatacgttaaaaatgcatatgttggtatatatattttgcataaatgcaatcacactacacatactgttgtagcgtcagcttttttctttctttcttttttttttttgagatggagtttcactgtgttgcaggctgaagtgcagtggtacgatctcggctcactgcgacctccgactcccaggttccagccattctcctgccccagcctcccgagtagctggcattgtaggcacacactaccaagcccggctatttttttgtgtttttagtagagacgggatttcaccatgctggccaggctggtctcgaactcctgatctcaggtgatctgcctgcctcagcctcccaaagtgctgggattacaggcgtgagccatcgcgcccggccagcttttttcacttacggtgttttatggagcgcttcacatgtcactgcatctacatccagctcatcttttcattatcttaggatagtttctttgtcacttcccttattggtggacatttattgttttgactttttcttactataaataacactgcagtgactctttcccaaactctgccttcatgtctgttttcttgggatgatttctcggaagggaagtctgtgtcagtgttactcagaatgtgcctattcctttttttctcttttttgagacggagtctcgctctgtggctcaggctgaagtgctgttggtgcgatctcggctcactgcaacctccgccacccgggttcaagcgattctcctgcctcagcctcccgagtagctgggattacaggtgcccgccgccacgcctagctcagatggggtttcacaatgctagccaggctggacttgaactcctggcctcaggtgatccacctgcctcagcctccccaagtgctgggattgcaagtgtgagcccccacacccggccagaatgtgcgtcttttaaatctgctgcaagtggcaggtggtcttctagcagtatgttgagagtgtgctgttctcactgcaggattttttttgtttggtaaagatcaggctctgtgagattctttggtaactgatagtttcagggatagaagactaggaagtaggttttaataggaagaactgatgctccgtttcctagtctaatagatatcagattaagttctctatttcttggcacaatgggaaaggcagggtgctggtccctagctgtcccgcctgcttcagggcctggcttccccatgctgggtgctggtcctgggctttcctgcctacatcagggcctggcttctccacgctgggtgctggtcctgggctttcccgcctacatcagggcctggcttccccgtgctgggtgctggtcctgggctttcccgcctacatcagggcctggcttccccgcgctgggtgctggtcctgggcagtcccgcctgttccagggcctgggttccctgcactgggtgctggtcctgggcagtcccgcctgttccagggcctggcttccccacgctgggtgctggtcctgggtagtcccgcctgttccagggcctggcttccccgcgctgggtgctggtcccgggccttcctgcctgttccggggcctggcttcctcgcgctgggtgctggtcccgggcagtcccgcctgttccggggcctggcttccccgcgctgggtgctggtcctgggcagtcccgcctgttctggggcctggctttcccacgctgggtgctggtcctgggcagtcccgcctgttccggggcctggcttccccgcgctgggtgctggtcctgggccttcccacctgttccagggcctggtttccctgtgctgggtgctggtcctgggccttcccgcctacatcaggacctggcttccccgcgctgggtgctggtcctgggcctttctacctgttccagggcctggcttccttgcgctgaatgctggtcctgggcctccctgcctgttccagggcctggcttccccacgctgggtgctggtcctgggccgtcccgcctgcttcagggcatggcatccctgtgctgactgcatggtggtggtactttcttatggctattgtaatttaccacaagcttaatggatttaaaaaacacaaatttgctgtcttactatagttatggaggtccagagtccgatatgggtctgatggggctaaaatccaggtctgaacagggctggtttcttctggaggctccaggggagaatttgttctctgccttttccaggttccagaggtgccacgttccttggcagaggtgggctggaggggaggggtgctcaggcagaaggaaccacgtgtgtaggggcccctgagcataagcagggctgtgtggtcggagcgtgtggtgagcggcaaagtcacacaagggagcttgggctttagcctgagagcagtgaggagtcatcaaaggggtgtaagcggaggagtgaaataatcagatttttgtttggaaagaacaggaggatgagtgatggctgcagtcgcccctcggcatctggggggattggctccagccccctgcatgcacccaagtccgtgcacactctagccccgtagccagccctgtggagcaggaggacacagaaagtcagtccagctccagcgcccctgcatgcacccaagtccgtgtgcactccagccccgtagccagccctgtggagcaggaggacacagaaagtcagtccagctccagcgcccctgcatgcacccaagtccgtgtgcactccagccccgtagccagccctgtggagcaggaggacacagaaagtcagtccagcatatgtgtgggattcattccctctcattgaaaaaaacccgtgtataagtgcatctgcacagctcaaaaccgcatcttccagggtcagctttgtgttgtaacagcagaactcagacacacacagccactgcctggtttcggaggttttacggggagacggctgtggcagttcatttgcttactgtctgcatttgctttcctgctacagacggcagagctgagtagtggcaatggtgaccacaaaacctacactgtttaccctctgtttatggaaatcgtttgccactcccatccctcagcaaaccgtggtggtcactcggatgtgagttctgtccactgctggggcctcgggagtgaagctgcagagctgaggcctgtgtggtttcagtcgttttgcccggttgccgttttgtgtgtcgggtatgctgtgctcttggatcttggtcacctgaccaacacctgatttgctgtcaggtctctgctcagaagtccccaggaggcacttcctgccccatcaacttagcctcctcctgtctgtccctgggtcagcagcatctgcattggcctctccctgggcagagtacctcaaggggcttggcagccagaccacaagctctgagtgcagggccatgtcctgcagctgacggcccagcatttagtccgcttctgcccagagccagtctcttgggagggatcagtactcattggaggcatgagttcaccggggttgtgatggctgcaaggaacagaactgtggatagcacaagtccagctcaggggaggctggaggtggaagcaccacactgtagacgaggcctccgggtccactaggaggcaaacggggagagaacccagccctgcagcagcagagctgccaagcacgtgaggaggtgtagtggctggttaggctgtcagtcagggagaagtgggcgagccatttcttgagagaatggtgaggggtgcgtggatgtgtgcatcgttacgtatttacactgttcctatgagtatttccagagtggtcatatcgagctgcttgctaatggtgctagaaaaaaaatcttgtaactccaagttattttaagtagaataaattgtgtttttgtttttttacagcaccagtggaacagtgattaacaagctgaaggttgttaagaagcagacatgccctttacagactggggatgtcatctacttggtgtacaggaagaatgaaccggaacacagtaagagagaggaaggcttgccggggtcagacccgcacgggggtgcacgtgagggcgctctctgaacgttcctcctggctacatcccttcccataggaacgttcctcctggctacaccccatttcttgctcacatgggttcctgccgtgaatagtgtctgttgagtgggagtgtcgactttgcagcctgagcccagccattcctcaggaataccactgtggccatgagcagccaatcccaaaatggcagccaaggagaaactgatggggatggtttgggttctacaggagaagaacttgagttatggggaataaaacctaggaccaggggtctggaggccattgatggttctgcttttggagaccttacaagaaacatcaaaggttagactggattccagtaagttttttcagctccagaagtcccgtttttgttttgtggaagaacagtataggacaaggaaagttatgggagtccttcgaaggtcacccctgaaatacttttttttttttgagatagagtttcgctcttgttgcccaggctgaagtgtaatggcgcaatctcagctcaccgcaatctccacctgccgggttcaagcaattctcctgcctcagcctcctgagtagctgggattataggtgcccaccaccacgcccggctcatttttgtatttttagtagagacggggttttgccatgctggacaggctggtctcaaactcccgacctcaggtgatccacccacctcaacctcccaaagtgctgggattacaggcatgagccactgcacctggccaatacttatttatttaattttttaaataaataagagacagagtctcgctctgctctgttgcggaggctggagtgcaatggcgtgatctcagctcactgcaacctccacctcctggtttcaagcgattctcctgcctcagccttccaggtagctgggattacaggtgcacaccaccacacccggctaatttttgtatttttagtacagacagggtttcgccgtgttggccaggctggtctcgaacttgggacctcaggtaatccgcccgcctcggcctcccagagtgctgggattacaggcaagagccactgcacctggccacccctgaaatacctaaagaccacagtggtgagggagaatggggcaaatatgtcttaggcatcttcagcataaacttaaccagcccctggccacacggaaggatcttgtatctgctcctttgtgtagtttgaaattataagtgaggcatagattcttcaccttcttctgcctcctgatgccattttttcccgaggcttatttcttttgtgttggtagagatgttttagattacttgttttgaaatctcttaaactgatgaatttgttattagctgatgagtcaaaataatcaacaaaaacaaatggactggagaacagaagagaaaaatgagttctcagtttgcacaggggccaccacttttctgatttgattgattttcttttagacgtggcatacctctatgaatctttaagtgaaaagcaaggcatgacacaagaatcctttggtaagtaagagtgtagcaaagaagtgggtgcatgttaggagctatagcattccttttgtgttttgagatggagtctcgctctgttacccaggctggagtgcggtggcgcgatctcagctcactgcagcctccgcctcctgggttcaagcaattcccctgcttcagtctcccattttttttttttttttttttgagacggagttttgctcttgttgctcagcctggagtgcagtggcgcgatctcggctcactgcagcctcctcctgccgggttcgagagattctcctgcctcagcctcccgagtagctgggattacaggttgcaccgtcacgcctggctaattttgtttgtttgtttgtttgtttgttttttgagatggagtcgcgctttgtcgcccaggctggagtgcagtggcgcgatctcggctcactgcaacctccacctcccgggttcatgccattctcctgcctcagcctcccgagtagctgggactacaggcagtcgctaccatgcccagctaattttttgtatttttagtagagatggggtttcaccgtgttagccaggttggcctcgatctcctgacctcgtgatctacccgcctcagcctcccaaagtgctgggattacaggtatgagccaccgcgcccggcacgcctggctaatttttatatttttagtagagacggggtttcaccatgttggtcaggctggtctcgaactcctgacctcaggagatacacctgcctcgacttcccaaagtgctgggattacaggcctgcaccaccgtgcctggccttggggctgttgcattcttaagagcatttcaatccctagagtgtctgcttgagccctggttgtgtgctgcttctgctccttttgggttacagaagctaacaaggaaaatgtgttccatgggaccaaagatacctcaggtgcaggtgcagggcgaggggccgatccccgggtccctccgtcgtcgcccgccactcaggtgtgctttgaggaaccacagccatcaacatcgacgtcagacctcttccccacagcctcggcctcttccacggagccttctcctgcagggcgagagcgttcctccagttgtggtgaggtcacatctcatgaggtcttggtgctggttgcatggtttttgttcactactctttacctgtgttgttacagaggcagataagcgactgaggactggcatgaggttctcagtagtgagatttctgtaggagtcaatattgagtgtgttgttcccttcacttcccaagagaagtgaagatcagggactctagtaccattgtgtattttgcagtttcattgagactataattcgcataccataaaagtcatccagccgaagtgtacatttcagtggattttagtacatcacaaggtgtgggaccatcaccactcattgacacgaaaaggaaaccggtgcccaccagcagtgactccacatgtccccttcccctcggccccaccagcagtcactccccatgtccccttcccctcggccccaccagcagtcactccccatgtccccttcccctcggccccaccagcagtcactccccatgtccccttcccctcggccccaccagcagtcactccccatgtccccttcccctcggccccaccagcagtcactccccatgtccccttcccctcgaccccagcagcagtcactccgcatgtccccttcccctcagccccagcagcagtcactccgcatgtccccttcccctcggccccaccagcaatcactccccatgtccccttcccctcggccccaccagcagtcactccccatgtccccttcccctcggccccaccagcagtcactccccatgtccccttcccctcggccccaccagcagtcactccccatgtccccttcccctcggccccatcagcagtcactccccatgtcccctccccccagcccctggcagctgcgtgtgctttcggcctctggatttttctgttctagacacttcacagacatggaatcatgcgtgctcttttttgttgttgttgagacggagtctcgctctgtcgctcaggctggagtgcagtggtgcgatctcggctcactgcaagctccgcctcccaggttcacgccattctcctgcctcagcctcccgagtagctgggactacaggtgcctgcaaccacgcccagctaatttttttttgttttttgtttgtttgttttgagatggagtctcgctctgtcacccaggctggagtgcggtggcgcgatctcggctcactgcaagctccgcctcccacgccattctcctgggtccacgccattttcctgcctcagcctctgagtagctgggactacaggcacccgtcaccacgcctggctaattttttgtatttttagtagagacggagtttcaccgtgttagccaggatggtctcgatctcctgacctcgtgatctgtccgatcggcctcccaaagtgctaggattacaggcgtgagctgccgcgcccagccgtgactgggctctttcacttagcgtggtgttttcagagttcatccagaagaggatgttatttaaaactagttttgcagatgctgttccttacggcatgactcttacctcttccatggtcattgggaagaaattccatctgggtgcagcgtgacgggaatgttttctgttttcttttagggtttgtcacgtggaggatgtgtacatatggattctctaaattggatcgcgctatacatattatttttttttaattttcttagctattctctattctagattatgttttgaattagcttttccagtttaatagaaaaatctttttgagatttttgatttggggagaattgacagttttacagagcccaggaaaatggtgtttctccttgtttgttaagctcttcctgttcttcagtgaagtctcacggctttcttcgtgtcgtctgggctcattcttagtcctggagtgcttggctctcgcgttcttacattccatagcagtctgcagattcctatgaacagaagagcctctgaatctcagattaggctgtgtttcgatctgacaggaaagctggttccctgataaaaagtccagaaatgcccgctcagctcagctactcctgaggtcaccagggccttctgtgcactccacgctgctgtttttgctcaggtttttgcctcgaggtttcacagtggctgccagagctctgaacatcactgacacattcatggcaggcaccaggaagcctccggagaagggacctttgctttccatggatctgttggctgatccgcagcagcaagagccatgtctcccagaagactgctccctctgtctcatgagccagcctggctgctctgctacaggacactccttgtttttatgtctctctgtgtattccagtgggatttggggaaggagcggcatcgggtgcagggactcagtgtgccttcttgaaaccagaaacctctcacgctctctgggcctgtttccacttctgttgatgtggtttttactccgttgtatgccgttgctctgtcttcacacgggcagccacacctctcctgttcgttgatgttcttgaggccttgttgcatccgctccttccttcttcagaggctcctttggatgagcccagctcctcagcagcagagtgctctttattttctgtttttttgagacagagtcttgctctgttgcccaggctggagtgcagtggcgcaatctcggctcactgcaacctccgcctcccgggttcaagtgattcccctgcctcagcctcctgagtagctggggtcacaggcgcgcaccaccaccacgcccagaaaatttttgtatttttagtagagacgttgttggccaggctggtcaccaggagcagagtgttctaaaagcatacctcagtctgatggatgacatcccagccatctgaagagtaacatccagatgtgttgtaacattccagtgtgttgtaacattcctgtaacattccaatgtgttgtaacattctggtgtgttgtaacattcctgtaacattctggtgtgttgtaacattccggtgtgttgtaacatttggtgttacgcggtgtgttgtaactttctggtgtgttgtaactttctggtgtgttgtaacattctggtgtgttgtaacaatcgcggtgtgttgtaacatccggtgtgttgtaacattccagtgtgttgtaacatttggtgttacatgctgtgttgtaacattctggtgtgttgtaacattcccggtgtgttgtaacgttccagggtgtgttgtaacattccggtgtggtgttccggtctgttgtaacattccaacattccggtgtgttggtgtgttgtaacattccagtgtgttgtaacatttggtgtgttgtaacattccggtgtgttaacattccggtgtgttgtcacattctggtgtgttgtaacattctgatgtgatttcgggactcacctgggaggacttctcaggtgctaattggggacactaagttgcaggcaagactgtggagagtgagtgctatgtagtttccacctgatatttctggagataagaggaacagcggagaccaaacccatgacagacaagtttctactagcctgtctcctgtagactaaacacaaccccggcttctcagagcctctttgatttacctttgttttaacatcataaccttaaatttatgagtgaaagaaaataacacttcaagatgaaagcatctcagcactgggcacagtggctcacgcctgtaatcccagcactttgggaggctaaggtgggcagatcccttgagcccaggagttcaagaccagtttgggcaacatggtgaaaccgtatctttacaaaaaatacaatataaaaaatacaaaaattagccgggtgtggtggtgcatgcctgtaatcccagctacttggaaggctgaggagggaggattgcctgagcctgggaggcagaggttacaatgtgctgagattgcaccactgcactccagccttggcaacaaagccagagcccatctcaaaaaaaaaaaaaaaaaaaaaaaagacctgtaatcccagcactttgggaagccaagacaggcgaatcacttgaggtcaggagcttgagacctacctggccaacatggtgaaaccccgtctctactgaaaatacaaaaattatccaggcatggtggcaggcgcctgtagtcccagctactcaggaagctgagacaggagtttcacctgagagaggaggatcacctgaggctgggaggcggaggttgcagtgagccgataccgcgtcactgcactccagcctgggcgacagaccaggtctcaaaaaaaaaaagaaaagaaaacatgccagatttgaatagccacctgaatgctgaagttttaccagctctcttgggctgtgtacccttcatcgtatcttccaggttccttaaaacctacccttgggcacagctgggatgtgcactggctcttcacagctagatccagcatgcactgactctccccgtgcagggacagccccagaggaatagaggtggcgttccggccgctccagcgtggcccacagcgtttcaagtgcagcaagcacagacaggacgcggggttactagtattttggattgactgcagattttgaactgtctgcctagatgaactataccatgtccctagggccaagtcccatgtgcattttgtggctactagaccctcttcagaaatcaaacacaaaatagctctggcctgtaaagaaaacaaacttcaccagtaaaattgtttcctgttcctatccaccaatgtgcatagcacagtgtgtagtctgggtaatacggtttgcataattttttgataatgttctacttaaaaagggcagcgtatttatatattacttatgtaattaaaaaaaaaattcttctggccgggtgtggtggcttacgcctgtaatcccagcactttgggaggccgggtggttggatcgcctgaggtcgggagttcaagaccagcctggccaacatggcaaaaccccatctctactaaaaatataaaaattagccaagtgtggttgcgggcgcctgtaatcccagctactcgggaggctgaggcatgagaatctcttgaacccaggaggtggaggttgcagtgagccaatatcctgccactgcactccagcctgggtgacagcacaagactctgtctcaaaaagaaaataaaaataataaaaaataaaaattcttctatctgtatgcctaagtgtatgcatactaacaaaataagtatagttactgcttattgagcagctactaaatgtgaggcagtgtgccaggtacattctgtaagtggtaagatggtgctcctctccacgttggctgagcacggggcgctggagatgatggcgtgagtgggtgccggctgggggccggcccacaggctgtctctttccttctgttcgtatatgaggtggtttgtccccaaaactattctgttttctttcagctgctgtaagccagtttcttgtgtttttttttttcaaataataacacttacatttgaatactgtaagctagatatgtattatgctgtaatatgataaactaagtctttattaagatataggttattcacacctgtaatccttattcacacctgtaatccttattcacacctgtaattccagcacttggggaggccgaggtgggtggattgtttgggctcaagagtttgagaccagcctgggtaaaatggcaagaccctgtctctaccaaaaatacaaaaaacaatttagctgggcatggtggtgcacacctgtagtcccagatactcaggaggcagaggtggaaggatcgctttagcccaggaggcagaggttgcagtgaatgaagatctcgccactgcattccagcctgggtgaagagtgagaccctgtctcaaaaaaaagatagaggtgattagaaagtctgcctgtttttctgccaaggtcattcctgtcgttatgactctggcttcttgctcgtggagatagcgctctccctacaagtcactgtgctgtatccttcccgttatcacacctcttgtaaaatagttcacacgcagcaccatctccacccgttggaagctatgcatccctccactggagcatctgtgctttacacagacttctgtttttttttgtttgtttgttttgttttactttgtttttttgagacggaattttgatcttactgcccaggctggagtgcaatggcgcgaacttcgttcgctgcaactccgcctcctgggttcaagcagttctcctgcctcagcctcccaagtagctgggttacaggcatgtgccaccacacccggccaattttgtatttttagtagaaatggggtttcactgtgttggtcaggctggtctcgaactcctgacctcagatgatccacccaccttggcctcctgaagttctgggattacaggcatgagccaccgcgcctggcattttttttttttttttaagaaatgaggtcaggccgggcgcggtggctcacgcctgtaatcccagcactttgggaggccgaggtgggtggatcacgaggtcaggagatcgagaccatcctggctaacacggtgaaaccctgtctctactaaaaatacaaaaaattagccgggcgtggtggcgggcacctgtagtcccagctactcaggaggctgaggcaggagaatggcgtgaaccagggaggcagagcttgcagtgagccaagatcacgccactgcactccagcctgggtgacagagtgagactctgtctcaaaaaagaaaaagaaaacaaaagaaatgaggtcttggccaggcacagtggctcatgcctttaatcccagcactttgggaggctgaggcaggtggatcatgaggtcaggagatcgagaccatcctggctaacacggtgaaaccctgtctctactaaaaatacaaaaaaattagctgggtatggtggcgggtgcctgtagtcccagctacttgggaggctgaggcaggagaatggcgtcaacccaggaggcggagcttgcagtgagccactgcactccagcctgggcaacagagcaagagtccgtctcaaaaaaaaaaatgaggtcttgctctgttgtgcaggttgggagagtgatgtggtcatggctcactgtagcctcgaactcccgggctcaagtgatccactcacctcagcctcctgagtagctgggaccatatgctcgtactgtcacgcctagttaatttttttttcttttttgtattttttgtagagatggtgccttgctgtgttgcccaggctggtctaaaactcctgggatcaagtgatcctcccaccttggcctcccaaagtattgtgattacaggtgtgagccccatgcccagcctcagacctctattttttatttttatttttttttccccagagggagtttcgctcttgttgcccaggctggagtgcagtggcacgatcttggctcactgcaacctccgcctcccgggttcaagcaatttttctgcctcagcctcttgagtagctgggactacatgcactcgccaccacgcctgtctaatttttttgtatttttagtagagatggggtttcaccatgttggccaggctggtctcgacctcctgacctcaggtgatccacttgcttcggcctcccaacgtgctgggattacgggtgtgagccaccgcacccggcccaaagctctgttgtaacaagtttatgacacagtgtgtatcatatgaccacgggtatgtgggtttgccctgcgttagactcggtgctcgagggctaagcctggtcacagacatctccgcatttgtttctctgcaaatgggctccttgcccccagctccaccccacgtagagataggcacaaatagagttaagatgtgagttgagtgagcacacactcctcgtaagccacttgtcattcctaaactacgacatctcaggctgccagctgcactgggctccagtcagtgacaccttacaggcatggttctctcctgagctggatggatcagcacctatcttgtttgattcctctcacagggtctgggggtggtggcatctcccctaaaggaagtggtccctctgtggcaagtgatgaagtctccagctttgcctcagctctcccagacagaaagactgcgtccttttcgtcgttggaaccccaggatcaggaggatttggagcccgtgaagaagaaaatgagaggaggttagtgtctggttgtgtgtgtcctcagtcctctcgtgtgctcctggggcatgcgggggccgctgccatgctccgtgctgtggggcattgcttcctgcaggggcatgtggaccctgcctcaggttgatgcctgtaacacctccggcattttcattcagaaaacctgggcctgtttttttgcggtttgcataatccagatagaactgtgatttgctacaggctgttctcttggtctggaaatagtgcattctgaattgcagaattaatctcaaaatcctccttcctggccaggtgcagtagttcatatccgtaatcctaacactgggaggccaaggcaggagaatcacttgaggtcaggcgttcgagaccagcctgggcgacagagcaagactttatctctaaaaataaaaatcaagcctgacaccgtggctcccgcctataatctcagcactttgggaggccaaggtggacggatcatctgaggtcaggagttcaagaccagcctggccaacatggtgaaactccgtctctactaaaaatgcaaaaattagctgggtgtggtggtgcatgcctgtaatcccagctacttggaaggctgaggcaggagaattgcttgaacccggcaggtggaggttgcagtgagccaagactgtgccattgcactgcagccggggcaacaagaacaaaactccatctcaaaaaaaagaaaatcaaaaagaaagccctctgtcctggtaggacaataatttctaaaaatgtagcttaaatcttcacattgaagatgatttagggagaagtctgcactttgaaagccaaagttaagattattagaaaacatttgggaatgttatggtagaagcattgctgtatagcagtccagagagcagccagccactggggcactgtgacaggaaggttctaggaggggtccccagggaaagaaattaggttatctgacacgtggggttgatcggtgtggggaaggtgtggaaagagtcagcaacagttacacaggaaaaataagcacaggaatgaggaaattttaattctagcaaacatgaaaaattgtgtaagtcacacaacttaatctagtaaactacttggctcagcagtgaatacttgcataagcataataatacaaatacagtatcatgaactaatgtaatctgttaatgtaatgttggcaggggtgtctcaggacagagtttttctctaccttaatagatgtcaggaatgatgtctaaaattgataaatcaaatgtaccatgataacttagaaacacagaggtaaataccagaagaaacagctcaaagacatgaaaatagttttcctccgaggagggaaattgggtgaggagcggctgagacggagggtgactgcctttgttttcttctaaatatattatgtatacatttttttaagagacaggatcttgctttgtcacctaggccagagcgccgtggtgcagtcttggctcactgcagcctccacctcctgggctcagactgtcctcccacctcagccttccgagtagctgagaccacaggtgcacgctaccatagctggctaattttttttcccatttttttagagatggggtttcattatattgcccagactggtcttgaactcctgggctcaagcgatctgcccacctcagcctcccaaagtgctgggattacagttgtgagccattgcacctggcttcttctaaatacttggctttttaaattgtgtacagtttctttaattaaaaataaaaattaattgattaccaacatctgagcattatagaaaaataaaaacaccagaagagggtggggcgcggtagctcacacctgttaccctagtactttgggaggccgaggcgggtggatcacgaggtcaggagattgagaccatcctggctaacacggtgaaaccctgtctctactaaaaatacacaaaattagccgggcgtggtggtgggcacctgtagtcccagctactcaggaggctgaggaaggagaatggcatgaacccgggaggcggagcttgcagtgagccgagatcgcgccactgcactccagcctgggcgacagagcgagactctgtctcgaaaaaaaaaagactgcatgtatttccttctcggttacgacagttagaacacatccctttctcctgtggacggggaccttgacctgaacctgcgtgtatttccttcttggttacgacagaacacatccctttctcctgtagatggggaccttgacctgaacgggcagttgttggtcgcacaaccgcgtagaaatgcccaaaccgtccacgaggacgtcagagcagcggctgggaagccagacaagatggaggagacgctgacatgcatcatctgccaggacctgctgcacgactgcgtgaggtgcgaccgtgttcacccttggctcacggaacatggcactgcaggttcttcgtcccgtgtggggcagggctgggcatgagacaagcctgcaggtcctgtttggcctggcatctgctgaggttactctgtcacccagataagtgggtggagtgggtggagtgggtggagctttctcagcccactgcaacctctccctcccaggattgagcggttctctgacctcagccttctgagttgctgggactacaggtgcacaccactatgcctggctgactttttttttttttttaatgttctaaatattttttattcctttttttttttttttttttttttttttttagatggagtctcgctctgtcaccaggctggagtgcagtggcacagtcttggctcactacaacctcagcctcccgggttcagacgattctcctacctcagcttcctgagcagctgggactgcaggcgtgtgccaccatgcccggctaatttttttgtattttttagtagagacagggtttcaccatgttggccaggctagtcttgaactcctgacttcaggtgatctgcccacgtttgcctcctaaagtgctgggattataggcgtgagccactactcccagccaccctgctgatttttgtgttttttgtagagacggtttcgccatgtagcccggggtggttttttgtttttgtttttgttttttggagttagagtctcgctctgtcacccaggctggagtgtagtggtgtgatcttggctcactgcaacctccacctcccaggttcaagtgattctcctgcctcagcctcccaagtagctgggactacaggcatgcgtcaccacatctggctaatttttttgtatttttagtagagacgggagtttcaccatattagccaggctggtctcgaactcctgcactcaggtaatctgcccaccttggcctcccaaagtgttgggattacagacgtgagccaccccgcatggctaccactttcattctactcgtggcaccaacaaggaggaaacctggaacccagagccggaggctgtagaccccacaagttttgagtgtgtgggtcgtgtgtgaccccgtgaactctgcaaacagatgaaaggaactctgcacattttaaatgctccttatctgggaaggtgtatttcgcatagaatgaacgtaggagccgctgaggaagggcctccttgcttttccgcgggaactcaagagtgacaaccttccaacttctgggccagaaacacttgctgtctctgttgtttgtgttcctgaagtcataatctactcgcctctgtctttcctgaaaacacagaggccgtgtggcctctgatttcttttcattaaccaagactgacttaaagggtttttaggttgaacgatggctgggcccctgtaggcccttccgtggtggggctgctgcggaccttggtcgagggtcgcggttgcatctgtgggactgtctggacactgttcctcttgcactttcagtttgcagccctgcatgcacacgttctgcgcggcttgctactcgggctggatggagcgctcgtccctgtgtcctacctgccgctgtcccgtggagcggatctgtaaaaaccacatcctcaacaacctcgtggaagcatacctcatccagcatccaggcaagtgagggcatccacaccagcacccgggcacgtgagggcggtccctccaccaccacccaggcacgtgagggcatccacccagcagcacccgggcacgtgagggctgtccctccaccagcacccgggcacgtgagggtggtccctccaccagcacccgggcacgtgagggcatccacaccagcacccaggcacgtgagggcggtccctccaccaccacctgggcacgtgagggcatccacccagcagcacccgggcacgtgagggctgtccctccaccagcacccgggcacgtgagggctgtccctccaccagcacccgggcacgtgagggtggtccctccaccagcacccgggcacgtgagggtggtccctccaccagcacccaggcacgtgagggcatccacaccagcacccgggcacgtgagggtggtccctccaccagcacctgggcaagcgagggtggtccctccaccagcacccagacaagtgagggcggtccctccaccagcacccaggcaagtgagggcatccacacaccagcacccaggcatgtgagggcggtccctccaccagcacccgggcacgtgagggcatccacaccagcacctgggcacgtgagggcagtccctccaccagcacccgggcacgtgagggcggtccgcccagacccctccttccgcagcactgcgcacgcgagctcccagcagtgtgagctgtgtctgcctgccatgtctcactgccggtgaatggcgctgtgtcctttcaattctagacaagagtcgcagtgaagaagatgtgcaaagtatggatgccagaaataaaatcactcaagacatgctgcagcccaaagtcaggcggtctttttctgatgaagaagggagttcagaggacctgctggagctgtcagacgttgacagtgagtcctcagacattaggtaaatcatgcccctggctcagagcagagtgtgtgagccagaggagcatcacaaccgtgaccgagagctcactactgggtggacagcatgggtcctgagatctagttctgccctgagcagccaagctcttaaatggcttgagcttgttttctgatattggatagtattagcacctcccctgagaggcgtggcagggactgggtgaacacttagcggggtagccagggggtagccagcagagcgtcagccgcaggcgactgctgtagacatttgcaccctcggctgacacccttccctttgcttcgactcgtcatgggtgtggcatctctggctgtgacagagggacatcattccatgttattttttcccacatgagcacatgtattctttgtagttgatctagcgactataaagtcctatagtataaattgcaatgtttatcatttgtcaggacgttattacagaagaggcaccatcaccaggccaagacaatcccagcctcagagaccttatttatctgctgacatgttgaggtttcctaatgcacaagaccggggtctgaatgttgggtcgaggccatgatatttaaaaagacaatgaacgacaaaaaaaaacacttgaaacttttatctttatttccttttgccaagtttagcatgtgactgttaagcaaaaagaaggaaaccaaaaccactttagcattaagattttgctgcctctacccagccattcatacgtgtgtcataatcgttaacaaaatgaaatgtaatgtactaacaaattttttttttcttttttttttgagatggagtgtcgctctgctgccaggctggagtgcagtgacacgatctcagctcactgaaatcaccacctcctgggttcaagcgattctcctgcctcagcctctcgagtagctgggactacaggcgcatgccaccacacccagctaatttttttgtatttttagtagagatggggttttaccacattggccaggatggccttgatctcctgacctcgtgatccgccggcctcgacctcccaaagtgctgggattacaggcatgagccactgcgccctgccaatggcacaatcttggcgcattgcaacctccgcctcccgggttcaagcgattctcctgcctcagcctcccaaatagctgggattacaggcatgcaccaccaaacttggctaatttttttttcttttctttttttttttttttcgagacaaagtctcgctctgttgcccaggctggagtgcagtggcatgaccttcgcccactgcaacattcatctcctgggttcaagtgattctcccgtgttagcctcccgaggggctgggattacgggcatatgccaccacacccagctaatttttgtgtttttagtaaagacagagtttcaccatgttggccagactggtctcgaaatcctgacctcaagtgatccgtctgccttggcctctcaaagtgctgggattataggtgtgagccaccgcgcccggccgctaattttgtatttttagtagagacagggtttcaccatgttggccaggctggtcttgaactcctgacctcaggtgattagcccgcctcggcctcccaaagtgctgggattataggcgtgagaaacaaatttattttttgtttgtttgttttttgagatggagtttcgctctgttgcccaggctggagtgcagtggctggatcttggctcattgcaagctccgcctcccgagttcacgccattttcctgcctcagcctcccgagtagctgggactacaggctcccgataccatgcccggctaattttttgtatttttggtagagactgggtttcaccgtgttagtcaggatggtcttgaactcctgacctcgtgatccgcccgcctcagcctcccaaagtgctgggattacaggcatgagaaacaaatatttttatgaagctgggattcggctgcatgtacagctcggtaatgtccccagcgtttgaattgggaaacagttgctgctgtgcatttcttccatccgtatttgtgcacatgcgcagtgacgtcaatgtttagacgtgaagcagtcgagtcacagagtgtgactgggaattggaccttgatagacgtttgataagtttgttatccagacaccgatcggaaagggtgcacctaatgcactctacaaggtctgcatgagggcctctttttgccagtttagaaggagaagtaggtaatctcattttcatttacattttttccttatgaaaaaaatgtcttttcactgtgccttgttttttacctggttgggtcttacctgttggccttattggcccctggccttggtgtgaggcgcagaaaagcctttcaaatggagaggagagcctcgtgtattttttcctacaggttctttttttacagttgacatttttatctgctcgtttttggaagtacaagggaagtgtggaaaagacaagtgattcggggctttgcaggcgcctggtgtggctcccagtacgttgcccaccgcgctctgcttttaacgggagagtaggcgggtcctgaggagcacggggcgtgcgcgcacgtgctggcccttgccctgctctggcgtcgtctcctgggagcacacgtcagtggggacctagtgaccctggggatggggctccaaagcgtgggggctgagctggggatgcagagtggcgtgtccttgcccttcgactcgttctggtccctctctaacactggggtgctggacaggaatggggcccggcccttcccctcacaccaagcagctgagcgacggtggagctgagctgtgatggctgcggacccgcgttgcaccggccctacctgagaggcttggggcctgcacacagctcggccctgtgcttccttgcagccagccatacgtcgtgtgccggcagtgtcctgagtacagaaggcaggcggcgcagcctccccactgcccagcacccgagggcgagccaggagccccacaggccctgggggatgcaccctccacgtccgtcagcctgacgacaggtgagccgcgccgccctcaggcctcagccttcgcgtgagtcactttgtggctgtgcccggtgctgacgtgcacgtggccgcgctctgcccgcctcctgtctgcactgctcgccccctttgggccctggcctcattggtctccctgcactcacagttggttgcttttcgtgactgattttgggttgggaaatcagataagtaactgttcattcgtagcccctcctgaacactcctgggaattaacaaccctgaccttaatacttggcctctccccagccactgcctcagggcagctgatgtcccccagtgggtttgccagacccaaagtgatgatcgcatatctgtccctcaagtaagaggcgggcttctccccagcagtggcgatgtcaccagaagctgccctgcgtcaccagagttggcttaatgcgaaatgtttccccgtcaggtgcctttttccagcaaggggctccaggtgctatccaggaagtcagaggagagctgggcagggggtatggaggcttcacttctctgccctgctcactccagactcatagaatgggaagatgccctcaggggtcctggcttcctggccacgggtgggggctgagcacatcacgaggccactggcctgggatggatgtagagccacatccttgtgctgcattctcagtggcttcttgtagaacccgtggacggaacggacaaagcagtgcttggcgttggtatggatgcccatccaccagcctgggtttgcttccgccactcagcagctctgtctgggtcactggacaagctccttcctttgcatggtgggaccagcgcctccctctggggtcctgggtccctcagtgggtgctcagtgaacctgggtggtgaaattgccgtccttatggccggcatgttgacctcgcagggtctttcctgtgtgggtggcgagtgtccagggaacttggctgtgtgggctcagacttctgctgccacatcgattggtcttgtgcaccgtggctgtcctttgtttatttgagagatggctgttctctcacctgagcggaaattgaacacacagcttgttttattctatatcataggttctatgggcttgtcctctctttataggaaataatagaaaaccttcaacagatcggccgggcacggtggctcatgcctgtaatcccagcactttgggaggccgaggcgggcggatcacaaggtcaagagattgagaccatcctggctaacatggtgaaaccctgtctctactaaaaatacaaaaaaaaaaaaaattagccaggcgtggcaggcacctgtagtcccagctactcgggaggctaaagcaggagaatggcgtgaacccgggaggcggagcttgcagtgagccgagatcacgccactgcagtccagcctgagcgacagagtgagactctgtctcaaaaaaaaaaagagaacttgcaacagatctttgaaatcttgctccagctgctaaatcaaagatcatttttggttattgttaatctgttttgactccccgagtttgggtggcagaaggtccccggtggtttagcagggcaggtctgcttcttccccggctgtctcaggtgcacctctcctcgctgtgcttcccggcggcctctctaacctgctgtctttctgccctgggtcccacgtgctccggctgaatgtgcgtgtgcttcagcagtccaggattacgtgtgccctctgcaaggaagccacgccctgtgcacctgctgcttccagcccatgcccgaccggagagcggagcgcgagcaggacccgcgtgtcgcccctcagcagtgtgagtgcccgcgccaccgcacgcaggcgggttcctatctgtccttcaggggtcaggtttcaaagcggtgttggccttagggtaacctgtgaagtaaggatgccgtttctttttttccatcagtgtgatcagttttccccacgtcaccatattgaataatctatcttttcccaccatctagtaacattgccccttcacaggctacatctccatccaccgggggctcggcttggatctgtgtctatcccctgccagcactgtggttgctttataatgtgtcactgttaaacctcttatatgaatgttgatgctttagtatacaactctggccaggcacagtggctcacgtctgtaatcccagcactttgggaggccaaggtaggtggatcttctgtgtccaggagtttcagaccagcctgggcaatatggtgaaaccccatctctacaaaaaatacaaacattagccagacatgatggtgtacacctgtaatcccagctactcgggaggctgaggccaaaggatggcttgagtccgagaggaggaggttgcagtgagctgagatcgtgccactgtactccagccttggcgacagagggaaatcctgtctcaaaacaaaacatatatatatatatatatatatatatatatatatgcacacacatacagttattattaaaaatggagcttgtcctttatttcatggctgttttaatgtattcctgcagaaatgtctgtctatgtcctttgccttttttttatgacttcctaatttgtcagagcttcttatatgtgaaagtgttaggtgaagaaagccctagccctgttgagcaccgcggttggctcctgccgcacacaccggtgttgctctgtgcactgagccctgtgtgagcagcacacaggaccacagcactggttctgtctggaatggcttaaaaatgttctgggcactcaggaaaccaaacaggttactgctggggtctgtaccctgagactgggcttggcaggggtggggcctagcctgcagcgtcgggacacatggccgtgggacacacccggtgatctgggcggtcgctgcctcgggggtcatccacggcaggcgctggccactgctgatgctgcacgtgggagggcaggtgagaagccacagagaacagcttgtcccatgtctcacacacgcggtggtcagcagatggcagctcggcccagcttttccccaggaatccaaactcttcactctaatttcacagagcatgcttcgtatatagaggcattggtgaagtggtcgtaggcgttataagacttaaggactcaatcctgtgagaattttagcgagggtttacctaacattatattttagggatttccattgtatagaatatcagacaattaaaaataatttcctttgggaggctgaggtgggtggatcacgaggttagaagatcaagaccatcctggctaacatggtgaaatcccatctctactaaaattacaaaaaattagccgtgtatggtggcgggcgcctgtagttccagctacttgggaggctgaggcaggagaatggcgtgaacccgggaggcagaggttgcagtgagccgagatggcgccagtgcactccagcctgggtgacagagcaagactctgtctaaaataaataaataaataaataaataacgtctacaaagccaaggtgacaacatggaaaaatacctaggtagaaaaaggccacctaggctgggcatgggctcacgcctgtaatcccagcactttgggaggccaaggcaggcggatgacctgaggtcaggagtttgagaccagcctgaccaacgcggtgagaccccatctttactaaaaatgaaaaaattggccagttgtgggcatctgtaatcccagctactggggaggctgaggcaggagaatcgcttgaacccaggaggcggaggttgcagtgagccgagattgctccactatactccagcctaggccacagagcaagactctgtctcaaaaaaaaaaaaaagccacctgaatatgtgcagttgggggcaagcatgttgcatgttcagagctagaatgaagcccatcgaagccgtgttagggtggtggagcaggtgagatttctttcttttgtgtctctcactgttttcctgggatgagcatgtggtgttcagtttaagaaacgatgtgggtctgaggccgggtgcagtgcatcacgcctgtaaatgttcagtttaagaaacgatacgggtctgaggccgggtgcagtgcatcacgcctgtaaatgttcagtttaagaaacgatacgggtctgaggccgggtgcagtgcatcacgcctgtaaatgttcagtttaagaaacgatgtgggtctgaggccgggcgcagtgcatcatgcctgtaatcctagcgctttgagaggctgaggtgggaggatcccttgaagccaggagtttgaaaccatcctgggcaacatggtgagaccctgtctctacaaaaataaaaaataaattagccgggcctggtggtgtgcacctgtagtcctagctactcaggaggctgaggtgggtggatcccttgaacccaggaggcggaggttgcagtgagctgtgattgttcccctgtactccagcctgggccacagagcgagactccatctctaaaaaataacaaaccagaaaatgtgagcctcgccttttttcagggatacaactcctcgccatcacagtccatcacaacctgggtggcgttagctggatgtggccccgccccgatttccatgagacccctcctgaacaatgtttccagaaagagttgagctcctgagcctggtgctgacgaattgtgttggagacagccctcagcgctgagtgcgtgtaacgagtgtcctctctccacaggtgcggtctgcctgcagcctttctgccacctgtactggggctgcacccggaccggctgctacggctgcctggccccgttttgtggtaatactggctcttcaggccccagttgctttgacctttgcatgttctcttggtgaacttgagggcaggggatggtggggtccatagcctgatgtttatagggatgaggccactgttggtcatcaaatgatacctattcctggctggactgcagaggtgtgtcaaattcgtgttagctcaaaatcaagccttaacagaattattaggggagatactcccaggacagaatccttgcagcggggttctgctgttacgataccaagaccaggtgctggggagactcggagagctgatctttttaaggagggagtggaatggaaatcatttctgcttgtcctctgtttaaaattgagttttatcattgaacttcttattctttctagaatctgtaatgaaaagaaatatgtttatcctcagtgtcgggcagacagtgctttcctgcgacatcattataaacaggtaacattgccccttcatctcggcagagctcaacctgggtgacaagtgtctggacggcgtgctgaacaacaacagctacgagtcagacatcctgaaggtaccgactcgctgcgggctggggagccgggagccacattttctccctagtgcagccagctggttctctgcattctattggtgtttatctgttttacctgacccgctgcgggttggggagccgggagccatgtttcctcactggtgcagccagctggttctctgcatgccattggtgtttgtctgttttttccgtattccaaaaataggtatttcgtttttgtgcctcctgccaccaattcgtaggagccgcttcccgcagctcttgttcccggcagctcttgttcccacagctctcggtgagggcttcttgaaggtgccgccctttagcaagaccagggccttttctctggtccctgtctcttctggccatttgccttcccacgtctaggaagctacctcggtttctaggatttacatatgtttaacatgcgcattcgccctcctgccgagcactttgctgacagcacacacaatggtggggccttgaggcttgccacagacacacctggcaggcgcccgctcagccccacactctgctttgatgcccacagaaggagctcaacagctcgtgtgtgtttgaagggcacagagaacagatgccaagtcctcagcttttcttgtgcaacagcctgggctcgttgctgggctgtgtgcactgtggcctggctttcatgtctcattcacacctgggctgtgtaggtcttggcagaacttttgagagactctggtaactgttacactggaaccttttgggacttccaggaggctcttggacaagacttctcgtgctgcaggccgtgaacgtgcagccctctgcaaatgccacttataagggtctgagctttggctttgcacactttcaggggccttttatgaaatgttttctctcgttatttcagtgtttcttcctctaaacgagtatttcttattcctctctttttttgcgtcacagaattacctggcaaccagaggtttgacatggaaaaacatgttgaccgagagcctcgtggctctccagcggggagtgtttctgctgtctggtgagttcttctgttgcctcctgctctaaggcgcatgtgagtgtccagggctgtgcctgcgtgtctgctctcccagtgacaactccgaccttcacccaccctggaagagaggaaaaagatcctgatgctttcaggttgtttttgtttgtttgtttgttttttgagatggagtctcgctcttgttgcccagactggagtgcagtggcatgatctcagctcaaggccccctcggcctcctgggttcaagcgattctcctgcatcaacctcctgagtagctgggattacaggcatgtgccaccacacccagctaattttgtatttttagtaaagatggggtttccccatgttggccagcctggtcttgaacttctgacttcaggtgatctgcccacctcagcttcccaaagtgctggaattacaggcgtgagccactatgcccggccttcaggttgttttttgaaagttgagcgtgggccgggtgtggtggctcacgcctgtaatcccagcactttgggaggctgaggcgggcggatcatgaggtcaagagattgagaccatcctggctaacacggtaaaaccctgtctctactaaaaaaagaaaaatacaaaaaattagccgggcgtggtggcgggcgcctgtagtcccagctactcgggaggctgaggaaggagaatggcgtgaacccgggaggcggagcttgcagtgagccaaaatcacgccactgcactccagcctgggggacagagcgagactccgtctcaaaaaaaaaaaaaaaaagacagttaagcatgaacctgtatgacatattccagcagcttctatccttgtaggggagggtgggtgtggccgactgccactactgctgcttgagaccctcactacagcagttactgctgttactgcttgagaccatcattacaggactgaacaaagggacaaacgtagaaatgaaaacaaaaagacaaaagaaacttttaaggaaaggcaacatggggaagaagaggagagctccctgcttctagtgagtaaaggctgcccctgagcttctacagcccttcatatttattgggtaacaagagcaaggaggaggtaacaactgggcagctgctaaattgatcacaggttcatactgttactgacaggcttcaattatgcctaatcataagaaacatttgtgtggcctccaacaggtggggccagcttggagggtctctaccacttgtctatccagaggtcctggggtcagttgtcctgggaccctcggggacttggtgaatctcttgcttgatgtgtcagtcacttggtgagggtcactcctctccaggggggcacacgatgctttgtggagtatgataatttatcactaagggaggctgtagaaatatatatatgagacaggttcttgctctgtcgcccaggctggagtgcaggggcatgatcacagctcactgcagcctcgacctcctgggctcaagagatcatctcacctcagcctcccaagtagctgggaccacaagcgtgtgctaccatgcctggctaatcttagtttttttatttttatttatttatttatttttttttttgagatggaatcttgctgtgtcacccaggctggagtgcaatggcacaatctcagctccctgcaagctccgcctcccaggttcaacaattgtcctgcctcagcctcctgagtagctgggattacaggcacccgccaacatgcccagctaattttttttttgtatttttagtagaggtgaggtttcaccatcttggttaggctggtctcgaactcctgaccttgtgatccgcctgcctcggcctcccaaagtgctgggattacaggcgcgagccaccgtgcctggccgatatctttgttaattaagggtatagcacattttcatttgtgttgcaaatgtttccactatagtagtagttcacttttgttgtatttattttaattttgatgtttaaattgtagatagccaaatgtacaaatcctttcctctgtgcaatttggttttcaagacatacttagaaatagctaattttctcattttcttcttgttttttgggagttttaatatttaaattttatatccatgtggggccgggcgtggaggctcacgcctgtaatcccagcattttgggaagccgaggcgggcggatcatctgaggacaagagtttgagaccagcctggccaacatggtgaaaccccatctctactaaaaaagtataaacattagccgggcacggtggcacacacctgtagtcccagctactcgggaggctgagacaggagaatcagttgaacgcaggaggtggaggttgcagtgagctgagaccccgccactgcactctagcctgggcgacagagcaagacttggtctcaaaaaataaataaaataaatgttatatccacgtgggattgttttgctgtaagaaaataaattggtggccgggcgcagtggctcacgcctgtaatcccagcactttgggaggccgaggcgggtggatcacgaggtcaggagatcgagaccatcctggctaacacggtgaaacccagtctctactaaaaatacaaaaaattagcccggtgtggtggcgggcacctgtagtcccagctactcaggaggctgaggcaggagaatggcgtgaacccgggaggcggagcttgcagtgagccgagatcgcaccactgcactccagccagggcgacagagcgagactccgtctcaataaaaataaattcgtatctagattggctttgttcttattttcctaatgtgtcgcccgttgtcttcaccccatttatggtcagtgcgttagtctcccactgctgtgaagtccgtgcgctgctgttgggaagatggtgttgctgggtaactggctgtgtttcttccagattacagagtcacgggagacaccgttctgtgttactgctgtggcctgcgcagcttccgtgagctgacctatcagtatcggcagaacattcctgcttccgagttgccaggtaaggagcccccgacttcctcatggctctagttctgtctgggttggcttcttggcttctgcctctcttttttttttttgagacagtttcgctgtttttgcccaggctggagtgcagtggtgcaatctcggctcactgcaacctctgcctcctgagttcgagcaattcttctgccttagcctcctgagtagctgggattacaggcacccgccaccacgcccggctaattttttgtgttttagtagagacggggtttcaccatgttggccaggctggtctcgaactcttgacctcggcctcccaaagtgctaggattgcaggcatgagccaccacgctcggccagcactcttttctttacagacaccctgtttgcactttgctcaatgttctaagcagaatttggcctcagtcaggagccggcaggacgtcaggccatacagggctgtggttgttttaggccctgggtctatttgcagttactcatgagtgtaacgtgggtttctaaaacagatttgtaaagacatccaatagtcaactggggtaattttatttcctcaattgggtttttattttttaatttttatttatttatttatttttgagacagagtctgactctgtcgcccaggctgaagtgcagtggtgtgatcttggctcactgcaacttccctctcccaggttcaagcgattctcctgcctctgcctcccaaagtgctgggattacaggcatgaaccactgtacctgaccctcagttgggtttttagttaaacatgtgtttcctttcctgaaatctcagaacggtccgaggaaactagttatggagggaccagaggccgtgcgtttccaccgcagcgtctgtcgttgggtctctgctgggattcaggtagctgagtgggtgcgtgcaatacatctcatagatgcgtaccccttctctttttccagtggccgtaacatcccgtcctgactgctactggggccgtaactgccgcactcaggtgaaagctcaccacgccatgtgagtgcagctgggggcacaggcgtcagctacagagtgatgaatgagttaactgcctgcttataaataggctgatatggtcattatgcttctctcaggttgcatcctttaggaaccggtatcttcatttagaaatcctgctcttcctttatcccttcgtttcatgcagttttatctccgtcttccacttctgtgtcttcctggctggagtagctttatctgttgtctgaggcatccggggcacaccccatcatttcaggcttagccgtttctaagtcgaaggctgcagtcactgagggcctcaggcccccctcgcaaagcgctgcacagctgggttctcgtccgtcccgtgagcaggcatttgtgattgctgtcacatcgtcaccctcacgtggtgtctttcccgtgctccttaaaggaggttcacagcgccatctgcattgccctgggaggcgtaggtcaggaggcatctcttaggttaggtgatcacgtaaatcactcctgtggcccaaggagttcagattaaagtgatggagacagtgccctcaggacgagatgttgtgtggactcagagaaaggcgcctccctcacagggattttgtggaataaaaaccttgctttgtgtttgagcacaaacagcacatggaagagaccatgttgttacaaaaagagatttcactgttgactggcagacagttttcagtagaaatgtgcagccatgctggtcctccttgcccacagtctgtggagagggaaggtggccacaggccatccagcttggtgtgtctgcctcagccctgtcagcagatgccacggggatgcctgaggaggtgcagcttttattctcttctctaaaaaaattatctaagatgtttgcacttcttttttttttttttttttttgagatggagtctcgctctgtctgccaggctggagtatagaggtgtgatctcagctgattgcaaccctgcctcccaggttcaagcaattcttttgcctcagcctcccgagtagcagggactacaggtgctcgccaccacatcaggctaattttttaaatatttttagtagagatggggttttaccatgttggccaggctggtctcgaactcctgacctcaagtgatccgcccgcctcggcctcccaaagtgctagattacagacattagccactgtgcgtggccagatgtttgcacttctgtttcaaaatttttaaagggataaagaagtttacctttgggggttagtttctttgatattgtgagaagcacacacactctttctcaggtagctctttctgtgtatggtttccgaatgcgtttatttgaatgcctttctgatgctctgttgtgtaatttatttgattgcctctccaatgctctcttgtgtaatttggccattttctccctgcaggaaattcaatcatatctgtgaacagacaaggttcaaaaactaagcatccagaggccctgagcagctttcagcactggaggtgaagagagcgtgtttttaaaatacagagacaagcacgtcaaggtgttttcacagccccctgagggaagggacgcagggtctccgacaggtgctctggggtgactcttctgtggagctttaccctctgagtgagaccctccccagagccccgggggccgcagcccgccctcctggtgagcgctgggcagggctcgtggtggcatcagcagcagagacgaagcctttctgtaacatgcggccgtcccgccgagaggggcagttttgctcttttgtacattttccgaaactacagttaaagcagaagtctgtttttaggaaaagtttcaagggagaagggcaagtttatcaaaaacattgtttcaggagaagggagcataagtttacagcctacaggacgtacacaatatcctgctgctgggaaaaccacagcattttatctattttttattttaataggtttggtgcttatcttctaataagatttaaatgtcacaaactgtagcacaaataatataatttataatttacaaattgactaaaattgggtatagtatggtatttgaaagaataagcatatgcttctgtttattaaaaaaagaaaccttccaatgtccaaaactgctaaccctcgacgtggccgccaagttagtcgctccttgctaaccggtgagtgaccgcggccccgagcctggggctggacgcaggtcccaggacatgctgctcccttgtgtgagtgaccgcggccccgagcctggggctggacgcaggtcccaggacgtgctgctcccttgtgtgagtgaccacggccccaagcccagggctggaggcaggtcccaggacgcgccgctccctcatgctgcccgggcccttcctccaagaccctacagagcctgaggggcaccttggcttccgcctgtgctagctttgccatgtcatctggaataatacttgaaattttgatttttggaaaaaaaagttttttatcttttgttgaaatcacctgttatccttgtttgtaaactgataacttttttgcttcttctcaggaatacagttttcaactgttgtcttgctcttgatagaaactgagaagcagcaatctgtatttgtggaggaaagtcctctcttttgcatattctaataaatgagccgcgtttgctcctccgctctcgtgttgggctcgtgtctggggctgcctcacttccccatgcgagggaggcaggccccatgcagagtgagctccgagtgcctcactgctagtgatggtcactctgtcacctgctgtccctcagtgactcctgtgaaacctgctcaggtctcttcattctgccaatgctgggaagccacaacctgttcatccagtgtggaggctttgtcttcagctgagcaccagaagaagccacaatgcagagaccctgagtttgtgcaagggtggggctgagaggggaggtcccgtgttagtgcaggggtgaggccgggaggggaggtcccgagtttgtgtaggggcgaggctgagcagggaggttctgagttagtgcaggggcgaggctgagcagggaggtcccgagttagtgcaggggcgaggctaagggggaggtcccaagtttgtgcaggggtgaggctgagcagggaggtcccaagttagtgcaggggcgaggctgagaggggagatcccgagtttgtgcaggggcgaggctgagaggggaggtccctagttagtgcaggggtgaggccgagaagggaggtcccaagtttgtgcatggatgaagccaaaaggggagtttgcacgtttgtgcaggggtgaggccaagaagggaagtcttgagttggtgcaggggtgagggagaggggaggtcctgagtttgtgcagaggcgaggctgagaggggaggtccctaagtgcaggggtgaggccgagaggggaggttgcaaatttgtgcaggggtgaggccaagaggggaggtcctgagttagtgcgggggtgaggccgagaggggaggtcctgagtttgtgcagaggcgaggctgagaggggaggtccttagtgcaggggtgaggctgagagggggaggtcccaagtttgtgcaggggtgaggccgaggggaggttgcaagtttgtgcaggggtgaggccaagaggggaggtcctgagttagtgcgggggtgaggccgagaggggagttcctgagtttgtgcagaggcgaggctgagaggggaggttgccagtttgtgcaggtgcgaggctgagaggggaggctggcattcgccaatgaagtgggctggggctaccctgcgtctgtgtcttagagagatcggttgatactcactcttccccttcccatctccaaaaagtagaaacaagaacacttgccctgtagaggatgctggtctttcctcaggaccagctgcacctgtccaggaagggcaggcagctcagagagcctctgggctccaggtgtcctagggactcactcctgcttccttagtccttcagagaagtccaactcctggcccactgtgaagaggatttctacctggagcagtcggaacagcttgggtttggctgtgatgtgagggaggaggccttgggagcagggcagttatcctcccagcgtggtaaggagccgtgttttatggaggcagggagatcagggcagttactcctcgggtgtggtaaggagctgtgttttatggaagcaggtggccgtgaactcattccgtcttttcatgagcttctgtacttcctcgtcctcaagacccagccatcccacccagcaaaactgaccggctgtggtggttttggagccctgctctccttgtggggtggctgcgtgggtcgtccacaggctttctggaggacagcctggtgctgctgcagatcccactgcttcttcctggctccttggcccagccttgggacaaacccagggcagggctgcagctgcccgctggccccacagaccgtctccccacgcactcctcatctgcggctccctctgtgctccctggtgcccctcagaagcgggggtcagccctgcccacccctccgtgtgctgcccaggctccaagccagggaagggggcctcaggttctaggtgaacccgtccaccccagtgaggcctctctgggatggcctctgtcatagcttctgactgcagccaggaagtctgggcagattggcttaaaacagactgagggattcaggccaaccctcctccctaggccagctacaaaggctgttttaaatctgctttaagtcatcttaatgacctcagggccagcaggatgggagtggtcgggcccaggtgtgagagccggggtccaggggctgctcccagcaccacacggccttcaccccaggggtgtggccaaggcagagaggcagctgagtttggaaggggcttccgccagcaagggtttcctggtgacagccccccagcttcgggctggcaggctgggagagtggagcaatgctggccctgaggcagctgcagccggctccctgaagaggccccagagtcactgccagggccgctaggttgccgggagccctgcactgggaagggaaggaaagcatgagaacggaggggatttaggaaagtagatcgtccctccagcctggcttgatggggaaaccagaacgctgtccccgcggccgtgcccgccctctgcctccacgtgggctccgttttggcatgcacgctagctcctgcgccttctgagggcggctgcagccgtgtagagaagccgggtcttgcctccctgaggacggagggccgcatgcagagcacagcctagccctgcagatccgcgcgctgaccagcagcaggacggagccgggtgatcttcgggggagccacctccagaaacgcctagtgctggtaactggtagacagccattattcaagcatcctctacacttagaattgagttacactgaaaacaaaggtgatgagtgctcaggacgcactactttctagttagtttaccgcacctgcctgttacctgcaggcccgagggtgtgtgcttctgtggcctgtgtgggatggcaccccttccagccttacccactcagctcagttggcctggttggaatgggccctgggaggagtgtttgcactgtggaaattggtaaatgcttcaaatcagggtggtttttaattttgcttttgttttcttctgaagagaaggttgttaaacaccagcacagtgctgcaccaggcagccagcatataatcatgagaaataagtagttgtttaagccactgcatttggggtggtttattacatagtaatgataaccatatcatggcccttgaaggcccagcatgtatgacccctgcctccacccctcagaaaacctcttctccctacctgcttctcctggagcccctcaggtgttcctctgcttctccaccgaaccagctaattctcacaaacagcccctcaggtaccagcccctccctctgcagcctctcctcattcagctcctgcagggctgcccccaccccgccagccagtctagtttccccccagcacctgtcactatcggaaaggaaacatctgtttaccgtttgtctccccctctcaaaaaaatagagcagggatcttgcctgtctgcccactgttgtttatttgtctgaaatgtttggccccagggcagcatctactgatcactgaccagttggctactgaacggtgaaggtctgatgagctgatgagccgtcccctgggcttgaaatctttcccgcggcacaaacaggcgccccttcctctgtcgctcacttttcacggttgtctccttctgaggcggtgagtctagatggtggggtcttaaagttcctcacacagagcagacacttggtcgtgcatgtctgtggaaggaatggactcaggagagaatgttgaaggccagtcagaccaggagtgagtgccgtgcgccgtgctgggagcctgtcactgtgagtgccgtgcgccgtgctgggagcctgtcactgtgagtgccgtgcgccgtgctgggagcctgtcactgtgagtgccgtgcgccctgctgggagcctgtcactgtgagtgccgtgcgccgtgctgggagcctgtcactgtgagggccgagcgccgtgctgggagcctgtcactgtgagggccgtgcgccgtgctgggagcctgtcactgtgagggccgtgcgccgtgctgggagcctgtcactgtgagggccgtgcgccgtgctgggagcctggcactgtgagtgccgtgcgccgtgctgggagcctggcactgtgagggccgtgcgccgtgctgggagcctggcactgtgagtgccgtgcgccgtgctgggagcctgtcactgtgagtgccgtgcgccgtgctgggagcctgtcactgtgagtgccgtgcgccgtgctgggagcctggcactgtgagtgccgtgcgccgtgctgggagcctggcactgtgagtgccgtgcgccgtgctgggagcctggcactgtgagtgccgtgcgccgtgctgggagcctggcactctgagtgccgtgcgccgtgctgggagcctgtcactgtgagtgccgtgcgccgtgctgggagcctgtcactgtgagtgccgtgcgccgtgctgggagcctggcactgtgagtgccgtgcgccgtgctgggagcctatcactgtgagggccgtgcgctgtgctgggagcctggcactgtgagggccgtgcgctgtgctgggagcatgcatttgtgagacccgccctgcccagtgctggccttgaatgtgggtccacttgggccgctggatcaaaacgccgcagaacaggcggcttaaacaacagaaagtattttctcacagttctggggcctggaactctgagatcagggtgtcagcggggccggttcctctttggtctgtctccttggctcgtgggcagcatctccttgagttctcacgtcatcttctcttcatgcgtgtttgtgccctaatctcttcctgcgaggacaccagtcctattggattagggcccacaccagtggcctcattttatcttaatcacctctttaaagaccacacctactaaaactggaacgatatagagaagattagcatggcccacgtgcaggcatgacacccaaattcatgacgtgttccatgtctgcagatacagtcacctctgaggtcctgggatttagggcttgaacatattgtaacactctgccatcaaagctcgcacgccacggggttttataaaaattgggtggttttgtttgttgttgtttggcaaaccccacatgctggataccattgacactccgtggtgggctgagccatgtccccgtcccgccaccacagatacccgtatccgatcacttgagcctgtgatgatgttgccttgcaccgtaaaaggggctttgcagatatggtggaattaaggaccttgagatgaggggaggatcctggattagcttgtgggccctctgtgcaacagtaggagtcgttgtaagagggaagcaagaggccgggcgtggtggctcacgcctgtactcccagcactttgggaggctgaggcgggcggatcacgaggtcaggagatcgagaccatcctggctaacatggtgaaaccccgtctctactaaaaaataccaaaaaattagccgggcgtggtggtgggtgcctgtagtcccagctactcgggaggctgaggcaggagaatggcttgaacccgggaggcggagcttgcagtgaaccgagatcgcaccactgcactcccgcctgggcgacagagcgagactctatctcaaaaaaaaaaaaaaaaaaaaagcaagcaagaagtcaaaggcaggaagaggaggcttggtgacagagaagaggtgggagggatgtgctttgcagagggagcaagggcctccagccaggagaggagggcaggctgtcgaagcagaaaagaaaacagatctccctgcagggccaccagaaggaaccagccctgcctgccccttcattttggacttccgagctccagaactgcaagagaataaatctagtttaagcagcaaagttggtggtaacttcttagagcagccacaggaagctcactaccccccacacactcatcccgtttggtttttgttttcaggaagggtccagtctgtctcagaggtgctgtggttggaggtggagtgtggggcatggctgagcacccaacatccgcttcaccctctcccctgctccccagcacgttccttcaccctgtagctctaggtctctgtggcagacactcagctctaactgctgacctgatggctccacttggtgttcaaacatcccagattcatgttgtcaaagagagctgtttccagtggggaccccaggcccaccacgtacgcccggcagacctgccctctccactgtcagaagatggcatggcctccctgtagctcaggcccaaccccaggagtcatcctgctggctgtcctcagtgccccaggcttctcttcaggggcttcttgtggctctgattgttgccccctcacctcactgctcttctcccagatctgtgcgtgcattggtcctccttgtcacgcacgttcagctcaaatattacttcctcaaaggtgcctttgagtactcgttctccttgcctttccctctcctgggacactgttcccaccagtacctgcatgattccttttttttcttttccttttctttttttgtttttgagacagtgtcttgctctgttgtcagggctggagggcagtggcgcaatgtcagctcactgcagcctccacctcctgggctcagatgatcctcccacctcagcctcctgagtagctgggactacaggtgcacaccaccacacccagctaatttttagtagagagcagggtttcaccatgttgcccaggctggtcttgaactcctgagttcaagcgatctgcccgcctctacctcccacagtgctgggattccaggcgtaagccgccacgcccagcaactccgtttcttacttgttggctcacattctcctgagaagtcctccctcaaccatcggcctgaaatagcagcgagcctccccagggttgcctctgccttttcttgactctttctgtcaccttctatgcttgttgtctggtccccactagaatataccttctgtaagagcagggatttgggacagtgcctagaatagtacttgcagacagtaggctacgataaatatgaatgacggccccatgcagatggtagcccctctcgctcgaacgcttcacccagttttattttcttttcatcagttaccgccctctgaaggtatccacacacaaacatgaaactggaccaaagcagggaccccccgcacgcagaatagtgctgggctcgcgtaaggcacctcagtgggtccatcagctgatgcatggacagacaaaatgggtgtatccagacactggagtatcgtgcagcgaggaaacgtgctgagtgtggatggaccttaaacacaccatgcaagtgaaaaggcgtcacagaaggccacatacgatatgatcccatttctatgaaatgtccagaagaggcacattcataaagacagaaggtgactgagtggttgtcgggctgggtggaggggatagggagtgaatgcaagaaggatccttctgaggtaacggaagtatccggaaactgggttggagtgatgggtgcacagctctgcacatttactacagtcgctgaactgcacacacaacacgggtatattttattgcatagaaattgtattaaagctgttaagaattttacttagattagcatttttcccacactgtgccatcaacttagtatatgattagattcattgtttctaactgtatttaaatttaatgtttgtcacattttgcttgctaaatttttaaaattttaaattactgtgggtacataaaaggtgtatatatttatggagtaccttgatattttaatacagacatacaatgtataatgatcaactcccagtaactggggtatccatcacctcaagcctgtatcatttctttgttaggaacattccagttccactctttttgttatttaaaaatatacaatacattattattaactatattcaccctcctgtgctatggaatactagatcttatgctaattaaatgttttccctatttctccc

SEQ ID NO: 15514 - DNA, 42108 bp, Homo sapiens
agaatgctgatattcaggccaggcacggtggctcatgcctgtaatcccagcagtttgggaggccaaaacaggaggatctcttgaccctatgagtttgagaccagctagggcaacatagaccctgtatctacaaaaacttaaaaaattagctgagcgtggtggtgcatattggtagtctcagctactcaggaggctgaagtgggaggatcacatgagcctgggagttcaaggctgcagtgagctgtgattgctccactgcaccacagctggggtaacagcgcaaggccttgtctcaaagaaaaaaaaaaaaacctgatgttctggcatggagacgcctctgttacaaactggctctggcgacaccgtgacttgcactggttttggggcttgaaggagactgtcctggcagttaacgctcaatggaatgggaagagcttgaccacaggtgatacttgccttggatacagtacttccaatagtacagaatgtttgcacaaataagatttttaatatccggtttcatggcagtatcatttacttgtagtaaaattcaccttttttggggttcagttccatgagttttgggaaatgtactcaccagtgcagtcaagatgtagaacatgttcgtcaccctgaaaggtccccctgagtcccggctcctggcagccactgatctggtttctttgccttctgctgcttccagcgtgtcgtgacacagggtcacagggtgtctgccatcatcttctgcgcctggcttctttccctggcacgcaccttgttgcatggatgagcagtttgctcctttctgttaccgggtagtgttctgtggtttggatgcaccatggcttgttagtttacaaccagtggatggacatttatactgcttcctgtttttgtaagaaataaagctaatataaacataagtgtgcagtctttgtagggacatacatttttctcttagctaagtaactatgaatggaattgctgggccacgtggccagtgtctgtttaacttgctgagaaactgccgcattgtttcccatgtgcttgtccattttgcagtcccacagcacagtacgagagttccaggttttccacttcccttttggccacttgtaggtggtcagtctttttttttttttttttttttgagacagcgtcttgccctgtcgccaggctggatttgcagtggcgcaatctcagctcactgcaacctccgcctcccgggttcaagccattctcttgcctcagcctcctgagtagctgggactacaggcacgtgccaccatgcccggctaatttttttgtatctttagtagagacggggtttcaccatgttggccaggatggtctcaatctcttgaccatgtgatccgcccgcctcggcctcccaaagtgctgggattacaggcgtgagccaccgtgcccggcccgtggtcagtattttcagccaattcttatttggtgtgtagtggtatttcatggttttaatttgcatttctctgaagattaatgatgttgagcattttgtcatgtgcttaatttgccatccatatctcttctttgataaagtgtttaaattgttttaagttgcattatttactttctatttattgagttatcagagttctctatacattctggatacaagatctttgtcagatatgtgttttacaaatatttccaccagtccatagcttgtcttttcatctttttaaacaatatctttgaagaacagatttttacttttttttttttttgagatggagtctcgctctgttgccaggctggagtgcagtggcacgatctcagctcactgcaacctccacctcccatgttctcccacctcagcctctcaagtagctgggattacaggtgcatgctaccatgcccggctaattttttgtatttttagtcgagatggggtctcatcctgttggccaggctggtctcgaagtcctggtctgaagtgatccgcccgccttggccacccaaagtgatgggattataggcgtgaaccaccgcccccagccttactttttttgttgttgttgagccagagtctcgctctgtcgcccaggctggagtgcagtggcgtgatctcggctcactgtaacctccgcttcctgggttcccaccattctcctgccttagcctcccgtgtagctgggattataggcgcccgccaccatgcctggctaagttttgtatttttagtagagactgggtttcaccatgttggtcaggctggtcttgaactcctgaccttgtgatccgcccgcctcggcctcccaacgtgctgagattacaggtgtgagccaccacgcctggcccagaattgactttttttttctttttttgagtcggagtcttgctctgttgcccaggctggagtgcagtggcaccatcttggctcactgcaagctccacctcctgggttcacgccattcttctgcctcagcctcctgagtagctgggactacaggcgcccgccatcacgcccagctaattttttgtagttttggtagagacgtggtttcaccatgttagccaggatggtctcgatctcctgaccttgtgatccgccccccccttggcctcccaaagtgctgggattacaggtgtgagccacggcacctggcccacattttacttttgacaaacctcagcttattattattattttttcctggtttgtgctttttatatcctatctgcgaagtccatgcaagacccaacggcactaagatttttgcctgtcttttccactggaagtttcatagttttagattttacatttgtctctgtctggccatccttacacagccacaatactgtattgtttactatagcatgatggtaagtcagttaagtaatatgagtcttccagcttcattctttttcaaaattgctttggtttttctacacgttttttctgtgaactttagaatcagcttgtcagtgtctacaagccctctgggattttgactggaattgcattgaatgtatgaaacaatctggaggacagctgacattttaacaatactgagtcttctgattcacacacccataggtcagtgatgggagcaaggctcaggctaaagcagattcagggtgtctttctgtgtggaacgtttaggaaaagtatgtttgcatgccactgtctcctgaccaaacccttcgcttttttgtcttctagtatctttatgtatccttatagattattataggcagtaatgattaatgatgagatattaaaacgcctttgttcttttgatttaaggagagggcaagtattgaggattttccctcttgcttttgtattcagggccgggcgctggtggctcacgcctgtaatcccagcactttgagaagccgaggcgggcatatcacgaggtcaagagatcgagaccatcctggccaacattgtgaaacctcatctctactaaaaatacaaaaattaactggccctggtggtgtgcgcctgtaatcccagctactcaggaggctgaggcaggagaatcgcttgaacccgggaggcagaggttgcagtgagctgagatcgtgccactgcactccagcctgggccacagaaagagactccgtctcaaaaaaaaaaaaagaaaaaaaaaatcccaaagtgtcagaattactgtattcagctatagatgcatccctgtatataagatgcagtttcttatacgtgtacaaatgcctatcgcaggccaggtgcggtggctcaagcctgtaatcccaacactttgggaggctgaggcgggtggatcaagaggtcaggagttcaagaccagcatggtgaaaccccgtctctactaaaaatacaaaaaattagctgggtatggtggcgcatgcctgtagtcccagctgctcaggaggctgaggcaggagaatggcttgaacctgggaggtggaggttgtggtgagccgagatggtgccactgcactccagcctgggcgacagtgcgagactccatctcaaaaaaaaaaaaacaaacaaaaacaaaaaaaaaaacaaatgcctatcacagttggctcagtcactttttctgtgactgtcattgcttcaattttatgttgatttatgaaacctaagtttacacagaaaagaaattaaggactaaattaagatactgaagaattacttaagcccctgagtttttttttttctttttttttttttgagacagagtcttgctctgtcacccaggctggagtgcagtggcgccatatcggctcactgcaagctcctcctcccgggttctcgccattctcctgcctcatcctcctgagtagctgggattacaaggcgcccgccaccacgcccggctaattttttgtatttttagtagagatggggtttcactgtgttagccaggatggtctcgatctcctgaccttgtgatctgcccgcctcggtgtgagccaccggacctagccaaccccctgagtttttttaaagttctaataatactcatcaggttagctgtgtatgcaagcatattgtaaaattgcttttttttttttttatttccagttggagtctagctctgtcgccaaggctggagtgcagtggcgcgatctcagctcactgcaacctctgcctcctgggttcatgcgattctcctgcctcagcctcccaagtagctgggattataggcaaccgccaccatgcccagctaatttttgtatttttagtagatatggggtttcactgtgttggccaggctggtctcgaactcctgacctcgtgatccattcacctcagcttctcaaagtgctgggtttacaagtatgagccactgcgcctggctgtaaaattgccatttaagaggctgtgtgtaactggaggtattgatgggtgtctttgagagggtggggattcagaaaggttcaggatgggccgggcgcggtggctcacgcctgtaatctcagcactttgggaggccaaggtgggcagatcatgaggtcaaaagatcgagaccatcctggctaacatggtgaaaccccgtctctactaaaaacacaaaaaattagccaggcgtgatggcgggcgcctgcagtcccagctactctggaggctgaggcaggagaatggtgtgaacctgggaggcggagcttgcagtgagccgagatggtgccactgcactccagcctgggcgacagagcgagactccgtctcaagaaaaaaaaaaaaatttctttatgtctttcttggtcaagtgtttttttttacatatgtacaatggggatcctgagttggaaccacatactttggtaaacaaagtgcagtagtgttcacagttaccacgatcatatcccgtgttgacccaccctctcttttttaggttgcgacctttccttccccagcaataaactggtctctggagatcactgtagaattgtagtggatgaaaaatcaggtcaggtgacactggaagataccaggtgagtatgttctgagcttcttttggtgtttcttcttgtagcttaagaagcctgacttcgtgctctgtgctgtgtgccacggctgaggaggagaagaaatgctgtctttagtgtgataacagcggctcatttttataacagcacagtcatgtgtcccttagcaacagggatccagtctgagaaatgtgtcagacaatttgatcatcttgcaaacatcatggagtatacttaaacaaacctagatggtgtagcctactacatacctaggctatatggtatagccgattgctcctaggctatcaacctatacagcgtgctactgtactgaatgctataggcagttgtaacacaatggtaagagtatttatctaaacacagaacaggtgcagtaaaaatatgatattttaatcttgtgggactcctatcgtatatgcgtctgttgaaaaaaacattattatcagcccgggcgcggtggctcacacctgtaatcccagcactttgggaggctgaggcagttggatcacctgaggtcaggagctcaagcccagcctggccaacatggagaaaccctgtctctcttaaaaatataaaaattagccgggcgttgtggcatgcgcctgtaatcccagctactcgggaggctgagacaggagaatcacttgaacccgggagtcggagattgtggtgagctgagatggcaccactgcactccagcctgggaaacgagtgaaactccatctcaaaacaaaacgaaacaaaagtttattatctggggcatgactgtagttaattaggctcccaaggtattagaagatgtatttcctggtttccaggatgggacacttagtgacactttggtgtctatgacccttcttgaatgtattcaaattaagtatgtctcagaaataagacttaaaagatgctggtaatttttggttcttgcaagcctattcaagtttgatttctttccctcaaatcaaaaaatcattttttaaaactaataaattctcgttcttgtacaactgaagtacagattgagtatctgaaatgattgaaactagactgtttagattttggattgtttcagattttagaatattttcattatacttaccagttgagcatgtctgaatcaaaattctgaaatgttccagtgagtatttttttgagtgtcttgttggtgctcaaaaagttttggatttcacatttctgattagggacattcagcttagggatattcaacttggaaagtggaaagctttccaaaatcctattcatacgttaaaaatgcatatgttggtatatatattttgcataaatgcaatcacactacacatactgttgtagcgtcagcttttttctttctttcttttttttttttgagatggagtttcactgtgttgcaggctgaagtgcagtggtacgatctcggctcactgcgacctccgactcccaggttccagccattctcctgccccagcctcccgagtagctggcattgtaggcacacactaccaagcccggctatttttttgtgtttttagtagagacgggatttcaccatgctggccaggctggtctcgaactcctgatctcaggtgatctgcctgcctcagcctcccaaagtgctgggattacaggcgtgagccatcgcgcccggccagcttttttcacttacggtgttttatggagcgcttcacatgtcactgcatctacatccagctcatcttttcattatcttaggatagtttctttgtcacttcccttattggtggacatttattgttttgactttttcttactataaataacactgcagtgactctttcccaaactctgccttcatgtctgttttcttgggatgatttctcggaagggaagtctgtgtcagtgttactcagaatgtgcctattcctttttttctcttttttgagacggagtctcgctctgtggctcaggctgaagtgctgttggtgcgatctcggctcactgcaacctccgccacccgggttcaagcgattctcctgcctcagcctcccgagtagctgggattacaggtgcccgccgccacgcctagctcagatggggtttcacaatgctagccaggctggacttgaactcctggcctcaggtgatccacctgcctcagcctccccaagtgctgggattgcaagtgtgagcccccacacccggccagaatgtgcgtcttttaaatctgctgcaagtggcaggtggtcttctagcagtatgttgagagtgtgctgttctcactgcaggattttttttgtttggtaaagatcaggctctgtgagattctttggtaactgatagtttcagggatagaagactaggaagtaggttttaataggaagaactgatgctccgtttcctagtctaatagatatcagattaagttctctatttcttggcacaatgggaaaggcagggtgctggtccctagctgtcccgcctgcttcagggcctggcttccccatgctgggtgctggtcctgggctttcctgcctacatcagggcctggcttctccacgctgggtgctggtcctgggctttcccgcctacatcagggcctggcttccccgtgctgggtgctggtcctgggctttcccgcctacatcagggcctggcttccccgcgctgggtgctggtcctgggcagtcccgcctgttccagggcctgggttccctgcactgggtgctggtcctgggcagtcccgcctgttccagggcctggcttccccacgctgggtgctggtcctgggtagtcccgcctgttccagggcctggcttccccgcgctgggtgctggtcccgggccttcctgcctgttccggggcctggcttcctcgcgctgggtgctggtcccgggcagtcccgcctgttccggggcctggcttccccgcgctgggtgctggtcctgggcagtcccgcctgttctggggcctggctttcccacgctgggtgctggtcctgggcagtcccgcctgttccggggcctggcttccccgcgctgggtgctggtcctgggccttcccacctgttccagggcctggtttccctgtgctgggtgctggtcctgggccttcccgcctacatcaggacctggcttccccgcgctgggtgctggtcctgggcctttctacctgttccagggcctggcttccttgcgctgaatgctggtcctgggcctccctgcctgttccagggcctggcttccccacgctgggtgctggtcctgggccgtcccgcctgcttcagggcatggcatccctgtgctgactgcatggtggtggtactttcttatggctattgtaatttaccacaagcttaatggatttaaaaaacacaaatttgctgtcttactatagttatggaggtccagagtccgatatgggtctgatggggctaaaatccaggtctgaacagggctggtttcttctggaggctccaggggagaatttgttctctgccttttccaggttccagaggtgccacgttccttggcagaggtgggctggaggggaggggtgctcaggcagaaggaaccacgtgtgtaggggcccctgagcataagcagggctgtgtggtcggagcgtgtggtgagcggcaaagtcacacaagggagcttgggctttagcctgagagcagtgaggagtcatcaaaggggtgtaagcggaggagtgaaataatcagatttttgtttggaaagaacaggaggatgagtgatggctgcagtcgcccctcggcatctggggggattggctccagccccctgcatgcacccaagtccgtgcacactctagccccgtagccagccctgtggagcaggaggacacagaaagtcagtccagctccagcgcccctgcatgcacccaagtccgtgtgcactccagccccgtagccagccctgtggagcaggaggacacagaaagtcagtccagctccagcgcccctgcatgcacccaagtccgtgtgcactccagccccgtagccagccctgtggagcaggaggacacagaaagtcagtccagcatatgtgtgggattcattccctctcattgaaaaaaacccgtgtataagtgcatctgcacagctcaaaaccgcatcttccagggtcagctttgtgttgtaacagcagaactcagacacacacagccactgcctggtttcggaggttttacggggagacggctgtggcagttcatttgcttactgtctgcatttgctttcctgctacagacggcagagctgagtagtggcaatggtgaccacaaaacctacactgtttaccctctgtttatggaaatcgtttgccactcccatccctcagcaaaccgtggtggtcactcggatgtgagttctgtccactgctggggcctcgggagtgaagctgcagagctgaggcctgtgtggtttcagtcgttttgcccggttgccgttttgtgtgtcgggtatgctgtgctcttggatcttggtcacctgaccaacacctgatttgctgtcaggtctctgctcagaagtccccaggaggcacttcctgccccatcaacttagcctcctcctgtctgtccctgggtcagcagcatctgcattggcctctccctgggcagagtacctcaaggggcttggcagccagaccacaagctctgagtgcagggccatgtcctgcagctgacggcccagcatttagtccgcttctgcccagagccagtctcttgggagggatcagtactcattggaggcatgagttcaccggggttgtgatggctgcaaggaacagaactgtggatagcacaagtccagctcaggggaggctggaggtggaagcaccacactgtagacgaggcctccgggtccactaggaggcaaacggggagagaacccagccctgcagcagcagagctgccaagcacgtgaggaggtgtagtggctggttaggctgtcagtcagggagaagtgggcgagccatttcttgagagaatggtgaggggtgcgtggatgtgtgcatcgttacgtatttacactgttcctatgagtatttccagagtggtcatatcgagctgcttgctaatggtgctagaaaaaaaatcttgtaactccaagttattttaagtagaataaattgtgtttttgtttttttacagcaccagtggaacagtgattaacaagctgaaggttgttaagaagcagacatgccctttacagactggggatgtcatctacttggtgtacaggaagaatgaaccggaacacagtaagagagaggaaggcttgccggggtcagacccgcacgggggtgcacgtgagggcgctctctgaacgttcctcctggctacatcccttcccataggaacgttcctcctggctacaccccatttcttgctcacatgggttcctgccgtgaatagtgtctgttgagtgggagtgtcgactttgcagcctgagcccagccattcctcaggaataccactgtggccatgagcagccaatcccaaaatggcagccaaggagaaactgatggggatggtttgggttctacaggagaagaacttgagttatggggaataaaacctaggaccaggggtctggaggccattgatggttctgcttttggagaccttacaagaaacatcaaaggttagactggattccagtaagttttttcagctccagaagtcccgtttttgttttgtggaagaacagtataggacaaggaaagttatgggagtccttcgaaggtcacccctgaaatacttttttttttttgagatagagtttcgctcttgttgcccaggctgaagtgtaatggcgcaatctcagctcaccgcaatctccacctgccgggttcaagcaattctcctgcctcagcctcctgagtagctgggattataggtgcccaccaccacgcccggctcatttttgtatttttagtagagacggggttttgccatgctggacaggctggtctcaaactcccgacctcaggtgatccacccacctcaacctcccaaagtgctgggattacaggcatgagccactgcacctggccaatacttatttatttaattttttaaataaataagagacagagtctcgctctgctctgttgcggaggctggagtgcaatggcgtgatctcagctcactgcaacctccacctcctggtttcaagcgattctcctgcctcagccttccaggtagctgggattacaggtgcacaccaccacacccggctaatttttgtatttttagtacagacagggtttcgccgtgttggccaggctggtctcgaacttgggacctcaggtaatccgcccgcctcggcctcccagagtgctgggattacaggcaagagccactgcacctggccacccctgaaatacctaaagaccacagtggtgagggagaatggggcaaatatgtcttaggcatcttcagcataaacttaaccagcccctggccacacggaaggatcttgtatctgctcctttgtgtagtttgaaattataagtgaggcatagattcttcaccttcttctgcctcctgatgccattttttcccgaggcttatttcttttgtgttggtagagatgttttagattacttgttttgaaatctcttaaactgatgaatttgttattagctgatgagtcaaaataatcaacaaaaacaaatggactggagaacagaagagaaaaatgagttctcagtttgcacaggggccaccacttttctgatttgattgattttcttttagacgtggcatacctctatgaatctttaagtgaaaagcaaggcatgacacaagaatcctttggtaagtaagagtgtagcaaagaagtgggtgcatgttaggagctatagcattccttttgtgttttgagatggagtctcgctctgttacccaggctggagtgcggtggcgcgatctcagctcactgcagcctccgcctcctgggttcaagcaattcccctgcttcagtctcccattttttttttttttttttttgagacggagttttgctcttgttgctcagcctggagtgcagtggcgcgatctcggctcactgcagcctcctcctgccgggttcgagagattctcctgcctcagcctcccgagtagctgggattacaggttgcaccgtcacgcctggctaattttgtttgtttgtttgtttgtttgttttttgagatggagtcgcgctttgtcgcccaggctggagtgcagtggcgcgatctcggctcactgcaacctccacctcccgggttcatgccattctcctgcctcagcctcccgagtagctgggactacaggcagtcgctaccatgcccagctaattttttgtatttttagtagagatggggtttcaccgtgttagccaggttggcctcgatctcctgacctcgtgatctacccgcctcagcctcccaaagtgctgggattacaggtatgagccaccgcgcccggcacgcctggctaatttttatatttttagtagagacggggtttcaccatgttggtcaggctggtctcgaactcctgacctcaggagatacacctgcctcgacttcccaaagtgctgggattacaggcctgcaccaccgtgcctggccttggggctgttgcattcttaagagcatttcaatccctagagtgtctgcttgagccctggttgtgtgctgcttctgctccttttgggttacagaagctaacaaggaaaatgtgttccatgggaccaaagatacctcaggtgcaggtgcagggcgaggggccgatccccgggtccctccgtcgtcgcccgccactcaggtgtgctttgaggaaccacagccatcaacatcgacgtcagacctcttccccacagcctcggcctcttccacggagccttctcctgcagggcgagagcgttcctccagttgtggtgaggtcacatctcatgaggtcttggtgctggttgcatggtttttgttcactactctttacctgtgttgttacagaggcagataagcgactgaggactggcatgaggttctcagtagtgagatttctgtaggagtcaatattgagtgtgttgttcccttcacttcccaagagaagtgaagatcagggactctagtaccattgtgtattttgcagtttcattgagactataattcgcataccataaaagtcatccagccgaagtgtacatttcagtggattttagtacatcacaaggtgtgggaccatcaccactcattgacacgaaaaggaaaccggtgcccaccagcagtgactccacatgtccccttcccctcggccccaccagcagtcactccccatgtccccttcccctcggccccaccagcagtcactccccatgtccccttcccctcggccccaccagcagtcactccccatgtccccttcccctcggccccaccagcagtcactccccatgtccccttcccctcggccccaccagcagtcactccccatgtccccttcccctcgaccccagcagcagtcactccgcatgtccccttcccctcagccccagcagcagtcactccgcatgtccccttcccctcggccccaccagcaatcactccccatgtccccttcccctcggccccaccagcagtcactccccatgtccccttcccctcggccccaccagcagtcactccccatgtccccttcccctcggccccaccagcagtcactccccatgtccccttcccctcggccccatcagcagtcactccccatgtcccctccccccagcccctggcagctgcgtgtgctttcggcctctggatttttctgttctagacacttcacagacatggaatcatgcgtgctcttttttgttgttgttgagacggagtctcgctctgtcgctcaggctggagtgcagtggtgcgatctcggctcactgcaagctccgcctcccaggttcacgccattctcctgcctcagcctcccgagtagctgggactacaggtgcctgcaaccacgcccagctaatttttttttgttttttgtttgtttgttttgagatggagtctcgctctgtcacccaggctggagtgcggtggcgcgatctcggctcactgcaagctccgcctcccacgccattctcctgggtccacgccattttcctgcctcagcctctgagtagctgggactacaggcacccgtcaccacgcctggctaattttttgtatttttagtagagacggagtttcaccgtgttagccaggatggtctcgatctcctgacctcgtgatctgtccgatcggcctcccaaagtgctaggattacaggcgtgagctgccgcgcccagccgtgactgggctctttcacttagcgtggtgttttcagagttcatccagaagaggatgttatttaaaactagttttgcagatgctgttccttacggcatgactcttacctcttccatggtcattgggaagaaattccatctgggtgcagcgtgacgggaatgttttctgttttcttttagggtttgtcacgtggaggatgtgtacatatggattctctaaattggatcgcgctatacatattatttttttttaattttcttagctattctctattctagattatgttttgaattagcttttccagtttaatagaaaaatctttttgagatttttgatttggggagaattgacagttttacagagcccaggaaaatggtgtttctccttgtttgttaagctcttcctgttcttcagtgaagtctcacggctttcttcgtgtcgtctgggctcattcttagtcctggagtgcttggctctcgcgttcttacattccatagcagtctgcagattcctatgaacagaagagcctctgaatctcagattaggctgtgtttcgatctgacaggaaagctggttccctgataaaaagtccagaaatgcccgctcagctcagctactcctgaggtcaccagggccttctgtgcactccacgctgctgtttttgctcaggtttttgcctcgaggtttcacagtggctgccagagctctgaacatcactgacacattcatggcaggcaccaggaagcctccggagaagggacctttgctttccatggatctgttggctgatccgcagcagcaagagccatgtctcccagaagactgctccctctgtctcatgagccagcctggctgctctgctacaggacactccttgtttttatgtctctctgtgtattccagtgggatttggggaaggagcggcatcgggtgcagggactcagtgtgccttcttgaaaccagaaacctctcacgctctctgggcctgtttccacttctgttgatgtggtttttactccgttgtatgccgttgctctgtcttcacacgggcagccacacctctcctgttcgttgatgttcttgaggccttgttgcatccgctccttccttcttcagaggctcctttggatgagcccagctcctcagcagcagagtgctctttattttctgtttttttgagacagagtcttgctctgttgcccaggctggagtgcagtggcgcaatctcggctcactgcaacctccgcctcccgggttcaagtgattcccctgcctcagcctcctgagtagctggggtcacaggcgcgcaccaccaccacgcccagaaaatttttgtatttttagtagagacgttgttggccaggctggtcaccaggagcagagtgttctaaaagcatacctcagtctgatggatgacatcccagccatctgaagagtaacatccagatgtgttgtaacattccagtgtgttgtaacattcctgtaacattccaatgtgttgtaacattctggtgtgttgtaacattcctgtaacattctggtgtgttgtaacattccggtgtgttgtaacatttggtgttacgcggtgtgttgtaactttctggtgtgttgtaactttctggtgtgttgtaacattctggtgtgttgtaacaatcgcggtgtgttgtaacatccggtgtgttgtaacattccagtgtgttgtaacatttggtgttacatgctgtgttgtaacattctggtgtgttgtaacattcccggtgtgttgtaacgttccagggtgtgttgtaacattccggtgtggtgttccggtctgttgtaacattccaacattccggtgtgttggtgtgttgtaacattccagtgtgttgtaacatttggtgtgttgtaacattccggtgtgttaacattccggtgtgttgtcacattctggtgtgttgtaacattctgatgtgatttcgggactcacctgggaggacttctcaggtgctaattggggacactaagttgcaggcaagactgtggagagtgagtgctatgtagtttccacctgatatttctggagataagaggaacagcggagaccaaacccatgacagacaagtttctactagcctgtctcctgtagactaaacacaaccccggcttctcagagcctctttgatttacctttgttttaacatcataaccttaaatttatgagtgaaagaaaataacacttcaagatgaaagcatctcagcactgggcacagtggctcacgcctgtaatcccagcactttgggaggctaaggtgggcagatcccttgagcccaggagttcaagaccagtttgggcaacatggtgaaaccgtatctttacaaaaaatacaatataaaaaatacaaaaattagccgggtgtggtggtgcatgcctgtaatcccagctacttggaaggctgaggagggaggattgcctgagcctgggaggcagaggttacaatgtgctgagattgcaccactgcactccagccttggcaacaaagccagagcccatctcaaaaaaaaaaaaaaaaaaaaaaaagacctgtaatcccagcactttgggaagccaagacaggcgaatcacttgaggtcaggagcttgagacctacctggccaacatggtgaaaccccgtctctactgaaaatacaaaaattatccaggcatggtggcaggcgcctgtagtcccagctactcaggaagctgagacaggagtttcacctgagagaggaggatcacctgaggctgggaggcggaggttgcagtgagccgataccgcgtcactgcactccagcctgggcgacagaccaggtctcaaaaaaaaaaagaaaagaaaacatgccagatttgaatagccacctgaatgctgaagttttaccagctctcttgggctgtgtacccttcatcgtatcttccaggttccttaaaacctacccttgggcacagctgggatgtgcactggctcttcacagctagatccagcatgcactgactctccccgtgcagggacagccccagaggaatagaggtggcgttccggccgctccagcgtggcccacagcgtttcaagtgcagcaagcacagacaggacgcggggttactagtattttggattgactgcagattttgaactgtctgcctagatgaactataccatgtccctagggccaagtcccatgtgcattttgtggctactagaccctcttcagaaatcaaacacaaaatagctctggcctgtaaagaaaacaaacttcaccagtaaaattgtttcctgttcctatccaccaatgtgcatagcacagtgtgtagtctgggtaatacggtttgcataattttttgataatgttctacttaaaaagggcagcgtatttatatattacttatgtaattaaaaaaaaaattcttctggccgggtgtggtggcttacgcctgtaatcccagcactttgggaggccgggtggttggatcgcctgaggtcgggagttcaagaccagcctggccaacatggcaaaaccccatctctactaaaaatataaaaattagccaagtgtggttgcgggcgcctgtaatcccagctactcgggaggctgaggcatgagaatctcttgaacccaggaggtggaggttgcagtgagccaatatcctgccactgcactccagcctgggtgacagcacaagactctgtctcaaaaagaaaataaaaataataaaaaataaaaattcttctatctgtatgcctaagtgtatgcatactaacaaaataagtatagttactgcttattgagcagctactaaatgtgaggcagtgtgccaggtacattctgtaagtggtaagatggtgctcctctccacgttggctgagcacggggcgctggagatgatggcgtgagtgggtgccggctgggggccggcccacaggctgtctctttccttctgttcgtatatgaggtggtttgtccccaaaactattctgttttctttcagctgctgtaagccagtttcttgtgtttttttttttcaaataataacacttacatttgaatactgtaagctagatatgtattatgctgtaatatgataaactaagtctttattaagatataggttattcacacctgtaatccttattcacacctgtaatccttattcacacctgtaattccagcacttggggaggccgaggtgggtggattgtttgggctcaagagtttgagaccagcctgggtaaaatggcaagaccctgtctctaccaaaaatacaaaaaacaatttagctgggcatggtggtgcacacctgtagtcccagatactcaggaggcagaggtggaaggatcgctttagcccaggaggcagaggttgcagtgaatgaagatctcgccactgcattccagcctgggtgaagagtgagaccctgtctcaaaaaaaagatagaggtgattagaaagtctgcctgtttttctgccaaggtcattcctgtcgttatgactctggcttcttgctcgtggagatagcgctctccctacaagtcactgtgctgtatccttcccgttatcacacctcttgtaaaatagttcacacgcagcaccatctccacccgttggaagctatgcatccctccactggagcatctgtgctttacacagacttctgtttttttttgtttgtttgttttgttttactttgtttttttgagacggaattttgatcttactgcccaggctggagtgcaatggcgcgaacttcgttcgctgcaactccgcctcctgggttcaagcagttctcctgcctcagcctcccaagtagctgggttacaggcatgtgccaccacacccggccaattttgtatttttagtagaaatggggtttcactgtgttggtcaggctggtctcgaactcctgacctcagatgatccacccaccttggcctcctgaagttctgggattacaggcatgagccaccgcgcctggcattttttttttttttttaagaaatgaggtcaggccgggcgcggtggctcacgcctgtaatcccagcactttgggaggccgaggtgggtggatcacgaggtcaggagatcgagaccatcctggctaacacggtgaaaccctgtctctactaaaaatacaaaaaattagccgggcgtggtggcgggcacctgtagtcccagctactcaggaggctgaggcaggagaatggcgtgaaccagggaggcagagcttgcagtgagccaagatcacgccactgcactccagcctgggtgacagagtgagactctgtctcaaaaaagaaaaagaaaacaaaagaaatgaggtcttggccaggcacagtggctcatgcctttaatcccagcactttgggaggctgaggcaggtggatcatgaggtcaggagatcgagaccatcctggctaacacggtgaaaccctgtctctactaaaaatacaaaaaaattagctgggtatggtggcgggtgcctgtagtcccagctacttgggaggctgaggcaggagaatggcgtcaacccaggaggcggagcttgcagtgagccactgcactccagcctgggcaacagagcaagagtccgtctcaaaaaaaaaaatgaggtcttgctctgttgtgcaggttgggagagtgatgtggtcatggctcactgtagcctcgaactcccgggctcaagtgatccactcacctcagcctcctgagtagctgggaccatatgctcgtactgtcacgcctagttaatttttttttcttttttgtattttttgtagagatggtgccttgctgtgttgcccaggctggtctaaaactcctgggatcaagtgatcctcccaccttggcctcccaaagtattgtgattacaggtgtgagccccatgcccagcctcagacctctattttttatttttatttttttttccccagagggagtttcgctcttgttgcccaggctggagtgcagtggcacgatcttggctcactgcaacctccgcctcccgggttcaagcaatttttctgcctcagcctcttgagtagctgggactacatgcactcgccaccacgcctgtctaatttttttgtatttttagtagagatggggtttcaccatgttggccaggctggtctcgacctcctgacctcaggtgatccacttgcttcggcctcccaacgtgctgggattacgggtgtgagccaccgcacccggcccaaagctctgttgtaacaagtttatgacacagtgtgtatcatatgaccacgggtatgtgggtttgccctgcgttagactcggtgctcgagggctaagcctggtcacagacatctccgcatttgtttctctgcaaatgggctccttgcccccagctccaccccacgtagagataggcacaaatagagttaagatgtgagttgagtgagcacacactcctcgtaagccacttgtcattcctaaactacgacatctcaggctgccagctgcactgggctccagtcagtgacaccttacaggcatggttctctcctgagctggatggatcagcacctatcttgtttgattcctctcacagggtctgggggtggtggcatctcccctaaaggaagtggtccctctgtggcaagtgatgaagtctccagctttgcctcagctctcccagacagaaagactgcgtccttttcgtcgttggaaccccaggatcaggaggatttggagcccgtgaagaagaaaatgagaggaggttagtgtctggttgtgtgtgtcctcagtcctctcgtgtgctcctggggcatgcgggggccgctgccatgctccgtgctgtggggcattgcttcctgcaggggcatgtggaccctgcctcaggttgatgcctgtaacacctccggcattttcattcagaaaacctgggcctgtttttttgcggtttgcataatccagatagaactgtgatttgctacaggctgttctcttggtctggaaatagtgcattctgaattgcagaattaatctcaaaatcctccttcctggccaggtgcagtagttcatatccgtaatcctaacactgggaggccaaggcaggagaatcacttgaggtcaggcgttcgagaccagcctgggcgacagagcaagactttatctctaaaaataaaaatcaagcctgacaccgtggctcccgcctataatctcagcactttgggaggccaaggtggacggatcatctgaggtcaggagttcaagaccagcctggccaacatggtgaaactccgtctctactaaaaatgcaaaaattagctgggtgtggtggtgcatgcctgtaatcccagctacttggaaggctgaggcaggagaattgcttgaacccggcaggtggaggttgcagtgagccaagactgtgccattgcactgcagccggggcaacaagaacaaaactccatctcaaaaaaaagaaaatcaaaaagaaagccctctgtcctggtaggacaataatttctaaaaatgtagcttaaatcttcacattgaagatgatttagggagaagtctgcactttgaaagccaaagttaagattattagaaaacatttgggaatgttatggtagaagcattgctgtatagcagtccagagagcagccagccactggggcactgtgacaggaaggttctaggaggggtccccagggaaagaaattaggttatctgacacgtggggttgatcggtgtggggaaggtgtggaaagagtcagcaacagttacacaggaaaaataagcacaggaatgaggaaattttaattctagcaaacatgaaaaattgtgtaagtcacacaacttaatctagtaaactacttggctcagcagtgaatacttgcataagcataataatacaaatacagtatcatgaactaatgtaatctgttaatgtaatgttggcaggggtgtctcaggacagagtttttctctaccttaatagatgtcaggaatgatgtctaaaattgataaatcaaatgtaccatgataacttagaaacacagaggtaaataccagaagaaacagctcaaagacatgaaaatagttttcctccgaggagggaaattgggtgaggagcggctgagacggagggtgactgcctttgttttcttctaaatatattatgtatacatttttttaagagacaggatcttgctttgtcacctaggccagagcgccgtggtgcagtcttggctcactgcagcctccacctcctgggctcagactgtcctcccacctcagccttccgagtagctgagaccacaggtgcacgctaccatagctggctaattttttttcccatttttttagagatggggtttcattatattgcccagactggtcttgaactcctgggctcaagcgatctgcccacctcagcctcccaaagtgctgggattacagttgtgagccattgcacctggcttcttctaaatacttggctttttaaattgtgtacagtttctttaattaaaaataaaaattaattgattaccaacatctgagcattatagaaaaataaaaacaccagaagagggtggggcgcggtagctcacacctgttaccctagtactttgggaggccgaggcgggtggatcacgaggtcaggagattgagaccatcctggctaacacggtgaaaccctgtctctactaaaaatacacaaaattagccgggcgtggtggtgggcacctgtagtcccagctactcaggaggctgaggaaggagaatggcatgaacccgggaggcggagcttgcagtgagccgagatcgcgccactgcactccagcctgggcgacagagcgagactctgtctcgaaaaaaaaaagactgcatgtatttccttctcggttacgacagttagaacacatccctttctcctgtggacggggaccttgacctgaacctgcgtgtatttccttcttggttacgacagaacacatccctttctcctgtagatggggaccttgacctgaacgggcagttgttggtcgcacaaccgcgtagaaatgcccaaaccgtccacgaggacgtcagagcagcggctgggaagccagacaagatggaggagacgctgacatgcatcatctgccaggacctgctgcacgactgcgtgaggtgcgaccgtgttcacccttggctcacggaacatggcactgcaggttcttcgtcccgtgtggggcagggctgggcatgagacaagcctgcaggtcctgtttggcctggcatctgctgaggttactctgtcacccagataagtgggtggagtgggtggagtgggtggagctttctcagcccactgcaacctctccctcccaggattgagcggttctctgacctcagccttctgagttgctgggactacaggtgcacaccactatgcctggctgactttttttttttttttaatgttctaaatattttttattcctttttttttttttttttttttttttttttagatggagtctcgctctgtcaccaggctggagtgcagtggcacagtcttggctcactacaacctcagcctcccgggttcagacgattctcctacctcagcttcctgagcagctgggactgcaggcgtgtgccaccatgcccggctaatttttttgtattttttagtagagacagggtttcaccatgttggccaggctagtcttgaactcctgacttcaggtgatctgcccacgtttgcctcctaaagtgctgggattataggcgtgagccactactcccagccaccctgctgatttttgtgttttttgtagagacggtttcgccatgtagcccggggtggttttttgtttttgtttttgttttttggagttagagtctcgctctgtcacccaggctggagtgtagtggtgtgatcttggctcactgcaacctccacctcccaggttcaagtgattctcctgcctcagcctcccaagtagctgggactacaggcatgcgtcaccacatctggctaatttttttgtatttttagtagagacgggagtttcaccatattagccaggctggtctcgaactcctgcactcaggtaatctgcccaccttggcctcccaaagtgttgggattacagacgtgagccaccccgcatggctaccactttcattctactcgtggcaccaacaaggaggaaacctggaacccagagccggaggctgtagaccccacaagttttgagtgtgtgggtcgtgtgtgaccccgtgaactctgcaaacagatgaaaggaactctgcacattttaaatgctccttatctgggaaggtgtatttcgcatagaatgaacgtaggagccgctgaggaagggcctccttgcttttccgcgggaactcaagagtgacaaccttccaacttctgggccagaaacacttgctgtctctgttgtttgtgttcctgaagtcataatctactcgcctctgtctttcctgaaaacacagaggccgtgtggcctctgatttcttttcattaaccaagactgacttaaagggtttttaggttgaacgatggctgggcccctgtaggcccttccgtggtggggctgctgcggaccttggtcgagggtcgcggttgcatctgtgggactgtctggacactgttcctcttgcactttcagtttgcagccctgcatgcacacgttctgcgcggcttgctactcgggctggatggagcgctcgtccctgtgtcctacctgccgctgtcccgtggagcggatctgtaaaaaccacatcctcaacaacctcgtggaagcatacctcatccagcatccaggcaagtgagggcatccacaccagcacccgggcacgtgagggcggtccctccaccaccacccaggcacgtgagggcatccacccagcagcacccgggcacgtgagggctgtccctccaccagcacccgggcacgtgagggtggtccctccaccagcacccgggcacgtgagggcatccacaccagcacccaggcacgtgagggcggtccctccaccaccacctgggcacgtgagggcatccacccagcagcacccgggcacgtgagggctgtccctccaccagcacccgggcacgtgagggctgtccctccaccagcacccgggcacgtgagggtggtccctccaccagcacccgggcacgtgagggtggtccctccaccagcacccaggcacgtgagggcatccacaccagcacccgggcacgtgagggtggtccctccaccagcacctgggcaagcgagggtggtccctccaccagcacccagacaagtgagggcggtccctccaccagcacccaggcaagtgagggcatccacacaccagcacccaggcatgtgagggcggtccctccaccagcacccgggcacgtgagggcatccacaccagcacctgggcacgtgagggcagtccctccaccagcacccgggcacgtgagggcggtccgcccagacccctccttccgcagcactgcgcacgcgagctcccagcagtgtgagctgtgtctgcctgccatgtctcactgccggtgaatggcgctgtgtcctttcaattctagacaagagtcgcagtgaagaagatgtgcaaagtatggatgccagaaataaaatcactcaagacatgctgcagcccaaagtcaggcggtctttttctgatgaagaagggagttcagaggacctgctggagctgtcagacgttgacagtgagtcctcagacattaggtaaatcatgcccctggctcagagcagagtgtgtgagccagaggagcatcacaaccgtgaccgagagctcactactgggtggacagcatgggtcctgagatctagttctgccctgagcagccaagctcttaaatggcttgagcttgttttctgatattggatagtattagcacctcccctgagaggcgtggcagggactgggtgaacacttagcggggtagccagggggtagccagcagagcgtcagccgcaggcgactgctgtagacatttgcaccctcggctgacacccttccctttgcttcgactcgtcatgggtgtggcatctctggctgtgacagagggacatcattccatgttattttttcccacatgagcacatgtattctttgtagttgatctagcgactataaagtcctatagtataaattgcaatgtttatcatttgtcaggacgttattacagaagaggcaccatcaccaggccaagacaatcccagcctcagagaccttatttatctgctgacatgttgaggtttcctaatgcacaagaccggggtctgaatgttgggtcgaggccatgatatttaaaaagacaatgaacgacaaaaaaaaacacttgaaacttttatctttatttccttttgccaagtttagcatgtgactgttaagcaaaaagaaggaaaccaaaaccactttagcattaagattttgctgcctctacccagccattcatacgtgtgtcataatcgttaacaaaatgaaatgtaatgtactaacaaattttttttttcttttttttttgagatggagtgtcgctctgctgccaggctggagtgcagtgacacgatctcagctcactgaaatcaccacctcctgggttcaagcgattctcctgcctcagcctctcgagtagctgggactacaggcgcatgccaccacacccagctaatttttttgtatttttagtagagatggggttttaccacattggccaggatggccttgatctcctgacctcgtgatccgccggcctcgacctcccaaagtgctgggattacaggcatgagccactgcgccctgccaatggcacaatcttggcgcattgcaacctccgcctcccgggttcaagcgattctcctgcctcagcctcccaaatagctgggattacaggcatgcaccaccaaacttggctaatttttttttcttttctttttttttttttttcgagacaaagtctcgctctgttgcccaggctggagtgcagtggcatgaccttcgcccactgcaacattcatctcctgggttcaagtgattctcccgtgttagcctcccgaggggctgggattacgggcatatgccaccacacccagctaatttttgtgtttttagtaaagacagagtttcaccatgttggccagactggtctcgaaatcctgacctcaagtgatccgtctgccttggcctctcaaagtgctgggattataggtgtgagccaccgcgcccggccgctaattttgtatttttagtagagacagggtttcaccatgttggccaggctggtcttgaactcctgacctcaggtgattagcccgcctcggcctcccaaagtgctgggattataggcgtgagaaacaaatttattttttgtttgtttgttttttgagatggagtttcgctctgttgcccaggctggagtgcagtggctggatcttggctcattgcaagctccgcctcccgagttcacgccattttcctgcctcagcctcccgagtagctgggactacaggctcccgataccatgcccggctaattttttgtatttttggtagagactgggtttcaccgtgttagtcaggatggtcttgaactcctgacctcgtgatccgcccgcctcagcctcccaaagtgctgggattacaggcatgagaaacaaatatttttatgaagctgggattcggctgcatgtacagctcggtaatgtccccagcgtttgaattgggaaacagttgctgctgtgcatttcttccatccgtatttgtgcacatgcgcagtgacgtcaatgtttagacgtgaagcagtcgagtcacagagtgtgactgggaattggaccttgatagacgtttgataagtttgttatccagacaccgatcggaaagggtgcacctaatgcactctacaaggtctgcatgagggcctctttttgccagtttagaaggagaagtaggtaatctcattttcatttacattttttccttatgaaaaaaatgtcttttcactgtgccttgttttttacctggttgggtcttacctgttggccttattggcccctggccttggtgtgaggcgcagaaaagcctttcaaatggagaggagagcctcgtgtattttttcctacaggttctttttttacagttgacatttttatctgctcgtttttggaagtacaagggaagtgtggaaaagacaagtgattcggggctttgcaggcgcctggtgtggctcccagtacgttgcccaccgcgctctgcttttaacgggagagtaggcgggtcctgaggagcacggggcgtgcgcgcacgtgctggcccttgccctgctctggcgtcgtctcctgggagcacacgtcagtggggacctagtgaccctggggatggggctccaaagcgtgggggctgagctggggatgcagagtggcgtgtccttgcccttcgactcgttctggtccctctctaacactggggtgctggacaggaatggggcccggcccttcccctcacaccaagcagctgagcgacggtggagctgagctgtgatggctgcggacccgcgttgcaccggccctacctgagaggcttggggcctgcacacagctcggccctgtgcttccttgcagccagccatacgtcgtgtgccggcagtgtcctgagtacagaaggcaggcggcgcagcctccccactgcccagcacccgagggcgagccaggagccccacaggccctgggggatgcaccctccacgtccgtcagcctgacgacaggtgagccgcgccgccctcaggcctcagccttcgcgtgagtcactttgtggctgtgcccggtgctgacgtgcacgtggccgcgctctgcccgcctcctgtctgcactgctcgccccctttgggccctggcctcattggtctccctgcactcacagttggttgcttttcgtgactgattttgggttgggaaatcagataagtaactgttcattcgtagcccctcctgaacactcctgggaattaacaaccctgaccttaatacttggcctctccccagccactgcctcagggcagctgatgtcccccagtgggtttgccagacccaaagtgatgatcgcatatctgtccctcaagtaagaggcgggcttctccccagcagtggcgatgtcaccagaagctgccctgcgtcaccagagttggcttaatgcgaaatgtttccccgtcaggtgcctttttccagcaaggggctccaggtgctatccaggaagtcagaggagagctgggcagggggtatggaggcttcacttctctgccctgctcactccagactcatagaatgggaagatgccctcaggggtcctggcttcctggccacgggtgggggctgagcacatcacgaggccactggcctgggatggatgtagagccacatccttgtgctgcattctcagtggcttcttgtagaacccgtggacggaacggacaaagcagtgcttggcgttggtatggatgcccatccaccagcctgggtttgcttccgccactcagcagctctgtctgggtcactggacaagctccttcctttgcatggtgggaccagcgcctccctctggggtcctgggtccctcagtgggtgctcagtgaacctgggtggtgaaattgccgtccttatggccggcatgttgacctcgcagggtctttcctgtgtgggtggcgagtgtccagggaacttggctgtgtgggctcagacttctgctgccacatcgattggtcttgtgcaccgtggctgtcctttgtttatttgagagatggctgttctctcacctgagcggaaattgaacacacagcttgttttattctatatcataggttctatgggcttgtcctctctttataggaaataatagaaaaccttcaacagatcggccgggcacggtggctcatgcctgtaatcccagcactttgggaggccgaggcgggcggatcacaaggtcaagagattgagaccatcctggctaacatggtgaaaccctgtctctactaaaaatacaaaaaaaaaaaaaattagccaggcgtggcaggcacctgtagtcccagctactcgggaggctaaagcaggagaatggcgtgaacccgggaggcggagcttgcagtgagccgagatcacgccactgcagtccagcctgagcgacagagtgagactctgtctcaaaaaaaaaaagagaacttgcaacagatctttgaaatcttgctccagctgctaaatcaaagatcatttttggttattgttaatctgttttgactccccgagtttgggtggcagaaggtccccggtggtttagcagggcaggtctgcttcttccccggctgtctcaggtgcacctctcctcgctgtgcttcccggcggcctctctaacctgctgtctttctgccctgggtcccacgtgctccggctgaatgtgcgtgtgcttcagcagtccaggattacgtgtgccctctgcaaggaagccacgccctgtgcacctgctgcttccagcccatgcccgaccggagagcggagcgcgagcaggacccgcgtgtcgcccctcagcagtgtgagtgcccgcgccaccgcacgcaggcgggttcctatctgtccttcaggggtcaggtttcaaagcggtgttggccttagggtaacctgtgaagtaaggatgccgtttctttttttccatcagtgtgatcagttttccccacgtcaccatattgaataatctatcttttcccaccatctagtaacattgccccttcacaggctacatctccatccaccgggggctcggcttggatctgtgtctatcccctgccagcactgtggttgctttataatgtgtcactgttaaacctcttatatgaatgttgatgctttagtatacaactctggccaggcacagtggctcacgtctgtaatcccagcactttgggaggccaaggtaggtggatcttctgtgtccaggagtttcagaccagcctgggcaatatggtgaaaccccatctctacaaaaaatacaaacattagccagacatgatggtgtacacctgtaatcccagctactcgggaggctgaggccaaaggatggcttgagtccgagaggaggaggttgcagtgagctgagatcgtgccactgtactccagccttggcgacagagggaaatcctgtctcaaaacaaaacatatatatatatatatatatatatatatatatatgcacacacatacagttattattaaaaatggagcttgtcctttatttcatggctgttttaatgtattcctgcagaaatgtctgtctatgtcctttgccttttttttatgacttcctaatttgtcagagcttcttatatgtgaaagtgttaggtgaagaaagccctagccctgttgagcaccgcggttggctcctgccgcacacaccggtgttgctctgtgcactgagccctgtgtgagcagcacacaggaccacagcactggttctgtctggaatggcttaaaaatgttctgggcactcaggaaaccaaacaggttactgctggggtctgtaccctgagactgggcttggcaggggtggggcctagcctgcagcgtcgggacacatggccgtgggacacacccggtgatctgggcggtcgctgcctcgggggtcatccacggcaggcgctggccactgctgatgctgcacgtgggagggcaggtgagaagccacagagaacagcttgtcccatgtctcacacacgcggtggtcagcagatggcagctcggcccagcttttccccaggaatccaaactcttcactctaatttcacagagcatgcttcgtatatagaggcattggtgaagtggtcgtaggcgttataagacttaaggactcaatcctgtgagaattttagcgagggtttacctaacattatattttagggatttccattgtatagaatatcagacaattaaaaataatttcctttgggaggctgaggtgggtggatcacgaggttagaagatcaagaccatcctggctaacatggtgaaatcccatctctactaaaattacaaaaaattagccgtgtatggtggcgggcgcctgtagttccagctacttgggaggctgaggcaggagaatggcgtgaacccgggaggcagaggttgcagtgagccgagatggcgccagtgcactccagcctgggtgacagagcaagactctgtctaaaataaataaataaataaataaataacgtctacaaagccaaggtgacaacatggaaaaatacctaggtagaaaaaggccacctaggctgggcatgggctcacgcctgtaatcccagcactttgggaggccaaggcaggcggatgacctgaggtcaggagtttgagaccagcctgaccaacgcggtgagaccccatctttactaaaaatgaaaaaattggccagttgtgggcatctgtaatcccagctactggggaggctgaggcaggagaatcgcttgaacccaggaggcggaggttgcagtgagccgagattgctccactatactccagcctaggccacagagcaagactctgtctcaaaaaaaaaaaaaagccacctgaatatgtgcagttgggggcaagcatgttgcatgttcagagctagaatgaagcccatcgaagccgtgttagggtggtggagcaggtgagatttctttcttttgtgtctctcactgttttcctgggatgagcatgtggtgttcagtttaagaaacgatgtgggtctgaggccgggtgcagtgcatcacgcctgtaaatgttcagtttaagaaacgatacgggtctgaggccgggtgcagtgcatcacgcctgtaaatgttcagtttaagaaacgatacgggtctgaggccgggtgcagtgcatcacgcctgtaaatgttcagtttaagaaacgatgtgggtctgaggccgggcgcagtgcatcatgcctgtaatcctagcgctttgagaggctgaggtgggaggatcccttgaagccaggagtttgaaaccatcctgggcaacatggtgagaccctgtctctacaaaaataaaaaataaattagccgggcctggtggtgtgcacctgtagtcctagctactcaggaggctgaggtgggtggatcccttgaacccaggaggcggaggttgcagtgagctgtgattgttcccctgtactccagcctgggccacagagcgagactccatctctaaaaaataacaaaccagaaaatgtgagcctcgccttttttcagggatacaactcctcgccatcacagtccatcacaacctgggtggcgttagctggatgtggccccgccccgatttccatgagacccctcctgaacaatgtttccagaaagagttgagctcctgagcctggtgctgacgaattgtgttggagacagccctcagcgctgagtgcgtgtaacgagtgtcctctctccacaggtgcggtctgcctgcagcctttctgccacctgtactggggctgcacccggaccggctgctacggctgcctggccccgttttgtggtaatactggctcttcaggccccagttgctttgacctttgcatgttctcttggtgaacttgagggcaggggatggtggggtccatagcctgatgtttatagggatgaggccactgttggtcatcaaatgatacctattcctggctggactgcagaggtgtgtcaaattcgtgttagctcaaaatcaagccttaacagaattattaggggagatactcccaggacagaatccttgcagcggggttctgctgttacgataccaagaccaggtgctggggagactcggagagctgatctttttaaggagggagtggaatggaaatcatttctgcttgtcctctgtttaaaattgagttttatcattgaacttcttattctttctagaatctgtaatgaaaagaaatatgtttatcctcagtgtcgggcagacagtgctttcctgcgacatcattataaacaggtaacattgccccttcatctcggcagagctcaacctgggtgacaagtgtctggacggcgtgctgaacaacaacagctacgagtcagacatcctgaaggtaccgactcgctgcgggctggggagccgggagccacattttctccctagtgcagccagctggttctctgcattctattggtgtttatctgttttacctgacccgctgcgggttggggagccgggagccatgtttcctcactggtgcagccagctggttctctgcatgccattggtgtttgtctgttttttccgtattccaaaaataggtatttcgtttttgtgcctcctgccaccaattcgtaggagccgcttcccgcagctcttgttcccggcagctcttgttcccacagctctcggtgagggcttcttgaaggtgccgccctttagcaagaccagggccttttctctggtccctgtctcttctggccatttgccttcccacgtctaggaagctacctcggtttctaggatttacatatgtttaacatgcgcattcgccctcctgccgagcactttgctgacagcacacacaatggtggggccttgaggcttgccacagacacacctggcaggcgcccgctcagccccacactctgctttgatgcccacagaaggagctcaacagctcgtgtgtgtttgaagggcacagagaacagatgccaagtcctcagcttttcttgtgcaacagcctgggctcgttgctgggctgtgtgcactgtggcctggctttcatgtctcattcacacctgggctgtgtaggtcttggcagaacttttgagagactctggtaactgttacactggaaccttttgggacttccaggaggctcttggacaagacttctcgtgctgcaggccgtgaacgtgcagccctctgcaaatgccacttataagggtctgagctttggctttgcacactttcaggggccttttatgaaatgttttctctcgttatttcagtgtttcttcctctaaacgagtatttcttattcctctctttttttgcgtcacagaattacctggcaaccagaggtttgacatggaaaaacatgttgaccgagagcctcgtggctctccagcggggagtgtttctgctgtctggtgagttcttctgttgcctcctgctctaaggcgcatgtgagtgtccagggctgtgcctgcgtgtctgctctcccagtgacaactccgaccttcacccaccctggaagagaggaaaaagatcctgatgctttcaggttgtttttgtttgtttgtttgttttttgagatggagtctcgctcttgttgcccagactggagtgcagtggcatgatctcagctcaaggccccctcggcctcctgggttcaagcgattctcctgcatcaacctcctgagtagctgggattacaggcatgtgccaccacacccagctaattttgtatttttagtaaagatggggtttccccatgttggccagcctggtcttgaacttctgacttcaggtgatctgcccacctcagcttcccaaagtgctggaattacaggcgtgagccactatgcccggccttcaggttgttttttgaaagttgagcgtgggccgggtgtggtggctcacgcctgtaatcccagcactttgggaggctgaggcgggcggatcatgaggtcaagagattgagaccatcctggctaacacggtaaaaccctgtctctactaaaaaaagaaaaatacaaaaaattagccgggcgtggtggcgggcgcctgtagtcccagctactcgggaggctgaggaaggagaatggcgtgaacccgggaggcggagcttgcagtgagccaaaatcacgccactgcactccagcctgggggacagagcgagactccgtctcaaaaaaaaaaaaaaaaagacagttaagcatgaacctgtatgacatattccagcagcttctatccttgtaggggagggtgggtgtggccgactgccactactgctgcttgagaccctcactacagcagttactgctgttactgcttgagaccatcattacaggactgaacaaagggacaaacgtagaaatgaaaacaaaaagacaaaagaaacttttaaggaaaggcaacatggggaagaagaggagagctccctgcttctagtgagtaaaggctgcccctgagcttctacagcccttcatatttattgggtaacaagagcaaggaggaggtaacaactgggcagctgctaaattgatcacaggttcatactgttactgacaggcttcaattatgcctaatcataagaaacatttgtgtggcctccaacaggtggggccagcttggagggtctctaccacttgtctatccagaggtcctggggtcagttgtcctgggaccctcggggacttggtgaatctcttgcttgatgtgtcagtcacttggtgagggtcactcctctccaggggggcacacgatgctttgtggagtatgataatttatcactaagggaggctgtagaaatatatatatgagacaggttcttgctctgtcgcccaggctggagtgcaggggcatgatcacagctcactgcagcctcgacctcctgggctcaagagatcatctcacctcagcctcccaagtagctgggaccacaagcgtgtgctaccatgcctggctaatcttagtttttttatttttatttatttatttatttttttttttgagatggaatcttgctgtgtcacccaggctggagtgcaatggcacaatctcagctccctgcaagctccgcctcccaggttcaacaattgtcctgcctcagcctcctgagtagctgggattacaggcacccgccaacatgcccagctaattttttttttgtatttttagtagaggtgaggtttcaccatcttggttaggctggtctcgaactcctgaccttgtgatccgcctgcctcggcctcccaaagtgctgggattacaggcgcgagccaccgtgcctggccgatatctttgttaattaagggtatagcacattttcatttgtgttgcaaatgtttccactatagtagtagttcacttttgttgtatttattttaattttgatgtttaaattgtagatagccaaatgtacaaatcctttcctctgtgcaatttggttttcaagacatacttagaaatagctaattttctcattttcttcttgttttttgggagttttaatatttaaattttatatccatgtggggccgggcgtggaggctcacgcctgtaatcccagcattttgggaagccgaggcgggcggatcatctgaggacaagagtttgagaccagcctggccaacatggtgaaaccccatctctactaaaaaagtataaacattagccgggcacggtggcacacacctgtagtcccagctactcgggaggctgagacaggagaatcagttgaacgcaggaggtggaggttgcagtgagctgagaccccgccactgcactctagcctgggcgacagagcaagacttggtctcaaaaaataaataaaataaatgttatatccacgtgggattgttttgctgtaagaaaataaattggtggccgggcgcagtggctcacgcctgtaatcccagcactttgggaggccgaggcgggtggatcacgaggtcaggagatcgagaccatcctggctaacacggtgaaacccagtctctactaaaaatacaaaaaattagcccggtgtggtggcgggcacctgtagtcccagctactcaggaggctgaggcaggagaatggcgtgaacccgggaggcggagcttgcagtgagccgagatcgcaccactgcactccagccagggcgacagagcgagactccgtctcaataaaaataaattcgtatctagattggctttgttcttattttcctaatgtgtcgcccgttgtcttcaccccatttatggtcagtgcgttagtctcccactgctgtgaagtccgtgcgctgctgttgggaagatggtgttgctgggtaactggctgtgtttcttccagattacagagtcacgggagacaccgttctgtgttactgctgtggcctgcgcagcttccgtgagctgacctatcagtatcggcagaacattcctgcttccgagttgccaggtaaggagcccccgacttcctcatggctctagttctgtctgggttggcttcttggcttctgcctctcttttttttttttgagacagtttcgctgtttttgcccaggctggagtgcagtggtgcaatctcggctcactgcaacctctgcctcctgagttcgagcaattcttctgccttagcctcctgagtagctgggattacaggcacccgccaccacgcccggctaattttttgtgttttagtagagacggggtttcaccatgttggccaggctggtctcgaactcttgacctcggcctcccaaagtgctaggattgcaggcatgagccaccacgctcggccagcactcttttctttacagacaccctgtttgcactttgctcaatgttctaagcagaatttggcctcagtcaggagccggcaggacgtcaggccatacagggctgtggttgttttaggccctgggtctatttgcagttactcatgagtgtaacgtgggtttctaaaacagatttgtaaagacatccaatagtcaactggggtaattttatttcctcaattgggtttttattttttaatttttatttatttatttatttttgagacagagtctgactctgtcgcccaggctgaagtgcagtggtgtgatcttggctcactgcaacttccctctcccaggttcaagcgattctcctgcctctgcctcccaaagtgctgggattacaggcatgaaccactgtacctgaccctcagttgggtttttagttaaacatgtgtttcctttcctgaaatctcagaacggtccgaggaaactagttatggagggaccagaggccgtgcgtttccaccgcagcgtctgtcgttgggtctctgctgggattcaggtagctgagtgggtgcgtgcaatacatctcatagatgcgtaccccttctctttttccagtggccgtaacatcccgtcctgactgctactggggccgtaactgccgcactcaggtgaaagctcaccacgccatgtgagtgcagctgggggcacaggcgtcagctacagagtgatgaatgagttaactgcctgcttataaataggctgatatggtcattatgcttctctcaggttgcatcctttaggaaccggtatcttcatttagaaatcctgctcttcctttatcccttcgtttcatgcagttttatctccgtcttccacttctgtgtcttcctggctggagtagctttatctgttgtctgaggcatccggggcacaccccatcatttcaggcttagccgtttctaagtcgaaggctgcagtcactgagggcctcaggcccccctcgcaaagcgctgcacagctgggttctcgtccgtcccgtgagcaggcatttgtgattgctgtcacatcgtcaccctcacgtggtgtctttcccgtgctccttaaaggaggttcacagcgccatctgcattgccctgggaggcgtaggtcaggaggcatctcttaggttaggtgatcacgtaaatcactcctgtggcccaaggagttcagattaaagtgatggagacagtgccctcaggacgagatgttgtgtggactcagagaaaggcgcctccctcacagggattttgtggaataaaaaccttgctttgtgtttgagcacaaacagcacatggaagagaccatgttgttacaaaaagagatttcactgttgactggcagacagttttcagtagaaatgtgcagccatgctggtcctccttgcccacagtctgtggagagggaaggtggccacaggccatccagcttggtgtgtctgcctcagccctgtcagcagatgccacggggatgcctgaggaggtgcagcttttattctcttctctaaaaaaattatctaagatgtttgcacttcttttttttttttttttttttgagatggagtctcgctctgtctgccaggctggagtatagaggtgtgatctcagctgattgcaaccctgcctcccaggttcaagcaattcttttgcctcagcctcccgagtagcagggactacaggtgctcgccaccacatcaggctaattttttaaatatttttagtagagatggggttttaccatgttggccaggctggtctcgaactcctgacctcaagtgatccgcccgcctcggcctcccaaagtgctagattacagacattagccactgtgcgtggccagatgtttgcacttctgtttcaaaatttttaaagggataaagaagtttacctttgggggttagtttctttgatattgtgagaagcacacacactctttctcaggtagctctttctgtgtatggtttccgaatgcgtttatttgaatgcctttctgatgctctgttgtgtaatttatttgattgcctctccaatgctctcttgtgtaatttggccattttctccctgcaggaaattcaatcatatctgtgaacagacaaggttcaaaaactaagcatccagaggccctgagcagctttcagcactggaggtgaagagagcgtgtttttaaaatacagagacaagcacgtcaaggtgttttcacagccccctgagggaagggacgcagggtctccgacaggtgctctggggtgactcttctgtggagctttaccctctgagtgagaccctccccagagccccgggggccgcagcccgccctcctggtgagcgctgggcagggctcgtggtggcatcagcagcagagacgaagcctttctgtaacatgcggccgtcccgccgagaggggcagttttgctcttttgtacattttccgaaactacagttaaagcagaagtctgtttttaggaaaagtttcaagggagaagggcaagtttatcaaaaacattgtttcaggagaagggagcataagtttacagcctacaggacgtacacaatatcctgctgctgggaaaaccacagcattttatctattttttattttaataggtttggtgcttatcttctaataagatttaaatgtcacaaactgtagcacaaataatataatttataatttacaaattgactaaaattgggtatagtatggtatttgaaagaataagcatatgcttctgtttattaaaaaaagaaaccttc

SEQ ID NO: 15515 - DNA, 46634 bp, Homo sapiens
gccgcaatgtctcttgacagcggcggcggcgcagccggttccgggttcggcgcggggcgggggtaagcgcggctggcgagggggctgcggcgggcggcgaagggggacctggttgcggccgtgggagggggcgcccgccggcgtccaggccgggctgcggggctgcgtgggcgcgggcggccgggccggggcccgcggggtggggcgggcgccgagtctcggcctctggggtcgggagtctccatgggcgtttccggggtctccgcagatgtgaatcccgatggagcggcccgaggaaggcaagcagtcgccgccgccgcagccctggggacggctcctgcgtctgggcgcggaggagggcgagccgcacgtcctcctgaggaagcgggagtggaccatcgggcggagacgaggtgcggggctgaggccggggccgggggccggggccgggcagagccaccgggttgcgggcaggccacacgggcggcggtgcagtgtgcgctccagatttttccgtggagtgaaatgtcatgtaagaactggtatttattcggtgttctgcccaccgattcttgcgcatgattcacgcacatcatttagccttcgttacaactgtataagttagttgtgttcatatactctccagaatgcaatattgtcacgttcgttgccgtacagagtatcttttctgactgtaatggaacgaaattaaaaataatagaaggaaaagtggaaaattcacagatatgtggacatgaaacaccacactcttaaagcaaccggtgggtcaaataagtctttacaacggggaccttgttttgagacaaatgaaacaaaaatagaatacaccaaaaggtatttaggatgcagccaaggcagtactcagagggaaatttatagctgtagtgcttatattaaaaaagatctcaagtcccagcccctagaatatttatttatttaataaacctggaaagctaaaaacttgaacaaagtcatacaacgggtgagagaaagttccctcagcctccacattcactgcctccagtctcccaagtgaccatctggttgtttgatttcctctgaagcctttgtatggggagagaaatgcgctggtcctgtcaacaaaaatgtttagtttgtctgaaaattaatgaattagctccgacattatactctaaaaaggagcgaggatgggaaatatttgctgtttggaagcaattttttttttttttttggttaatttcaccccttataatgtgcttgcacctggttttttttgtttttttgtttgtttttttgagataagagtcttgctctgtggcccagactggggtgcagtggtgtgatctcagctcactgcaccctctgcctcccggttcaagtgattctcccgcctcagcctcggagtagctgggactacaggcgtgcgccaccatgcctggctaatttttgtatttttagtagagatgagctttcgccatattgcccaggctggtcttgaacaactgaactaaagtgattcacctgcttcggcctccgaaagtgctgggattacaggtgtgaaccactgtgtctgacctggttttgttttttggggtgttttggtagtcttacattccagtatcaagtcaaagtttattttacaactttgaaagtatttagatatcatcataacatatcaaaattatccctttaagacaagaggaagtatttgaagatttttccctttgtctttacttgatagactaggaggtttggtgaagagcagaggccctagagacaaattatgtgggtttccaatctgtcaacacattactctgggctaacgacatctttctgcgcctatgtacctacttcatagatttgctctgaggagttaatgagatcatacacggactgcttagaaggaactttagcgttagcacttagcattagccattgttattgtaacatgttatacatgttattacatggtaggacattacatgttaagacaaggagagaaaatatgtcgttgagtttatcttttaataggaacgattttagtgaatttataaataatgttgccagcaaaaactttaagattattgtattagtttgttcatactaccatagcaaaatactacattctgggtggcttaagcaacagaaatttatttatttatttatttatttatttatttatttatatattttttgagacagagtctcactctatcacccaggctggagtgcagtggcgcgatctcggcccactgcaagctccacctcccgggttcttgccattcttctgcctcagcctcccgagtagctgggactacaggcgcccaccaccacgcctggcagtggtattttgtatttttagtagagacggggtttcaccatgttagccaggatggtctcaatctcctgacctcgtgatctgcctgcctcagcctcccaaagtgctgggattacaggcgtgagctatcgcgcccggccagaaatttattttttattttattttatttttttaatttttgagatagagtcctgctctgtcacccaggctggagtgcagtggcatgatctcggctcactgcaacttccctcttccaggttcaagcgattctcctgcctcagcctcccgagtagctgggactacaggcacgtaccaccacacctggcttatttttttctattttagtagagatggggtttcactgtgttgcccaggctggtctcgaactcctgagctccagcaatctgtctgcctcggcctctcaaagtgctaggattacaggtgtgagccactgtgcctggccagaaatttattttcatggttcaggaggctgggaagtccaagatcaaggtgttggcagattgggttcctggtgagggctctcttggcttgcaggtggccactttcttgctgtgtcctcacatggcagagagggggactctgcttgctctctctgcctcctcttaagagggcaccagccctgtgacatctgattcccacctagtgacctcatttaacatttatcagctcacaggccccatttccaaatacagtcacattggggattaggacttaaatatatgaattttaggggggtacagacactcagttacaaacattcagttcctaacagttgtagaacttgattattttatttatttattttatatatatatatgtatttttttttttgagacggagttttgctcttattgcccaggctgtagtgcagtggtgccttcttggctcaacctccaacctcccgggttcaagcaattctcctgcctcagcctcccgagtagctgggattacaagtatgtgctaccacgctcagctactttttgtatttttagtagagacggggtttctccatgttcgtcaggctggtcttgaactcctgacctcaggtgatccacccgcctcggcttcccaaagtgctgggattacaggcgtgagccactgtgcccggcctgatatatttattttttgagacggagtcttactctgtcacccaggctggagtgcagtggtgcgatcttcactcactacaacctgcatcttccaggttaaagtgattctcctgcctgagcctccagactagctgagatttcaggcgtgtgccaccacacctggctagttttttggtatttttagtagagatgaggttttaccatgttggtcaggctggtcttgaactcctggcctcaaatcaaatgatccacctgccttggcctcccaaagcgttgggattacagccatgagccacctcgcccagacagaacttgattattttaaagcaatgatgtgcctgccatttataaggcattatttgggggaaaagggaaagcctaggtaacgtgtaggaaggggtgcaacaaccttgttttcccaaagagctctttatccagtctggagtgcagtggcacgatctcggctcactgcaagctctgcctcttgggttcacaccattctcctgcctcaacctcccaagtagctgggactacaggcacccgccaccatgcccggctaattttttttgtatttttagtagagacagggtttcaccatgttagccaggatggtcttgatctcctgacctcatgatccacccgcctcggcctcccaaagtgctgggattagaggcgtgagccactgcgcccagtctttttttttttttttttgagacggagtttcactcctatttctcaggctggagtgcaatgatgtgatctcggctcactgcaacctccgcctcccaggttcaagtgattctccttcctcagcatccagagtagctgggattacaggcactcaccaccatgcttggctaatttttgtattttgtagagacagggtttcatcatgttggctaggctagtctctaagtcctgacctcaggtgatcctcccgcctcggcctcccaatgtgctgggattacaggtgtgatccaccgcgcccagccaagagctctttattctaagagagtggcagaaatgtacatcaactgcttgaaagatttaacccaccaagcgtcaagcgcagcaaatgctgtgaatagaactttagcacaaagcatctcggttccagattagaatgctgatattcaggccaggcacggtggctcatgcctgtaatcccagcagtttgggaggccaaaacaggaggatctcttgaccctatgagtttgagaccagctagggcaacatagaccctgtatctacaaaaacttaaaaaattagctgagcgtggtggtgcatattggtagtctcagctactcaggaggctgaagtgggaggatcacatgagcctgggagttcaaggctgcagtgagctgtgattgctccactgcaccacagctggggtaacagcgcaaggccttgtctcaaagaaaaaaaaaaaaacctgatgttctggcatggagacgcctctgttacaaactggctctggcgacaccgtgacttgcactggttttggggcttgaaggagactgtcctggcagttaacgctcaatggaatgggaagagcttgaccacaggtgatacttgccttggatacagtacttccaatagtacagaatgtttgcacaaataagatttttaatatccggtttcatggcagtatcatttacttgtagtaaaattcaccttttttggggttcagttccatgagttttgggaaatgtactcaccagtgcagtcaagatgtagaacatgttcgtcaccctgaaaggtccccctgagtcccggctcctggcagccactgatctggtttctttgccttctgctgcttccagcgtgtcgtgacacagggtcacagggtgtctgccatcatcttctgcgcctggcttctttccctggcacgcaccttgttgcatggatgagcagtttgctcctttctgttaccgggtagtgttctgtggtttggatgcaccatggcttgttagtttacaaccagtggatggacatttatactgcttcctgtttttgtaagaaataaagctaatataaacataagtgtgcagtctttgtagggacatacatttttctcttagctaagtaactatgaatggaattgctgggccacgtggccagtgtctgtttaacttgctgagaaactgccgcattgtttcccatgtgcttgtccattttgcagtcccacagcacagtacgagagttccaggttttccacttcccttttggccacttgtaggtggtcagtctttttttttttttttttttttgagacagcgtcttgccctgtcgccaggctggatttgcagtggcgcaatctcagctcactgcaacctccgcctcccgggttcaagccattctcttgcctcagcctcctgagtagctgggactacaggcacgtgccaccatgcccggctaatttttttgtatctttagtagagacggggtttcaccatgttggccaggatggtctcaatctcttgaccatgtgatccgcccgcctcggcctcccaaagtgctgggattacaggcgtgagccaccgtgcccggcccgtggtcagtattttcagccaattcttatttggtgtgtagtggtatttcatggttttaatttgcatttctctgaagattaatgatgttgagcattttgtcatgtgcttaatttgccatccatatctcttctttgataaagtgtttaaattgttttaagttgcattatttactttctatttattgagttatcagagttctctatacattctggatacaagatctttgtcagatatgtgttttacaaatatttccaccagtccatagcttgtcttttcatctttttaaacaatatctttgaagaacagatttttacttttttttttttttgagatggagtctcgctctgttgccaggctggagtgcagtggcacgatctcagctcactgcaacctccacctcccatgttctcccacctcagcctctcaagtagctgggattacaggtgcatgctaccatgcccggctaattttttgtatttttagtcgagatggggtctcatcctgttggccaggctggtctcgaagtcctggtctgaagtgatccgcccgccttggccacccaaagtgatgggattataggcgtgaaccaccgcccccagccttactttttttgttgttgttgagccagagtctcgctctgtcgcccaggctggagtgcagtggcgtgatctcggctcactgtaacctccgcttcctgggttcccaccattctcctgccttagcctcccgtgtagctgggattataggcgcccgccaccatgcctggctaagttttgtatttttagtagagactgggtttcaccatgttggtcaggctggtcttgaactcctgaccttgtgatccgcccgcctcggcctcccaacgtgctgagattacaggtgtgagccaccacgcctggcccagaattgactttttttttctttttttgagtcggagtcttgctctgttgcccaggctggagtgcagtggcaccatcttggctcactgcaagctccacctcctgggttcacgccattcttctgcctcagcctcctgagtagctgggactacaggcgcccgccatcacgcccagctaattttttgtagttttggtagagacgtggtttcaccatgttagccaggatggtctcgatctcctgaccttgtgatccgccccccccttggcctcccaaagtgctgggattacaggtgtgagccacggcacctggcccacattttacttttgacaaacctcagcttattattattattttttcctggtttgtgctttttatatcctatctgcgaagtccatgcaagacccaacggcactaagatttttgcctgtcttttccactggaagtttcatagttttagattttacatttgtctctgtctggccatccttacacagccacaatactgtattgtttactatagcatgatggtaagtcagttaagtaatatgagtcttccagcttcattctttttcaaaattgctttggtttttctacacgttttttctgtgaactttagaatcagcttgtcagtgtctacaagccctctgggattttgactggaattgcattgaatgtatgaaacaatctggaggacagctgacattttaacaatactgagtcttctgattcacacacccataggtcagtgatgggagcaaggctcaggctaaagcagattcagggtgtctttctgtgtggaacgtttaggaaaagtatgtttgcatgccactgtctcctgaccaaacccttcgcttttttgtcttctagtatctttatgtatccttatagattattataggcagtaatgattaatgatgagatattaaaacgcctttgttcttttgatttaaggagagggcaagtattgaggattttccctcttgcttttgtattcagggccgggcgctggtggctcacgcctgtaatcccagcactttgagaagccgaggcgggcatatcacgaggtcaagagatcgagaccatcctggccaacattgtgaaacctcatctctactaaaaatacaaaaattaactggccctggtggtgtgcgcctgtaatcccagctactcaggaggctgaggcaggagaatcgcttgaacccgggaggcagaggttgcagtgagctgagatcgtgccactgcactccagcctgggccacagaaagagactccgtctcaaaaaaaaaaaaagaaaaaaaaaatcccaaagtgtcagaattactgtattcagctatagatgcatccctgtatataagatgcagtttcttatacgtgtacaaatgcctatcgcaggccaggtgcggtggctcaagcctgtaatcccaacactttgggaggctgaggcgggtggatcaagaggtcaggagttcaagaccagcatggtgaaaccccgtctctactaaaaatacaaaaaattagctgggtatggtggcgcatgcctgtagtcccagctgctcaggaggctgaggcaggagaatggcttgaacctgggaggtggaggttgtggtgagccgagatggtgccactgcactccagcctgggcgacagtgcgagactccatctcaaaaaaaaaaaaacaaacaaaaacaaaaaaaaaaacaaatgcctatcacagttggctcagtcactttttctgtgactgtcattgcttcaattttatgttgatttatgaaacctaagtttacacagaaaagaaattaaggactaaattaagatactgaagaattacttaagcccctgagtttttttttttctttttttttttttgagacagagtcttgctctgtcacccaggctggagtgcagtggcgccatatcggctcactgcaagctcctcctcccgggttctcgccattctcctgcctcatcctcctgagtagctgggattacaaggcgcccgccaccacgcccggctaattttttgtatttttagtagagatggggtttcactgtgttagccaggatggtctcgatctcctgaccttgtgatctgcccgcctcggtgtgagccaccggacctagccaaccccctgagtttttttaaagttctaataatactcatcaggttagctgtgtatgcaagcatattgtaaaattgcttttttttttttttatttccagttggagtctagctctgtcgccaaggctggagtgcagtggcgcgatctcagctcactgcaacctctgcctcctgggttcatgcgattctcctgcctcagcctcccaagtagctgggattataggcaaccgccaccatgcccagctaatttttgtatttttagtagatatggggtttcactgtgttggccaggctggtctcgaactcctgacctcgtgatccattcacctcagcttctcaaagtgctgggtttacaagtatgagccactgcgcctggctgtaaaattgccatttaagaggctgtgtgtaactggaggtattgatgggtgtctttgagagggtggggattcagaaaggttcaggatgggccgggcgcggtggctcacgcctgtaatctcagcactttgggaggccaaggtgggcagatcatgaggtcaaaagatcgagaccatcctggctaacatggtgaaaccccgtctctactaaaaacacaaaaaattagccaggcgtgatggcgggcgcctgcagtcccagctactctggaggctgaggcaggagaatggtgtgaacctgggaggcggagcttgcagtgagccgagatggtgccactgcactccagcctgggcgacagagcgagactccgtctcaagaaaaaaaaaaaaatttctttatgtctttcttggtcaagtgtttttttttacatatgtacaatggggatcctgagttggaaccacatactttggtaaacaaagtgcagtagtgttcacagttaccacgatcatatcccgtgttgacccaccctctcttttttaggttgcgacctttccttccccagcaataaactggtctctggagatcactgtagaattgtagtggatgaaaaatcaggtcaggtgacactggaagataccaggtgagtatgttctgagcttcttttggtgtttcttcttgtagcttaagaagcctgacttcgtgctctgtgctgtgtgccacggctgaggaggagaagaaatgctgtctttagtgtgataacagcggctcatttttataacagcacagtcatgtgtcccttagcaacagggatccagtctgagaaatgtgtcagacaatttgatcatcttgcaaacatcatggagtatacttaaacaaacctagatggtgtagcctactacatacctaggctatatggtatagccgattgctcctaggctatcaacctatacagcgtgctactgtactgaatgctataggcagttgtaacacaatggtaagagtatttatctaaacacagaacaggtgcagtaaaaatatgatattttaatcttgtgggactcctatcgtatatgcgtctgttgaaaaaaacattattatcagcccgggcgcggtggctcacacctgtaatcccagcactttgggaggctgaggcagttggatcacctgaggtcaggagctcaagcccagcctggccaacatggagaaaccctgtctctcttaaaaatataaaaattagccgggcgttgtggcatgcgcctgtaatcccagctactcgggaggctgagacaggagaatcacttgaacccgggagtcggagattgtggtgagctgagatggcaccactgcactccagcctgggaaacgagtgaaactccatctcaaaacaaaacgaaacaaaagtttattatctggggcatgactgtagttaattaggctcccaaggtattagaagatgtatttcctggtttccaggatgggacacttagtgacactttggtgtctatgacccttcttgaatgtattcaaattaagtatgtctcagaaataagacttaaaagatgctggtaatttttggttcttgcaagcctattcaagtttgatttctttccctcaaatcaaaaaatcattttttaaaactaataaattctcgttcttgtacaactgaagtacagattgagtatctgaaatgattgaaactagactgtttagattttggattgtttcagattttagaatattttcattatacttaccagttgagcatgtctgaatcaaaattctgaaatgttccagtgagtatttttttgagtgtcttgttggtgctcaaaaagttttggatttcacatttctgattagggacattcagcttagggatattcaacttggaaagtggaaagctttccaaaatcctattcatacgttaaaaatgcatatgttggtatatatattttgcataaatgcaatcacactacacatactgttgtagcgtcagcttttttctttctttcttttttttttttgagatggagtttcactgtgttgcaggctgaagtgcagtggtacgatctcggctcactgcgacctccgactcccaggttccagccattctcctgccccagcctcccgagtagctggcattgtaggcacacactaccaagcccggctatttttttgtgtttttagtagagacgggatttcaccatgctggccaggctggtctcgaactcctgatctcaggtgatctgcctgcctcagcctcccaaagtgctgggattacaggcgtgagccatcgcgcccggccagcttttttcacttacggtgttttatggagcgcttcacatgtcactgcatctacatccagctcatcttttcattatcttaggatagtttctttgtcacttcccttattggtggacatttattgttttgactttttcttactataaataacactgcagtgactctttcccaaactctgccttcatgtctgttttcttgggatgatttctcggaagggaagtctgtgtcagtgttactcagaatgtgcctattcctttttttctcttttttgagacggagtctcgctctgtggctcaggctgaagtgctgttggtgcgatctcggctcactgcaacctccgccacccgggttcaagcgattctcctgcctcagcctcccgagtagctgggattacaggtgcccgccgccacgcctagctcagatggggtttcacaatgctagccaggctggacttgaactcctggcctcaggtgatccacctgcctcagcctccccaagtgctgggattgcaagtgtgagcccccacacccggccagaatgtgcgtcttttaaatctgctgcaagtggcaggtggtcttctagcagtatgttgagagtgtgctgttctcactgcaggattttttttgtttggtaaagatcaggctctgtgagattctttggtaactgatagtttcagggatagaagactaggaagtaggttttaataggaagaactgatgctccgtttcctagtctaatagatatcagattaagttctctatttcttggcacaatgggaaaggcagggtgctggtccctagctgtcccgcctgcttcagggcctggcttccccatgctgggtgctggtcctgggctttcctgcctacatcagggcctggcttctccacgctgggtgctggtcctgggctttcccgcctacatcagggcctggcttccccgtgctgggtgctggtcctgggctttcccgcctacatcagggcctggcttccccgcgctgggtgctggtcctgggcagtcccgcctgttccagggcctgggttccctgcactgggtgctggtcctgggcagtcccgcctgttccagggcctggcttccccacgctgggtgctggtcctgggtagtcccgcctgttccagggcctggcttccccgcgctgggtgctggtcccgggccttcctgcctgttccggggcctggcttcctcgcgctgggtgctggtcccgggcagtcccgcctgttccggggcctggcttccccgcgctgggtgctggtcctgggcagtcccgcctgttctggggcctggctttcccacgctgggtgctggtcctgggcagtcccgcctgttccggggcctggcttccccgcgctgggtgctggtcctgggccttcccacctgttccagggcctggtttccctgtgctgggtgctggtcctgggccttcccgcctacatcaggacctggcttccccgcgctgggtgctggtcctgggcctttctacctgttccagggcctggcttccttgcgctgaatgctggtcctgggcctccctgcctgttccagggcctggcttccccacgctgggtgctggtcctgggccgtcccgcctgcttcagggcatggcatccctgtgctgactgcatggtggtggtactttcttatggctattgtaatttaccacaagcttaatggatttaaaaaacacaaatttgctgtcttactatagttatggaggtccagagtccgatatgggtctgatggggctaaaatccaggtctgaacagggctggtttcttctggaggctccaggggagaatttgttctctgccttttccaggttccagaggtgccacgttccttggcagaggtgggctggaggggaggggtgctcaggcagaaggaaccacgtgtgtaggggcccctgagcataagcagggctgtgtggtcggagcgtgtggtgagcggcaaagtcacacaagggagcttgggctttagcctgagagcagtgaggagtcatcaaaggggtgtaagcggaggagtgaaataatcagatttttgtttggaaagaacaggaggatgagtgatggctgcagtcgcccctcggcatctggggggattggctccagccccctgcatgcacccaagtccgtgcacactctagccccgtagccagccctgtggagcaggaggacacagaaagtcagtccagctccagcgcccctgcatgcacccaagtccgtgtgcactccagccccgtagccagccctgtggagcaggaggacacagaaagtcagtccagctccagcgcccctgcatgcacccaagtccgtgtgcactccagccccgtagccagccctgtggagcaggaggacacagaaagtcagtccagcatatgtgtgggattcattccctctcattgaaaaaaacccgtgtataagtgcatctgcacagctcaaaaccgcatcttccagggtcagctttgtgttgtaacagcagaactcagacacacacagccactgcctggtttcggaggttttacggggagacggctgtggcagttcatttgcttactgtctgcatttgctttcctgctacagacggcagagctgagtagtggcaatggtgaccacaaaacctacactgtttaccctctgtttatggaaatcgtttgccactcccatccctcagcaaaccgtggtggtcactcggatgtgagttctgtccactgctggggcctcgggagtgaagctgcagagctgaggcctgtgtggtttcagtcgttttgcccggttgccgttttgtgtgtcgggtatgctgtgctcttggatcttggtcacctgaccaacacctgatttgctgtcaggtctctgctcagaagtccccaggaggcacttcctgccccatcaacttagcctcctcctgtctgtccctgggtcagcagcatctgcattggcctctccctgggcagagtacctcaaggggcttggcagccagaccacaagctctgagtgcagggccatgtcctgcagctgacggcccagcatttagtccgcttctgcccagagccagtctcttgggagggatcagtactcattggaggcatgagttcaccggggttgtgatggctgcaaggaacagaactgtggatagcacaagtccagctcaggggaggctggaggtggaagcaccacactgtagacgaggcctccgggtccactaggaggcaaacggggagagaacccagccctgcagcagcagagctgccaagcacgtgaggaggtgtagtggctggttaggctgtcagtcagggagaagtgggcgagccatttcttgagagaatggtgaggggtgcgtggatgtgtgcatcgttacgtatttacactgttcctatgagtatttccagagtggtcatatcgagctgcttgctaatggtgctagaaaaaaaatcttgtaactccaagttattttaagtagaataaattgtgtttttgtttttttacagcaccagtggaacagtgattaacaagctgaaggttgttaagaagcagacatgccctttacagactggggatgtcatctacttggtgtacaggaagaatgaaccggaacacagtaagagagaggaaggcttgccggggtcagacccgcacgggggtgcacgtgagggcgctctctgaacgttcctcctggctacatcccttcccataggaacgttcctcctggctacaccccatttcttgctcacatgggttcctgccgtgaatagtgtctgttgagtgggagtgtcgactttgcagcctgagcccagccattcctcaggaataccactgtggccatgagcagccaatcccaaaatggcagccaaggagaaactgatggggatggtttgggttctacaggagaagaacttgagttatggggaataaaacctaggaccaggggtctggaggccattgatggttctgcttttggagaccttacaagaaacatcaaaggttagactggattccagtaagttttttcagctccagaagtcccgtttttgttttgtggaagaacagtataggacaaggaaagttatgggagtccttcgaaggtcacccctgaaatacttttttttttttgagatagagtttcgctcttgttgcccaggctgaagtgtaatggcgcaatctcagctcaccgcaatctccacctgccgggttcaagcaattctcctgcctcagcctcctgagtagctgggattataggtgcccaccaccacgcccggctcatttttgtatttttagtagagacggggttttgccatgctggacaggctggtctcaaactcccgacctcaggtgatccacccacctcaacctcccaaagtgctgggattacaggcatgagccactgcacctggccaatacttatttatttaattttttaaataaataagagacagagtctcgctctgctctgttgcggaggctggagtgcaatggcgtgatctcagctcactgcaacctccacctcctggtttcaagcgattctcctgcctcagccttccaggtagctgggattacaggtgcacaccaccacacccggctaatttttgtatttttagtacagacagggtttcgccgtgttggccaggctggtctcgaacttgggacctcaggtaatccgcccgcctcggcctcccagagtgctgggattacaggcaagagccactgcacctggccacccctgaaatacctaaagaccacagtggtgagggagaatggggcaaatatgtcttaggcatcttcagcataaacttaaccagcccctggccacacggaaggatcttgtatctgctcctttgtgtagtttgaaattataagtgaggcatagattcttcaccttcttctgcctcctgatgccattttttcccgaggcttatttcttttgtgttggtagagatgttttagattacttgttttgaaatctcttaaactgatgaatttgttattagctgatgagtcaaaataatcaacaaaaacaaatggactggagaacagaagagaaaaatgagttctcagtttgcacaggggccaccacttttctgatttgattgattttcttttagacgtggcatacctctatgaatctttaagtgaaaagcaaggcatgacacaagaatcctttggtaagtaagagtgtagcaaagaagtgggtgcatgttaggagctatagcattccttttgtgttttgagatggagtctcgctctgttacccaggctggagtgcggtggcgcgatctcagctcactgcagcctccgcctcctgggttcaagcaattcccctgcttcagtctcccattttttttttttttttttttgagacggagttttgctcttgttgctcagcctggagtgcagtggcgcgatctcggctcactgcagcctcctcctgccgggttcgagagattctcctgcctcagcctcccgagtagctgggattacaggttgcaccgtcacgcctggctaattttgtttgtttgtttgtttgtttgttttttgagatggagtcgcgctttgtcgcccaggctggagtgcagtggcgcgatctcggctcactgcaacctccacctcccgggttcatgccattctcctgcctcagcctcccgagtagctgggactacaggcagtcgctaccatgcccagctaattttttgtatttttagtagagatggggtttcaccgtgttagccaggttggcctcgatctcctgacctcgtgatctacccgcctcagcctcccaaagtgctgggattacaggtatgagccaccgcgcccggcacgcctggctaatttttatatttttagtagagacggggtttcaccatgttggtcaggctggtctcgaactcctgacctcaggagatacacctgcctcgacttcccaaagtgctgggattacaggcctgcaccaccgtgcctggccttggggctgttgcattcttaagagcatttcaatccctagagtgtctgcttgagccctggttgtgtgctgcttctgctccttttgggttacagaagctaacaaggaaaatgtgttccatgggaccaaagatacctcaggtgcaggtgcagggcgaggggccgatccccgggtccctccgtcgtcgcccgccactcaggtgtgctttgaggaaccacagccatcaacatcgacgtcagacctcttccccacagcctcggcctcttccacggagccttctcctgcagggcgagagcgttcctccagttgtggtgaggtcacatctcatgaggtcttggtgctggttgcatggtttttgttcactactctttacctgtgttgttacagaggcagataagcgactgaggactggcatgaggttctcagtagtgagatttctgtaggagtcaatattgagtgtgttgttcccttcacttcccaagagaagtgaagatcagggactctagtaccattgtgtattttgcagtttcattgagactataattcgcataccataaaagtcatccagccgaagtgtacatttcagtggattttagtacatcacaaggtgtgggaccatcaccactcattgacacgaaaaggaaaccggtgcccaccagcagtgactccacatgtccccttcccctcggccccaccagcagtcactccccatgtccccttcccctcggccccaccagcagtcactccccatgtccccttcccctcggccccaccagcagtcactccccatgtccccttcccctcggccccaccagcagtcactccccatgtccccttcccctcggccccaccagcagtcactccccatgtccccttcccctcgaccccagcagcagtcactccgcatgtccccttcccctcagccccagcagcagtcactccgcatgtccccttcccctcggccccaccagcaatcactccccatgtccccttcccctcggccccaccagcagtcactccccatgtccccttcccctcggccccaccagcagtcactccccatgtccccttcccctcggccccaccagcagtcactccccatgtccccttcccctcggccccatcagcagtcactccccatgtcccctccccccagcccctggcagctgcgtgtgctttcggcctctggatttttctgttctagacacttcacagacatggaatcatgcgtgctcttttttgttgttgttgagacggagtctcgctctgtcgctcaggctggagtgcagtggtgcgatctcggctcactgcaagctccgcctcccaggttcacgccattctcctgcctcagcctcccgagtagctgggactacaggtgcctgcaaccacgcccagctaatttttttttgttttttgtttgtttgttttgagatggagtctcgctctgtcacccaggctggagtgcggtggcgcgatctcggctcactgcaagctccgcctcccacgccattctcctgggtccacgccattttcctgcctcagcctctgagtagctgggactacaggcacccgtcaccacgcctggctaattttttgtatttttagtagagacggagtttcaccgtgttagccaggatggtctcgatctcctgacctcgtgatctgtccgatcggcctcccaaagtgctaggattacaggcgtgagctgccgcgcccagccgtgactgggctctttcacttagcgtggtgttttcagagttcatccagaagaggatgttatttaaaactagttttgcagatgctgttccttacggcatgactcttacctcttccatggtcattgggaagaaattccatctgggtgcagcgtgacgggaatgttttctgttttcttttagggtttgtcacgtggaggatgtgtacatatggattctctaaattggatcgcgctatacatattatttttttttaattttcttagctattctctattctagattatgttttgaattagcttttccagtttaatagaaaaatctttttgagatttttgatttggggagaattgacagttttacagagcccaggaaaatggtgtttctccttgtttgttaagctcttcctgttcttcagtgaagtctcacggctttcttcgtgtcgtctgggctcattcttagtcctggagtgcttggctctcgcgttcttacattccatagcagtctgcagattcctatgaacagaagagcctctgaatctcagattaggctgtgtttcgatctgacaggaaagctggttccctgataaaaagtccagaaatgcccgctcagctcagctactcctgaggtcaccagggccttctgtgcactccacgctgctgtttttgctcaggtttttgcctcgaggtttcacagtggctgccagagctctgaacatcactgacacattcatggcaggcaccaggaagcctccggagaagggacctttgctttccatggatctgttggctgatccgcagcagcaagagccatgtctcccagaagactgctccctctgtctcatgagccagcctggctgctctgctacaggacactccttgtttttatgtctctctgtgtattccagtgggatttggggaaggagcggcatcgggtgcagggactcagtgtgccttcttgaaaccagaaacctctcacgctctctgggcctgtttccacttctgttgatgtggtttttactccgttgtatgccgttgctctgtcttcacacgggcagccacacctctcctgttcgttgatgttcttgaggccttgttgcatccgctccttccttcttcagaggctcctttggatgagcccagctcctcagcagcagagtgctctttattttctgtttttttgagacagagtcttgctctgttgcccaggctggagtgcagtggcgcaatctcggctcactgcaacctccgcctcccgggttcaagtgattcccctgcctcagcctcctgagtagctggggtcacaggcgcgcaccaccaccacgcccagaaaatttttgtatttttagtagagacgttgttggccaggctggtcaccaggagcagagtgttctaaaagcatacctcagtctgatggatgacatcccagccatctgaagagtaacatccagatgtgttgtaacattccagtgtgttgtaacattcctgtaacattccaatgtgttgtaacattctggtgtgttgtaacattcctgtaacattctggtgtgttgtaacattccggtgtgttgtaacatttggtgttacgcggtgtgttgtaactttctggtgtgttgtaactttctggtgtgttgtaacattctggtgtgttgtaacaatcgcggtgtgttgtaacatccggtgtgttgtaacattccagtgtgttgtaacatttggtgttacatgctgtgttgtaacattctggtgtgttgtaacattcccggtgtgttgtaacgttccagggtgtgttgtaacattccggtgtggtgttccggtctgttgtaacattccaacattccggtgtgttggtgtgttgtaacattccagtgtgttgtaacatttggtgtgttgtaacattccggtgtgttaacattccggtgtgttgtcacattctggtgtgttgtaacattctgatgtgatttcgggactcacctgggaggacttctcaggtgctaattggggacactaagttgcaggcaagactgtggagagtgagtgctatgtagtttccacctgatatttctggagataagaggaacagcggagaccaaacccatgacagacaagtttctactagcctgtctcctgtagactaaacacaaccccggcttctcagagcctctttgatttacctttgttttaacatcataaccttaaatttatgagtgaaagaaaataacacttcaagatgaaagcatctcagcactgggcacagtggctcacgcctgtaatcccagcactttgggaggctaaggtgggcagatcccttgagcccaggagttcaagaccagtttgggcaacatggtgaaaccgtatctttacaaaaaatacaatataaaaaatacaaaaattagccgggtgtggtggtgcatgcctgtaatcccagctacttggaaggctgaggagggaggattgcctgagcctgggaggcagaggttacaatgtgctgagattgcaccactgcactccagccttggcaacaaagccagagcccatctcaaaaaaaaaaaaaaaaaaaaaaaagacctgtaatcccagcactttgggaagccaagacaggcgaatcacttgaggtcaggagcttgagacctacctggccaacatggtgaaaccccgtctctactgaaaatacaaaaattatccaggcatggtggcaggcgcctgtagtcccagctactcaggaagctgagacaggagtttcacctgagagaggaggatcacctgaggctgggaggcggaggttgcagtgagccgataccgcgtcactgcactccagcctgggcgacagaccaggtctcaaaaaaaaaaagaaaagaaaacatgccagatttgaatagccacctgaatgctgaagttttaccagctctcttgggctgtgtacccttcatcgtatcttccaggttccttaaaacctacccttgggcacagctgggatgtgcactggctcttcacagctagatccagcatgcactgactctccccgtgcagggacagccccagaggaatagaggtggcgttccggccgctccagcgtggcccacagcgtttcaagtgcagcaagcacagacaggacgcggggttactagtattttggattgactgcagattttgaactgtctgcctagatgaactataccatgtccctagggccaagtcccatgtgcattttgtggctactagaccctcttcagaaatcaaacacaaaatagctctggcctgtaaagaaaacaaacttcaccagtaaaattgtttcctgttcctatccaccaatgtgcatagcacagtgtgtagtctgggtaatacggtttgcataattttttgataatgttctacttaaaaagggcagcgtatttatatattacttatgtaattaaaaaaaaaattcttctggccgggtgtggtggcttacgcctgtaatcccagcactttgggaggccgggtggttggatcgcctgaggtcgggagttcaagaccagcctggccaacatggcaaaaccccatctctactaaaaatataaaaattagccaagtgtggttgcgggcgcctgtaatcccagctactcgggaggctgaggcatgagaatctcttgaacccaggaggtggaggttgcagtgagccaatatcctgccactgcactccagcctgggtgacagcacaagactctgtctcaaaaagaaaataaaaataataaaaaataaaaattcttctatctgtatgcctaagtgtatgcatactaacaaaataagtatagttactgcttattgagcagctactaaatgtgaggcagtgtgccaggtacattctgtaagtggtaagatggtgctcctctccacgttggctgagcacggggcgctggagatgatggcgtgagtgggtgccggctgggggccggcccacaggctgtctctttccttctgttcgtatatgaggtggtttgtccccaaaactattctgttttctttcagctgctgtaagccagtttcttgtgtttttttttttcaaataataacacttacatttgaatactgtaagctagatatgtattatgctgtaatatgataaactaagtctttattaagatataggttattcacacctgtaatccttattcacacctgtaatccttattcacacctgtaattccagcacttggggaggccgaggtgggtggattgtttgggctcaagagtttgagaccagcctgggtaaaatggcaagaccctgtctctaccaaaaatacaaaaaacaatttagctgggcatggtggtgcacacctgtagtcccagatactcaggaggcagaggtggaaggatcgctttagcccaggaggcagaggttgcagtgaatgaagatctcgccactgcattccagcctgggtgaagagtgagaccctgtctcaaaaaaaagatagaggtgattagaaagtctgcctgtttttctgccaaggtcattcctgtcgttatgactctggcttcttgctcgtggagatagcgctctccctacaagtcactgtgctgtatccttcccgttatcacacctcttgtaaaatagttcacacgcagcaccatctccacccgttggaagctatgcatccctccactggagcatctgtgctttacacagacttctgtttttttttgtttgtttgttttgttttactttgtttttttgagacggaattttgatcttactgcccaggctggagtgcaatggcgcgaacttcgttcgctgcaactccgcctcctgggttcaagcagttctcctgcctcagcctcccaagtagctgggttacaggcatgtgccaccacacccggccaattttgtatttttagtagaaatggggtttcactgtgttggtcaggctggtctcgaactcctgacctcagatgatccacccaccttggcctcctgaagttctgggattacaggcatgagccaccgcgcctggcattttttttttttttttaagaaatgaggtcaggccgggcgcggtggctcacgcctgtaatcccagcactttgggaggccgaggtgggtggatcacgaggtcaggagatcgagaccatcctggctaacacggtgaaaccctgtctctactaaaaatacaaaaaattagccgggcgtggtggcgggcacctgtagtcccagctactcaggaggctgaggcaggagaatggcgtgaaccagggaggcagagcttgcagtgagccaagatcacgccactgcactccagcctgggtgacagagtgagactctgtctcaaaaaagaaaaagaaaacaaaagaaatgaggtcttggccaggcacagtggctcatgcctttaatcccagcactttgggaggctgaggcaggtggatcatgaggtcaggagatcgagaccatcctggctaacacggtgaaaccctgtctctactaaaaatacaaaaaaattagctgggtatggtggcgggtgcctgtagtcccagctacttgggaggctgaggcaggagaatggcgtcaacccaggaggcggagcttgcagtgagccactgcactccagcctgggcaacagagcaagagtccgtctcaaaaaaaaaaatgaggtcttgctctgttgtgcaggttgggagagtgatgtggtcatggctcactgtagcctcgaactcccgggctcaagtgatccactcacctcagcctcctgagtagctgggaccatatgctcgtactgtcacgcctagttaatttttttttcttttttgtattttttgtagagatggtgccttgctgtgttgcccaggctggtctaaaactcctgggatcaagtgatcctcccaccttggcctcccaaagtattgtgattacaggtgtgagccccatgcccagcctcagacctctattttttatttttatttttttttccccagagggagtttcgctcttgttgcccaggctggagtgcagtggcacgatcttggctcactgcaacctccgcctcccgggttcaagcaatttttctgcctcagcctcttgagtagctgggactacatgcactcgccaccacgcctgtctaatttttttgtatttttagtagagatggggtttcaccatgttggccaggctggtctcgacctcctgacctcaggtgatccacttgcttcggcctcccaacgtgctgggattacgggtgtgagccaccgcacccggcccaaagctctgttgtaacaagtttatgacacagtgtgtatcatatgaccacgggtatgtgggtttgccctgcgttagactcggtgctcgagggctaagcctggtcacagacatctccgcatttgtttctctgcaaatgggctccttgcccccagctccaccccacgtagagataggcacaaatagagttaagatgtgagttgagtgagcacacactcctcgtaagccacttgtcattcctaaactacgacatctcaggctgccagctgcactgggctccagtcagtgacaccttacaggcatggttctctcctgagctggatggatcagcacctatcttgtttgattcctctcacagggtctgggggtggtggcatctcccctaaaggaagtggtccctctgtggcaagtgatgaagtctccagctttgcctcagctctcccagacagaaagactgcgtccttttcgtcgttggaaccccaggatcaggaggatttggagcccgtgaagaagaaaatgagaggaggttagtgtctggttgtgtgtgtcctcagtcctctcgtgtgctcctggggcatgcgggggccgctgccatgctccgtgctgtggggcattgcttcctgcaggggcatgtggaccctgcctcaggttgatgcctgtaacacctccggcattttcattcagaaaacctgggcctgtttttttgcggtttgcataatccagatagaactgtgatttgctacaggctgttctcttggtctggaaatagtgcattctgaattgcagaattaatctcaaaatcctccttcctggccaggtgcagtagttcatatccgtaatcctaacactgggaggccaaggcaggagaatcacttgaggtcaggcgttcgagaccagcctgggcgacagagcaagactttatctctaaaaataaaaatcaagcctgacaccgtggctcccgcctataatctcagcactttgggaggccaaggtggacggatcatctgaggtcaggagttcaagaccagcctggccaacatggtgaaactccgtctctactaaaaatgcaaaaattagctgggtgtggtggtgcatgcctgtaatcccagctacttggaaggctgaggcaggagaattgcttgaacccggcaggtggaggttgcagtgagccaagactgtgccattgcactgcagccggggcaacaagaacaaaactccatctcaaaaaaaagaaaatcaaaaagaaagccctctgtcctggtaggacaataatttctaaaaatgtagcttaaatcttcacattgaagatgatttagggagaagtctgcactttgaaagccaaagttaagattattagaaaacatttgggaatgttatggtagaagcattgctgtatagcagtccagagagcagccagccactggggcactgtgacaggaaggttctaggaggggtccccagggaaagaaattaggttatctgacacgtggggttgatcggtgtggggaaggtgtggaaagagtcagcaacagttacacaggaaaaataagcacaggaatgaggaaattttaattctagcaaacatgaaaaattgtgtaagtcacacaacttaatctagtaaactacttggctcagcagtgaatacttgcataagcataataatacaaatacagtatcatgaactaatgtaatctgttaatgtaatgttggcaggggtgtctcaggacagagtttttctctaccttaatagatgtcaggaatgatgtctaaaattgataaatcaaatgtaccatgataacttagaaacacagaggtaaataccagaagaaacagctcaaagacatgaaaatagttttcctccgaggagggaaattgggtgaggagcggctgagacggagggtgactgcctttgttttcttctaaatatattatgtatacatttttttaagagacaggatcttgctttgtcacctaggccagagcgccgtggtgcagtcttggctcactgcagcctccacctcctgggctcagactgtcctcccacctcagccttccgagtagctgagaccacaggtgcacgctaccatagctggctaattttttttcccatttttttagagatggggtttcattatattgcccagactggtcttgaactcctgggctcaagcgatctgcccacctcagcctcccaaagtgctgggattacagttgtgagccattgcacctggcttcttctaaatacttggctttttaaattgtgtacagtttctttaattaaaaataaaaattaattgattaccaacatctgagcattatagaaaaataaaaacaccagaagagggtggggcgcggtagctcacacctgttaccctagtactttgggaggccgaggcgggtggatcacgaggtcaggagattgagaccatcctggctaacacggtgaaaccctgtctctactaaaaatacacaaaattagccgggcgtggtggtgggcacctgtagtcccagctactcaggaggctgaggaaggagaatggcatgaacccgggaggcggagcttgcagtgagccgagatcgcgccactgcactccagcctgggcgacagagcgagactctgtctcgaaaaaaaaaagactgcatgtatttccttctcggttacgacagttagaacacatccctttctcctgtggacggggaccttgacctgaacctgcgtgtatttccttcttggttacgacagaacacatccctttctcctgtagatggggaccttgacctgaacgggcagttgttggtcgcacaaccgcgtagaaatgcccaaaccgtccacgaggacgtcagagcagcggctgggaagccagacaagatggaggagacgctgacatgcatcatctgccaggacctgctgcacgactgcgtgaggtgcgaccgtgttcacccttggctcacggaacatggcactgcaggttcttcgtcccgtgtggggcagggctgggcatgagacaagcctgcaggtcctgtttggcctggcatctgctgaggttactctgtcacccagataagtgggtggagtgggtggagtgggtggagctttctcagcccactgcaacctctccctcccaggattgagcggttctctgacctcagccttctgagttgctgggactacaggtgcacaccactatgcctggctgactttttttttttttttaatgttctaaatattttttattcctttttttttttttttttttttttttttttagatggagtctcgctctgtcaccaggctggagtgcagtggcacagtcttggctcactacaacctcagcctcccgggttcagacgattctcctacctcagcttcctgagcagctgggactgcaggcgtgtgccaccatgcccggctaatttttttgtattttttagtagagacagggtttcaccatgttggccaggctagtcttgaactcctgacttcaggtgatctgcccacgtttgcctcctaaagtgctgggattataggcgtgagccactactcccagccaccctgctgatttttgtgttttttgtagagacggtttcgccatgtagcccggggtggttttttgtttttgtttttgttttttggagttagagtctcgctctgtcacccaggctggagtgtagtggtgtgatcttggctcactgcaacctccacctcccaggttcaagtgattctcctgcctcagcctcccaagtagctgggactacaggcatgcgtcaccacatctggctaatttttttgtatttttagtagagacgggagtttcaccatattagccaggctggtctcgaactcctgcactcaggtaatctgcccaccttggcctcccaaagtgttgggattacagacgtgagccaccccgcatggctaccactttcattctactcgtggcaccaacaaggaggaaacctggaacccagagccggaggctgtagaccccacaagttttgagtgtgtgggtcgtgtgtgaccccgtgaactctgcaaacagatgaaaggaactctgcacattttaaatgctccttatctgggaaggtgtatttcgcatagaatgaacgtaggagccgctgaggaagggcctccttgcttttccgcgggaactcaagagtgacaaccttccaacttctgggccagaaacacttgctgtctctgttgtttgtgttcctgaagtcataatctactcgcctctgtctttcctgaaaacacagaggccgtgtggcctctgatttcttttcattaaccaagactgacttaaagggtttttaggttgaacgatggctgggcccctgtaggcccttccgtggtggggctgctgcggaccttggtcgagggtcgcggttgcatctgtgggactgtctggacactgttcctcttgcactttcagtttgcagccctgcatgcacacgttctgcgcggcttgctactcgggctggatggagcgctcgtccctgtgtcctacctgccgctgtcccgtggagcggatctgtaaaaaccacatcctcaacaacctcgtggaagcatacctcatccagcatccaggcaagtgagggcatccacaccagcacccgggcacgtgagggcggtccctccaccaccacccaggcacgtgagggcatccacccagcagcacccgggcacgtgagggctgtccctccaccagcacccgggcacgtgagggtggtccctccaccagcacccgggcacgtgagggcatccacaccagcacccaggcacgtgagggcggtccctccaccaccacctgggcacgtgagggcatccacccagcagcacccgggcacgtgagggctgtccctccaccagcacccgggcacgtgagggctgtccctccaccagcacccgggcacgtgagggtggtccctccaccagcacccgggcacgtgagggtggtccctccaccagcacccaggcacgtgagggcatccacaccagcacccgggcacgtgagggtggtccctccaccagcacctgggcaagcgagggtggtccctccaccagcacccagacaagtgagggcggtccctccaccagcacccaggcaagtgagggcatccacacaccagcacccaggcatgtgagggcggtccctccaccagcacccgggcacgtgagggcatccacaccagcacctgggcacgtgagggcagtccctccaccagcacccgggcacgtgagggcggtccgcccagacccctccttccgcagcactgcgcacgcgagctcccagcagtgtgagctgtgtctgcctgccatgtctcactgccggtgaatggcgctgtgtcctttcaattctagacaagagtcgcagtgaagaagatgtgcaaagtatggatgccagaaataaaatcactcaagacatgctgcagcccaaagtcaggcggtctttttctgatgaagaagggagttcagaggacctgctggagctgtcagacgttgacagtgagtcctcagacattaggtaaatcatgcccctggctcagagcagagtgtgtgagccagaggagcatcacaaccgtgaccgagagctcactactgggtggacagcatgggtcctgagatctagttctgccctgagcagccaagctcttaaatggcttgagcttgttttctgatattggatagtattagcacctcccctgagaggcgtggcagggactgggtgaacacttagcggggtagccagggggtagccagcagagcgtcagccgcaggcgactgctgtagacatttgcaccctcggctgacacccttccctttgcttcgactcgtcatgggtgtggcatctctggctgtgacagagggacatcattccatgttattttttcccacatgagcacatgtattctttgtagttgatctagcgactataaagtcctatagtataaattgcaatgtttatcatttgtcaggacgttattacagaagaggcaccatcaccaggccaagacaatcccagcctcagagaccttatttatctgctgacatgttgaggtttcctaatgcacaagaccggggtctgaatgttgggtcgaggccatgatatttaaaaagacaatgaacgacaaaaaaaaacacttgaaacttttatctttatttccttttgccaagtttagcatgtgactgttaagcaaaaagaaggaaaccaaaaccactttagcattaagattttgctgcctctacccagccattcatacgtgtgtcataatcgttaacaaaatgaaatgtaatgtactaacaaattttttttttcttttttttttgagatggagtgtcgctctgctgccaggctggagtgcagtgacacgatctcagctcactgaaatcaccacctcctgggttcaagcgattctcctgcctcagcctctcgagtagctgggactacaggcgcatgccaccacacccagctaatttttttgtatttttagtagagatggggttttaccacattggccaggatggccttgatctcctgacctcgtgatccgccggcctcgacctcccaaagtgctgggattacaggcatgagccactgcgccctgccaatggcacaatcttggcgcattgcaacctccgcctcccgggttcaagcgattctcctgcctcagcctcccaaatagctgggattacaggcatgcaccaccaaacttggctaatttttttttcttttctttttttttttttttcgagacaaagtctcgctctgttgcccaggctggagtgcagtggcatgaccttcgcccactgcaacattcatctcctgggttcaagtgattctcccgtgttagcctcccgaggggctgggattacgggcatatgccaccacacccagctaatttttgtgtttttagtaaagacagagtttcaccatgttggccagactggtctcgaaatcctgacctcaagtgatccgtctgccttggcctctcaaagtgctgggattataggtgtgagccaccgcgcccggccgctaattttgtatttttagtagagacagggtttcaccatgttggccaggctggtcttgaactcctgacctcaggtgattagcccgcctcggcctcccaaagtgctgggattataggcgtgagaaacaaatttattttttgtttgtttgttttttgagatggagtttcgctctgttgcccaggctggagtgcagtggctggatcttggctcattgcaagctccgcctcccgagttcacgccattttcctgcctcagcctcccgagtagctgggactacaggctcccgataccatgcccggctaattttttgtatttttggtagagactgggtttcaccgtgttagtcaggatggtcttgaactcctgacctcgtgatccgcccgcctcagcctcccaaagtgctgggattacaggcatgagaaacaaatatttttatgaagctgggattcggctgcatgtacagctcggtaatgtccccagcgtttgaattgggaaacagttgctgctgtgcatttcttccatccgtatttgtgcacatgcgcagtgacgtcaatgtttagacgtgaagcagtcgagtcacagagtgtgactgggaattggaccttgatagacgtttgataagtttgttatccagacaccgatcggaaagggtgcacctaatgcactctacaaggtctgcatgagggcctctttttgccagtttagaaggagaagtaggtaatctcattttcatttacattttttccttatgaaaaaaatgtcttttcactgtgccttgttttttacctggttgggtcttacctgttggccttattggcccctggccttggtgtgaggcgcagaaaagcctttcaaatggagaggagagcctcgtgtattttttcctacaggttctttttttacagttgacatttttatctgctcgtttttggaagtacaagggaagtgtggaaaagacaagtgattcggggctttgcaggcgcctggtgtggctcccagtacgttgcccaccgcgctctgcttttaacgggagagtaggcgggtcctgaggagcacggggcgtgcgcgcacgtgctggcccttgccctgctctggcgtcgtctcctgggagcacacgtcagtggggacctagtgaccctggggatggggctccaaagcgtgggggctgagctggggatgcagagtggcgtgtccttgcccttcgactcgttctggtccctctctaacactggggtgctggacaggaatggggcccggcccttcccctcacaccaagcagctgagcgacggtggagctgagctgtgatggctgcggacccgcgttgcaccggccctacctgagaggcttggggcctgcacacagctcggccctgtgcttccttgcagccagccatacgtcgtgtgccggcagtgtcctgagtacagaaggcaggcggcgcagcctccccactgcccagcacccgagggcgagccaggagccccacaggccctgggggatgcaccctccacgtccgtcagcctgacgacaggtgagccgcgccgccctcaggcctcagccttcgcgtgagtcactttgtggctgtgcccggtgctgacgtgcacgtggccgcgctctgcccgcctcctgtctgcactgctcgccccctttgggccctggcctcattggtctccctgcactcacagttggttgcttttcgtgactgattttgggttgggaaatcagataagtaactgttcattcgtagcccctcctgaacactcctgggaattaacaaccctgaccttaatacttggcctctccccagccactgcctcagggcagctgatgtcccccagtgggtttgccagacccaaagtgatgatcgcatatctgtccctcaagtaagaggcgggcttctccccagcagtggcgatgtcaccagaagctgccctgcgtcaccagagttggcttaatgcgaaatgtttccccgtcaggtgcctttttccagcaaggggctccaggtgctatccaggaagtcagaggagagctgggcagggggtatggaggcttcacttctctgccctgctcactccagactcatagaatgggaagatgccctcaggggtcctggcttcctggccacgggtgggggctgagcacatcacgaggccactggcctgggatggatgtagagccacatccttgtgctgcattctcagtggcttcttgtagaacccgtggacggaacggacaaagcagtgcttggcgttggtatggatgcccatccaccagcctgggtttgcttccgccactcagcagctctgtctgggtcactggacaagctccttcctttgcatggtgggaccagcgcctccctctggggtcctgggtccctcagtgggtgctcagtgaacctgggtggtgaaattgccgtccttatggccggcatgttgacctcgcagggtctttcctgtgtgggtggcgagtgtccagggaacttggctgtgtgggctcagacttctgctgccacatcgattggtcttgtgcaccgtggctgtcctttgtttatttgagagatggctgttctctcacctgagcggaaattgaacacacagcttgttttattctatatcataggttctatgggcttgtcctctctttataggaaataatagaaaaccttcaacagatcggccgggcacggtggctcatgcctgtaatcccagcactttgggaggccgaggcgggcggatcacaaggtcaagagattgagaccatcctggctaacatggtgaaaccctgtctctactaaaaatacaaaaaaaaaaaaaattagccaggcgtggcaggcacctgtagtcccagctactcgggaggctaaagcaggagaatggcgtgaacccgggaggcggagcttgcagtgagccgagatcacgccactgcagtccagcctgagcgacagagtgagactctgtctcaaaaaaaaaaagagaacttgcaacagatctttgaaatcttgctccagctgctaaatcaaagatcatttttggttattgttaatctgttttgactccccgagtttgggtggcagaaggtccccggtggtttagcagggcaggtctgcttcttccccggctgtctcaggtgcacctctcctcgctgtgcttcccggcggcctctctaacctgctgtctttctgccctgggtcccacgtgctccggctgaatgtgcgtgtgcttcagcagtccaggattacgtgtgccctctgcaaggaagccacgccctgtgcacctgctgcttccagcccatgcccgaccggagagcggagcgcgagcaggacccgcgtgtcgcccctcagcagtgtgagtgcccgcgccaccgcacgcaggcgggttcctatctgtccttcaggggtcaggtttcaaagcggtgttggccttagggtaacctgtgaagtaaggatgccgtttctttttttccatcagtgtgatcagttttccccacgtcaccatattgaataatctatcttttcccaccatctagtaacattgccccttcacaggctacatctccatccaccgggggctcggcttggatctgtgtctatcccctgccagcactgtggttgctttataatgtgtcactgttaaacctcttatatgaatgttgatgctttagtatacaactctggccaggcacagtggctcacgtctgtaatcccagcactttgggaggccaaggtaggtggatcttctgtgtccaggagtttcagaccagcctgggcaatatggtgaaaccccatctctacaaaaaatacaaacattagccagacatgatggtgtacacctgtaatcccagctactcgggaggctgaggccaaaggatggcttgagtccgagaggaggaggttgcagtgagctgagatcgtgccactgtactccagccttggcgacagagggaaatcctgtctcaaaacaaaacatatatatatatatatatatatatatatatatatgcacacacatacagttattattaaaaatggagcttgtcctttatttcatggctgttttaatgtattcctgcagaaatgtctgtctatgtcctttgccttttttttatgacttcctaatttgtcagagcttcttatatgtgaaagtgttaggtgaagaaagccctagccctgttgagcaccgcggttggctcctgccgcacacaccggtgttgctctgtgcactgagccctgtgtgagcagcacacaggaccacagcactggttctgtctggaatggcttaaaaatgttctgggcactcaggaaaccaaacaggttactgctggggtctgtaccctgagactgggcttggcaggggtggggcctagcctgcagcgtcgggacacatggccgtgggacacacccggtgatctgggcggtcgctgcctcgggggtcatccacggcaggcgctggccactgctgatgctgcacgtgggagggcaggtgagaagccacagagaacagcttgtcccatgtctcacacacgcggtggtcagcagatggcagctcggcccagcttttccccaggaatccaaactcttcactctaatttcacagagcatgcttcgtatatagaggcattggtgaagtggtcgtaggcgttataagacttaaggactcaatcctgtgagaattttagcgagggtttacctaacattatattttagggatttccattgtatagaatatcagacaattaaaaataatttcctttgggaggctgaggtgggtggatcacgaggttagaagatcaagaccatcctggctaacatggtgaaatcccatctctactaaaattacaaaaaattagccgtgtatggtggcgggcgcctgtagttccagctacttgggaggctgaggcaggagaatggcgtgaacccgggaggcagaggttgcagtgagccgagatggcgccagtgcactccagcctgggtgacagagcaagactctgtctaaaataaataaataaataaataaataacgtctacaaagccaaggtgacaacatggaaaaatacctaggtagaaaaaggccacctaggctgggcatgggctcacgcctgtaatcccagcactttgggaggccaaggcaggcggatgacctgaggtcaggagtttgagaccagcctgaccaacgcggtgagaccccatctttactaaaaatgaaaaaattggccagttgtgggcatctgtaatcccagctactggggaggctgaggcaggagaatcgcttgaacccaggaggcggaggttgcagtgagccgagattgctccactatactccagcctaggccacagagcaagactctgtctcaaaaaaaaaaaaaagccacctgaatatgtgcagttgggggcaagcatgttgcatgttcagagctagaatgaagcccatcgaagccgtgttagggtggtggagcaggtgagatttctttcttttgtgtctctcactgttttcctgggatgagcatgtggtgttcagtttaagaaacgatgtgggtctgaggccgggtgcagtgcatcacgcctgtaaatgttcagtttaagaaacgatacgggtctgaggccgggtgcagtgcatcacgcctgtaaatgttcagtttaagaaacgatacgggtctgaggccgggtgcagtgcatcacgcctgtaaatgttcagtttaagaaacgatgtgggtctgaggccgggcgcagtgcatcatgcctgtaatcctagcgctttgagaggctgaggtgggaggatcccttgaagccaggagtttgaaaccatcctgggcaacatggtgagaccctgtctctacaaaaataaaaaataaattagccgggcctggtggtgtgcacctgtagtcctagctactcaggaggctgaggtgggtggatcccttgaacccaggaggcggaggttgcagtgagctgtgattgttcccctgtactccagcctgggccacagagcgagactccatctctaaaaaataacaaaccagaaaatgtgagcctcgccttttttcagggatacaactcctcgccatcacagtccatcacaacctgggtggcgttagctggatgtggccccgccccgatttccatgagacccctcctgaacaatgtttccagaaagagttgagctcctgagcctggtgctgacgaattgtgttggagacagccctcagcgctgagtgcgtgtaacgagtgtcctctctccacaggtgcggtctgcctgcagcctttctgccacctgtactggggctgcacccggaccggctgctacggctgcctggccccgttttgtggtaatactggctcttcaggccccagttgctttgacctttgcatgttctcttggtgaacttgagggcaggggatggtggggtccatagcctgatgtttatagggatgaggccactgttggtcatcaaatgatacctattcctggctggactgcagaggtgtgtcaaattcgtgttagctcaaaatcaagccttaacagaattattaggggagatactcccaggacagaatccttgcagcggggttctgctgttacgataccaagaccaggtgctggggagactcggagagctgatctttttaaggagggagtggaatggaaatcatttctgcttgtcctctgtttaaaattgagttttatcattgaacttcttattctttctagaatctgtaatgaaaagaaatatgtttatcctcagtgtcgggcagacagtgctttcctgcgacatcattataaacaggtaacattgccccttcatctcggcagagctcaacctgggtgacaagtgtctggacggcgtgctgaacaacaacagctacgagtcagacatcctgaaggtaccgactcgctgcgggctggggagccgggagccacattttctccctagtgcagccagctggttctctgcattctattggtgtttatctgttttacctgacccgctgcgggttggggagccgggagccatgtttcctcactggtgcagccagctggttctctgcatgccattggtgtttgtctgttttttccgtattccaaaaataggtatttcgtttttgtgcctcctgccaccaattcgtaggagccgcttcccgcagctcttgttcccggcagctcttgttcccacagctctcggtgagggcttcttgaaggtgccgccctttagcaagaccagggccttttctctggtccctgtctcttctggccatttgccttcccacgtctaggaagctacctcggtttctaggatttacatatgtttaacatgcgcattcgccctcctgccgagcactttgctgacagcacacacaatggtggggccttgaggcttgccacagacacacctggcaggcgcccgctcagccccacactctgctttgatgcccacagaaggagctcaacagctcgtgtgtgtttgaagggcacagagaacagatgccaagtcctcagcttttcttgtgcaacagcctgggctcgttgctgggctgtgtgcactgtggcctggctttcatgtctcattcacacctgggctgtgtaggtcttggcagaacttttgagagactctggtaactgttacactggaaccttttgggacttccaggaggctcttggacaagacttctcgtgctgcaggccgtgaacgtgcagccctctgcaaatgccacttataagggtctgagctttggctttgcacactttcaggggccttttatgaaatgttttctctcgttatttcagtgtttcttcctctaaacgagtatttcttattcctctctttttttgcgtcacagaattacctggcaaccagaggtttgacatggaaaaacatgttgaccgagagcctcgtggctctccagcggggagtgtttctgctgtctggtgagttcttctgttgcctcctgctctaaggcgcatgtgagtgtccagggctgtgcctgcgtgtctgctctcccagtgacaactccgaccttcacccaccctggaagagaggaaaaagatcctgatgctttcaggttgtttttgtttgtttgtttgttttttgagatggagtctcgctcttgttgcccagactggagtgcagtggcatgatctcagctcaaggccccctcggcctcctgggttcaagcgattctcctgcatcaacctcctgagtagctgggattacaggcatgtgccaccacacccagctaattttgtatttttagtaaagatggggtttccccatgttggccagcctggtcttgaacttctgacttcaggtgatctgcccacctcagcttcccaaagtgctggaattacaggcgtgagccactatgcccggccttcaggttgttttttgaaagttgagcgtgggccgggtgtggtggctcacgcctgtaatcccagcactttgggaggctgaggcgggcggatcatgaggtcaagagattgagaccatcctggctaacacggtaaaaccctgtctctactaaaaaaagaaaaatacaaaaaattagccgggcgtggtggcgggcgcctgtagtcccagctactcgggaggctgaggaaggagaatggcgtgaacccgggaggcggagcttgcagtgagccaaaatcacgccactgcactccagcctgggggacagagcgagactccgtctcaaaaaaaaaaaaaaaaagacagttaagcatgaacctgtatgacatattccagcagcttctatccttgtaggggagggtgggtgtggccgactgccactactgctgcttgagaccctcactacagcagttactgctgttactgcttgagaccatcattacaggactgaacaaagggacaaacgtagaaatgaaaacaaaaagacaaaagaaacttttaaggaaaggcaacatggggaagaagaggagagctccctgcttctagtgagtaaaggctgcccctgagcttctacagcccttcatatttattgggtaacaagagcaaggaggaggtaacaactgggcagctgctaaattgatcacaggttcatactgttactgacaggcttcaattatgcctaatcataagaaacatttgtgtggcctccaacaggtggggccagcttggagggtctctaccacttgtctatccagaggtcctggggtcagttgtcctgggaccctcggggacttggtgaatctcttgcttgatgtgtcagtcacttggtgagggtcactcctctccaggggggcacacgatgctttgtggagtatgataatttatcactaagggaggctgtagaaatatatatatgagacaggttcttgctctgtcgcccaggctggagtgcaggggcatgatcacagctcactgcagcctcgacctcctgggctcaagagatcatctcacctcagcctcccaagtagctgggaccacaagcgtgtgctaccatgcctggctaatcttagtttttttatttttatttatttatttatttttttttttgagatggaatcttgctgtgtcacccaggctggagtgcaatggcacaatctcagctccctgcaagctccgcctcccaggttcaacaattgtcctgcctcagcctcctgagtagctgggattacaggcacccgccaacatgcccagctaattttttttttgtatttttagtagaggtgaggtttcaccatcttggttaggctggtctcgaactcctgaccttgtgatccgcctgcctcggcctcccaaagtgctgggattacaggcgcgagccaccgtgcctggccgatatctttgttaattaagggtatagcacattttcatttgtgttgcaaatgtttccactatagtagtagttcacttttgttgtatttattttaattttgatgtttaaattgtagatagccaaatgtacaaatcctttcctctgtgcaatttggttttcaagacatacttagaaatagctaattttctcattttcttcttgttttttgggagttttaatatttaaattttatatccatgtggggccgggcgtggaggctcacgcctgtaatcccagcattttgggaagccgaggcgggcggatcatctgaggacaagagtttgagaccagcctggccaacatggtgaaaccccatctctactaaaaaagtataaacattagccgggcacggtggcacacacctgtagtcccagctactcgggaggctgagacaggagaatcagttgaacgcaggaggtggaggttgcagtgagctgagaccccgccactgcactctagcctgggcgacagagcaagacttggtctcaaaaaataaataaaataaatgttatatccacgtgggattgttttgctgtaagaaaataaattggtggccgggcgcagtggctcacgcctgtaatcccagcactttgggaggccgaggcgggtggatcacgaggtcaggagatcgagaccatcctggctaacacggtgaaacccagtctctactaaaaatacaaaaaattagcccggtgtggtggcgggcacctgtagtcccagctactcaggaggctgaggcaggagaatggcgtgaacccgggaggcggagcttgcagtgagccgagatcgcaccactgcactccagccagggcgacagagcgagactccgtctcaataaaaataaattcgtatctagattggctttgttcttattttcctaatgtgtcgcccgttgtcttcaccccatttatggtcagtgcgttagtctcccactgctgtgaagtccgtgcgctgctgttgggaagatggtgttgctgggtaactggctgtgtttcttccagattacagagtcacgggagacaccgttctgtgttactgctgtggcctgcgcagcttccgtgagctgacctatcagtatcggcagaacattcctgcttccgagttgccaggtaaggagcccccgacttcctcatggctctagttctgtctgggttggcttcttggcttctgcctctcttttttttttttgagacagtttcgctgtttttgcccaggctggagtgcagtggtgcaatctcggctcactgcaacctctgcctcctgagttcgagcaattcttctgccttagcctcctgagtagctgggattacaggcacccgccaccacgcccggctaattttttgtgttttagtagagacggggtttcaccatgttggccaggctggtctcgaactcttgacctcggcctcccaaagtgctaggattgcaggcatgagccaccacgctcggccagcactcttttctttacagacaccctgtttgcactttgctcaatgttctaagcagaatttggcctcagtcaggagccggcaggacgtcaggccatacagggctgtggttgttttaggccctgggtctatttgcagttactcatgagtgtaacgtgggtttctaaaacagatttgtaaagacatccaatagtcaactggggtaattttatttcctcaattgggtttttattttttaatttttatttatttatttatttttgagacagagtctgactctgtcgcccaggctgaagtgcagtggtgtgatcttggctcactgcaacttccctctcccaggttcaagcgattctcctgcctctgcctcccaaagtgctgggattacaggcatgaaccactgtacctgaccctcagttgggtttttagttaaacatgtgtttcctttcctgaaatctcagaacggtccgaggaaactagttatggagggaccagaggccgtgcgtttccaccgcagcgtctgtcgttgggtctctgctgggattcaggtagctgagtgggtgcgtgcaatacatctcatagatgcgtaccccttctctttttccagtggccgtaacatcccgtcctgactgctactggggccgtaactgccgcactcaggtgaaagctcaccacgccatgtgagtgcagctgggggcacaggcgtcagctacagagtgatgaatgagttaactgcctgcttataaataggctgatatggtcattatgcttctctcaggttgcatcctttaggaaccggtatcttcatttagaaatcctgctcttcctttatcccttcgtttcatgcagttttatctccgtcttccacttctgtgtcttcctggctggagtagctttatctgttgtctgaggcatccggggcacaccccatcatttcaggcttagccgtttctaagtcgaaggctgcagtcactgagggcctcaggcccccctcgcaaagcgctgcacagctgggttctcgtccgtcccgtgagcaggcatttgtgattgctgtcacatcgtcaccctcacgtggtgtctttcccgtgctccttaaaggaggttcacagcgccatctgcattgccctgggaggcgtaggtcaggaggcatctcttaggttaggtgatcacgtaaatcactcctgtggcccaaggagttcagattaaagtgatggagacagtgccctcaggacgagatgttgtgtggactcagagaaaggcgcctccctcacagggattttgtggaataaaaaccttgctttgtgtttgagcacaaacagcacatggaagagaccatgttgttacaaaaagagatttcactgttgactggcagacagttttcagtagaaatgtgcagccatgctggtcctccttgcccacagtctgtggagagggaaggtggccacaggccatccagcttggtgtgtctgcctcagccctgtcagcagatgccacggggatgcctgaggaggtgcagcttttattctcttctctaaaaaaattatctaagatgtttgcacttcttttttttttttttttttttgagatggagtctcgctctgtctgccaggctggagtatagaggtgtgatctcagctgattgcaaccctgcctcccaggttcaagcaattcttttgcctcagcctcccgagtagcagggactacaggtgctcgccaccacatcaggctaattttttaaatatttttagtagagatggggttttaccatgttggccaggctggtctcgaactcctgacctcaagtgatccgcccgcctcggcctcccaaagtgctagattacagacattagccactgtgcgtggccagatgtttgcacttctgtttcaaaatttttaaagggataaagaagtttacctttgggggttagtttctttgatattgtgagaagcacacacactctttctcaggtagctctttctgtgtatggtttccgaatgcgtttatttgaatgcctttctgatgctctgttgtgtaatttatttgattgcctctccaatgctctcttgtgtaatttggccattttctccctgcaggaaattcaatcatatctgtgaacagacaaggttcaaaaactaagcatccagaggccctgagcagctttcagcactggaggtgaagagagcgtgtttttaaaatacagagacaagcacgtcaaggtgttttcacagccccctgagggaagggacgcagggtctccgacaggtgctctggggtgactcttctgtggagctttaccctctgagtgagaccctccccagagccccgggggccgcagcccgccctcctggtgagcgctgggcagggctcgtggtggcatcagcagcagagacgaagcctttctgtaacatgcggccgtcccgccgagaggggcagttttgctcttttgtacattttccgaaactacagttaaagcagaagtctgtttttaggaaaagtttcaagggagaagggcaagtttatcaaaaacattgtttcaggagaagggagcataagtttacagcctacaggacgtacacaatatcctgctgctgggaaaaccacagcattttatctattttttattttaataggtttggtgcttatcttctaataagatttaaatgtcacaaactgtagcacaaataatataatttataatttacaaattgactaaaa

SEQ ID NO: 15516 - DNA, 47252 bp, Homo sapiens
aatgtctcttgacagcggcggcggcgcagccggttccgggttcggcgcggggcgggggtaagcgcggctggcgagggggctgcggcgggcggcgaagggggacctggttgcggccgtgggagggggcgcccgccggcgtccaggccgggctgcggggctgcgtgggcgcgggcggccgggccggggcccgcggggtggggcgggcgccgagtctcggcctctggggtcgggagtctccatgggcgtttccggggtctccgcagatgtgaatcccgatggagcggcccgaggaaggcaagcagtcgccgccgccgcagccctggggacggctcctgcgtctgggcgcggaggagggcgagccgcacgtcctcctgaggaagcgggagtggaccatcgggcggagacgaggtgcggggctgaggccggggccgggggccggggccgggcagagccaccgggttgcgggcaggccacacgggcggcggtgcagtgtgcgctccagatttttccgtggagtgaaatgtcatgtaagaactggtatttattcggtgttctgcccaccgattcttgcgcatgattcacgcacatcatttagccttcgttacaactgtataagttagttgtgttcatatactctccagaatgcaatattgtcacgttcgttgccgtacagagtatcttttctgactgtaatggaacgaaattaaaaataatagaaggaaaagtggaaaattcacagatatgtggacatgaaacaccacactcttaaagcaaccggtgggtcaaataagtctttacaacggggaccttgttttgagacaaatgaaacaaaaatagaatacaccaaaaggtatttaggatgcagccaaggcagtactcagagggaaatttatagctgtagtgcttatattaaaaaagatctcaagtcccagcccctagaatatttatttatttaataaacctggaaagctaaaaacttgaacaaagtcatacaacgggtgagagaaagttccctcagcctccacattcactgcctccagtctcccaagtgaccatctggttgtttgatttcctctgaagcctttgtatggggagagaaatgcgctggtcctgtcaacaaaaatgtttagtttgtctgaaaattaatgaattagctccgacattatactctaaaaaggagcgaggatgggaaatatttgctgtttggaagcaattttttttttttttttggttaatttcaccccttataatgtgcttgcacctggttttttttgtttttttgtttgtttttttgagataagagtcttgctctgtggcccagactggggtgcagtggtgtgatctcagctcactgcaccctctgcctcccggttcaagtgattctcccgcctcagcctcggagtagctgggactacaggcgtgcgccaccatgcctggctaatttttgtatttttagtagagatgagctttcgccatattgcccaggctggtcttgaacaactgaactaaagtgattcacctgcttcggcctccgaaagtgctgggattacaggtgtgaaccactgtgtctgacctggttttgttttttggggtgttttggtagtcttacattccagtatcaagtcaaagtttattttacaactttgaaagtatttagatatcatcataacatatcaaaattatccctttaagacaagaggaagtatttgaagatttttccctttgtctttacttgatagactaggaggtttggtgaagagcagaggccctagagacaaattatgtgggtttccaatctgtcaacacattactctgggctaacgacatctttctgcgcctatgtacctacttcatagatttgctctgaggagttaatgagatcatacacggactgcttagaaggaactttagcgttagcacttagcattagccattgttattgtaacatgttatacatgttattacatggtaggacattacatgttaagacaaggagagaaaatatgtcgttgagtttatcttttaataggaacgattttagtgaatttataaataatgttgccagcaaaaactttaagattattgtattagtttgttcatactaccatagcaaaatactacattctgggtggcttaagcaacagaaatttatttatttatttatttatttatttatttatttatatattttttgagacagagtctcactctatcacccaggctggagtgcagtggcgcgatctcggcccactgcaagctccacctcccgggttcttgccattcttctgcctcagcctcccgagtagctgggactacaggcgcccaccaccacgcctggcagtggtattttgtatttttagtagagacggggtttcaccatgttagccaggatggtctcaatctcctgacctcgtgatctgcctgcctcagcctcccaaagtgctgggattacaggcgtgagctatcgcgcccggccagaaatttattttttattttattttatttttttaatttttgagatagagtcctgctctgtcacccaggctggagtgcagtggcatgatctcggctcactgcaacttccctcttccaggttcaagcgattctcctgcctcagcctcccgagtagctgggactacaggcacgtaccaccacacctggcttatttttttctattttagtagagatggggtttcactgtgttgcccaggctggtctcgaactcctgagctccagcaatctgtctgcctcggcctctcaaagtgctaggattacaggtgtgagccactgtgcctggccagaaatttattttcatggttcaggaggctgggaagtccaagatcaaggtgttggcagattgggttcctggtgagggctctcttggcttgcaggtggccactttcttgctgtgtcctcacatggcagagagggggactctgcttgctctctctgcctcctcttaagagggcaccagccctgtgacatctgattcccacctagtgacctcatttaacatttatcagctcacaggccccatttccaaatacagtcacattggggattaggacttaaatatatgaattttaggggggtacagacactcagttacaaacattcagttcctaacagttgtagaacttgattattttatttatttattttatatatatatatgtatttttttttttgagacggagttttgctcttattgcccaggctgtagtgcagtggtgccttcttggctcaacctccaacctcccgggttcaagcaattctcctgcctcagcctcccgagtagctgggattacaagtatgtgctaccacgctcagctactttttgtatttttagtagagacggggtttctccatgttcgtcaggctggtcttgaactcctgacctcaggtgatccacccgcctcggcttcccaaagtgctgggattacaggcgtgagccactgtgcccggcctgatatatttattttttgagacggagtcttactctgtcacccaggctggagtgcagtggtgcgatcttcactcactacaacctgcatcttccaggttaaagtgattctcctgcctgagcctccagactagctgagatttcaggcgtgtgccaccacacctggctagttttttggtatttttagtagagatgaggttttaccatgttggtcaggctggtcttgaactcctggcctcaaatcaaatgatccacctgccttggcctcccaaagcgttgggattacagccatgagccacctcgcccagacagaacttgattattttaaagcaatgatgtgcctgccatttataaggcattatttgggggaaaagggaaagcctaggtaacgtgtaggaaggggtgcaacaaccttgttttcccaaagagctctttatccagtctggagtgcagtggcacgatctcggctcactgcaagctctgcctcttgggttcacaccattctcctgcctcaacctcccaagtagctgggactacaggcacccgccaccatgcccggctaattttttttgtatttttagtagagacagggtttcaccatgttagccaggatggtcttgatctcctgacctcatgatccacccgcctcggcctcccaaagtgctgggattagaggcgtgagccactgcgcccagtctttttttttttttttttgagacggagtttcactcctatttctcaggctggagtgcaatgatgtgatctcggctcactgcaacctccgcctcccaggttcaagtgattctccttcctcagcatccagagtagctgggattacaggcactcaccaccatgcttggctaatttttgtattttgtagagacagggtttcatcatgttggctaggctagtctctaagtcctgacctcaggtgatcctcccgcctcggcctcccaatgtgctgggattacaggtgtgatccaccgcgcccagccaagagctctttattctaagagagtggcagaaatgtacatcaactgcttgaaagatttaacccaccaagcgtcaagcgcagcaaatgctgtgaatagaactttagcacaaagcatctcggttccagattagaatgctgatattcaggccaggcacggtggctcatgcctgtaatcccagcagtttgggaggccaaaacaggaggatctcttgaccctatgagtttgagaccagctagggcaacatagaccctgtatctacaaaaacttaaaaaattagctgagcgtggtggtgcatattggtagtctcagctactcaggaggctgaagtgggaggatcacatgagcctgggagttcaaggctgcagtgagctgtgattgctccactgcaccacagctggggtaacagcgcaaggccttgtctcaaagaaaaaaaaaaaaacctgatgttctggcatggagacgcctctgttacaaactggctctggcgacaccgtgacttgcactggttttggggcttgaaggagactgtcctggcagttaacgctcaatggaatgggaagagcttgaccacaggtgatacttgccttggatacagtacttccaatagtacagaatgtttgcacaaataagatttttaatatccggtttcatggcagtatcatttacttgtagtaaaattcaccttttttggggttcagttccatgagttttgggaaatgtactcaccagtgcagtcaagatgtagaacatgttcgtcaccctgaaaggtccccctgagtcccggctcctggcagccactgatctggtttctttgccttctgctgcttccagcgtgtcgtgacacagggtcacagggtgtctgccatcatcttctgcgcctggcttctttccctggcacgcaccttgttgcatggatgagcagtttgctcctttctgttaccgggtagtgttctgtggtttggatgcaccatggcttgttagtttacaaccagtggatggacatttatactgcttcctgtttttgtaagaaataaagctaatataaacataagtgtgcagtctttgtagggacatacatttttctcttagctaagtaactatgaatggaattgctgggccacgtggccagtgtctgtttaacttgctgagaaactgccgcattgtttcccatgtgcttgtccattttgcagtcccacagcacagtacgagagttccaggttttccacttcccttttggccacttgtaggtggtcagtctttttttttttttttttttttgagacagcgtcttgccctgtcgccaggctggatttgcagtggcgcaatctcagctcactgcaacctccgcctcccgggttcaagccattctcttgcctcagcctcctgagtagctgggactacaggcacgtgccaccatgcccggctaatttttttgtatctttagtagagacggggtttcaccatgttggccaggatggtctcaatctcttgaccatgtgatccgcccgcctcggcctcccaaagtgctgggattacaggcgtgagccaccgtgcccggcccgtggtcagtattttcagccaattcttatttggtgtgtagtggtatttcatggttttaatttgcatttctctgaagattaatgatgttgagcattttgtcatgtgcttaatttgccatccatatctcttctttgataaagtgtttaaattgttttaagttgcattatttactttctatttattgagttatcagagttctctatacattctggatacaagatctttgtcagatatgtgttttacaaatatttccaccagtccatagcttgtcttttcatctttttaaacaatatctttgaagaacagatttttacttttttttttttttgagatggagtctcgctctgttgccaggctggagtgcagtggcacgatctcagctcactgcaacctccacctcccatgttctcccacctcagcctctcaagtagctgggattacaggtgcatgctaccatgcccggctaattttttgtatttttagtcgagatggggtctcatcctgttggccaggctggtctcgaagtcctggtctgaagtgatccgcccgccttggccacccaaagtgatgggattataggcgtgaaccaccgcccccagccttactttttttgttgttgttgagccagagtctcgctctgtcgcccaggctggagtgcagtggcgtgatctcggctcactgtaacctccgcttcctgggttcccaccattctcctgccttagcctcccgtgtagctgggattataggcgcccgccaccatgcctggctaagttttgtatttttagtagagactgggtttcaccatgttggtcaggctggtcttgaactcctgaccttgtgatccgcccgcctcggcctcccaacgtgctgagattacaggtgtgagccaccacgcctggcccagaattgactttttttttctttttttgagtcggagtcttgctctgttgcccaggctggagtgcagtggcaccatcttggctcactgcaagctccacctcctgggttcacgccattcttctgcctcagcctcctgagtagctgggactacaggcgcccgccatcacgcccagctaattttttgtagttttggtagagacgtggtttcaccatgttagccaggatggtctcgatctcctgaccttgtgatccgccccccccttggcctcccaaagtgctgggattacaggtgtgagccacggcacctggcccacattttacttttgacaaacctcagcttattattattattttttcctggtttgtgctttttatatcctatctgcgaagtccatgcaagacccaacggcactaagatttttgcctgtcttttccactggaagtttcatagttttagattttacatttgtctctgtctggccatccttacacagccacaatactgtattgtttactatagcatgatggtaagtcagttaagtaatatgagtcttccagcttcattctttttcaaaattgctttggtttttctacacgttttttctgtgaactttagaatcagcttgtcagtgtctacaagccctctgggattttgactggaattgcattgaatgtatgaaacaatctggaggacagctgacattttaacaatactgagtcttctgattcacacacccataggtcagtgatgggagcaaggctcaggctaaagcagattcagggtgtctttctgtgtggaacgtttaggaaaagtatgtttgcatgccactgtctcctgaccaaacccttcgcttttttgtcttctagtatctttatgtatccttatagattattataggcagtaatgattaatgatgagatattaaaacgcctttgttcttttgatttaaggagagggcaagtattgaggattttccctcttgcttttgtattcagggccgggcgctggtggctcacgcctgtaatcccagcactttgagaagccgaggcgggcatatcacgaggtcaagagatcgagaccatcctggccaacattgtgaaacctcatctctactaaaaatacaaaaattaactggccctggtggtgtgcgcctgtaatcccagctactcaggaggctgaggcaggagaatcgcttgaacccgggaggcagaggttgcagtgagctgagatcgtgccactgcactccagcctgggccacagaaagagactccgtctcaaaaaaaaaaaaagaaaaaaaaaatcccaaagtgtcagaattactgtattcagctatagatgcatccctgtatataagatgcagtttcttatacgtgtacaaatgcctatcgcaggccaggtgcggtggctcaagcctgtaatcccaacactttgggaggctgaggcgggtggatcaagaggtcaggagttcaagaccagcatggtgaaaccccgtctctactaaaaatacaaaaaattagctgggtatggtggcgcatgcctgtagtcccagctgctcaggaggctgaggcaggagaatggcttgaacctgggaggtggaggttgtggtgagccgagatggtgccactgcactccagcctgggcgacagtgcgagactccatctcaaaaaaaaaaaaacaaacaaaaacaaaaaaaaaaacaaatgcctatcacagttggctcagtcactttttctgtgactgtcattgcttcaattttatgttgatttatgaaacctaagtttacacagaaaagaaattaaggactaaattaagatactgaagaattacttaagcccctgagtttttttttttctttttttttttttgagacagagtcttgctctgtcacccaggctggagtgcagtggcgccatatcggctcactgcaagctcctcctcccgggttctcgccattctcctgcctcatcctcctgagtagctgggattacaaggcgcccgccaccacgcccggctaattttttgtatttttagtagagatggggtttcactgtgttagccaggatggtctcgatctcctgaccttgtgatctgcccgcctcggtgtgagccaccggacctagccaaccccctgagtttttttaaagttctaataatactcatcaggttagctgtgtatgcaagcatattgtaaaattgcttttttttttttttatttccagttggagtctagctctgtcgccaaggctggagtgcagtggcgcgatctcagctcactgcaacctctgcctcctgggttcatgcgattctcctgcctcagcctcccaagtagctgggattataggcaaccgccaccatgcccagctaatttttgtatttttagtagatatggggtttcactgtgttggccaggctggtctcgaactcctgacctcgtgatccattcacctcagcttctcaaagtgctgggtttacaagtatgagccactgcgcctggctgtaaaattgccatttaagaggctgtgtgtaactggaggtattgatgggtgtctttgagagggtggggattcagaaaggttcaggatgggccgggcgcggtggctcacgcctgtaatctcagcactttgggaggccaaggtgggcagatcatgaggtcaaaagatcgagaccatcctggctaacatggtgaaaccccgtctctactaaaaacacaaaaaattagccaggcgtgatggcgggcgcctgcagtcccagctactctggaggctgaggcaggagaatggtgtgaacctgggaggcggagcttgcagtgagccgagatggtgccactgcactccagcctgggcgacagagcgagactccgtctcaagaaaaaaaaaaaaatttctttatgtctttcttggtcaagtgtttttttttacatatgtacaatggggatcctgagttggaaccacatactttggtaaacaaagtgcagtagtgttcacagttaccacgatcatatcccgtgttgacccaccctctcttttttaggttgcgacctttccttccccagcaataaactggtctctggagatcactgtagaattgtagtggatgaaaaatcaggtcaggtgacactggaagataccaggtgagtatgttctgagcttcttttggtgtttcttcttgtagcttaagaagcctgacttcgtgctctgtgctgtgtgccacggctgaggaggagaagaaatgctgtctttagtgtgataacagcggctcatttttataacagcacagtcatgtgtcccttagcaacagggatccagtctgagaaatgtgtcagacaatttgatcatcttgcaaacatcatggagtatacttaaacaaacctagatggtgtagcctactacatacctaggctatatggtatagccgattgctcctaggctatcaacctatacagcgtgctactgtactgaatgctataggcagttgtaacacaatggtaagagtatttatctaaacacagaacaggtgcagtaaaaatatgatattttaatcttgtgggactcctatcgtatatgcgtctgttgaaaaaaacattattatcagcccgggcgcggtggctcacacctgtaatcccagcactttgggaggctgaggcagttggatcacctgaggtcaggagctcaagcccagcctggccaacatggagaaaccctgtctctcttaaaaatataaaaattagccgggcgttgtggcatgcgcctgtaatcccagctactcgggaggctgagacaggagaatcacttgaacccgggagtcggagattgtggtgagctgagatggcaccactgcactccagcctgggaaacgagtgaaactccatctcaaaacaaaacgaaacaaaagtttattatctggggcatgactgtagttaattaggctcccaaggtattagaagatgtatttcctggtttccaggatgggacacttagtgacactttggtgtctatgacccttcttgaatgtattcaaattaagtatgtctcagaaataagacttaaaagatgctggtaatttttggttcttgcaagcctattcaagtttgatttctttccctcaaatcaaaaaatcattttttaaaactaataaattctcgttcttgtacaactgaagtacagattgagtatctgaaatgattgaaactagactgtttagattttggattgtttcagattttagaatattttcattatacttaccagttgagcatgtctgaatcaaaattctgaaatgttccagtgagtatttttttgagtgtcttgttggtgctcaaaaagttttggatttcacatttctgattagggacattcagcttagggatattcaacttggaaagtggaaagctttccaaaatcctattcatacgttaaaaatgcatatgttggtatatatattttgcataaatgcaatcacactacacatactgttgtagcgtcagcttttttctttctttcttttttttttttgagatggagtttcactgtgttgcaggctgaagtgcagtggtacgatctcggctcactgcgacctccgactcccaggttccagccattctcctgccccagcctcccgagtagctggcattgtaggcacacactaccaagcccggctatttttttgtgtttttagtagagacgggatttcaccatgctggccaggctggtctcgaactcctgatctcaggtgatctgcctgcctcagcctcccaaagtgctgggattacaggcgtgagccatcgcgcccggccagcttttttcacttacggtgttttatggagcgcttcacatgtcactgcatctacatccagctcatcttttcattatcttaggatagtttctttgtcacttcccttattggtggacatttattgttttgactttttcttactataaataacactgcagtgactctttcccaaactctgccttcatgtctgttttcttgggatgatttctcggaagggaagtctgtgtcagtgttactcagaatgtgcctattcctttttttctcttttttgagacggagtctcgctctgtggctcaggctgaagtgctgttggtgcgatctcggctcactgcaacctccgccacccgggttcaagcgattctcctgcctcagcctcccgagtagctgggattacaggtgcccgccgccacgcctagctcagatggggtttcacaatgctagccaggctggacttgaactcctggcctcaggtgatccacctgcctcagcctccccaagtgctgggattgcaagtgtgagcccccacacccggccagaatgtgcgtcttttaaatctgctgcaagtggcaggtggtcttctagcagtatgttgagagtgtgctgttctcactgcaggattttttttgtttggtaaagatcaggctctgtgagattctttggtaactgatagtttcagggatagaagactaggaagtaggttttaataggaagaactgatgctccgtttcctagtctaatagatatcagattaagttctctatttcttggcacaatgggaaaggcagggtgctggtccctagctgtcccgcctgcttcagggcctggcttccccatgctgggtgctggtcctgggctttcctgcctacatcagggcctggcttctccacgctgggtgctggtcctgggctttcccgcctacatcagggcctggcttccccgtgctgggtgctggtcctgggctttcccgcctacatcagggcctggcttccccgcgctgggtgctggtcctgggcagtcccgcctgttccagggcctgggttccctgcactgggtgctggtcctgggcagtcccgcctgttccagggcctggcttccccacgctgggtgctggtcctgggtagtcccgcctgttccagggcctggcttccccgcgctgggtgctggtcccgggccttcctgcctgttccggggcctggcttcctcgcgctgggtgctggtcccgggcagtcccgcctgttccggggcctggcttccccgcgctgggtgctggtcctgggcagtcccgcctgttctggggcctggctttcccacgctgggtgctggtcctgggcagtcccgcctgttccggggcctggcttccccgcgctgggtgctggtcctgggccttcccacctgttccagggcctggtttccctgtgctgggtgctggtcctgggccttcccgcctacatcaggacctggcttccccgcgctgggtgctggtcctgggcctttctacctgttccagggcctggcttccttgcgctgaatgctggtcctgggcctccctgcctgttccagggcctggcttccccacgctgggtgctggtcctgggccgtcccgcctgcttcagggcatggcatccctgtgctgactgcatggtggtggtactttcttatggctattgtaatttaccacaagcttaatggatttaaaaaacacaaatttgctgtcttactatagttatggaggtccagagtccgatatgggtctgatggggctaaaatccaggtctgaacagggctggtttcttctggaggctccaggggagaatttgttctctgccttttccaggttccagaggtgccacgttccttggcagaggtgggctggaggggaggggtgctcaggcagaaggaaccacgtgtgtaggggcccctgagcataagcagggctgtgtggtcggagcgtgtggtgagcggcaaagtcacacaagggagcttgggctttagcctgagagcagtgaggagtcatcaaaggggtgtaagcggaggagtgaaataatcagatttttgtttggaaagaacaggaggatgagtgatggctgcagtcgcccctcggcatctggggggattggctccagccccctgcatgcacccaagtccgtgcacactctagccccgtagccagccctgtggagcaggaggacacagaaagtcagtccagctccagcgcccctgcatgcacccaagtccgtgtgcactccagccccgtagccagccctgtggagcaggaggacacagaaagtcagtccagctccagcgcccctgcatgcacccaagtccgtgtgcactccagccccgtagccagccctgtggagcaggaggacacagaaagtcagtccagcatatgtgtgggattcattccctctcattgaaaaaaacccgtgtataagtgcatctgcacagctcaaaaccgcatcttccagggtcagctttgtgttgtaacagcagaactcagacacacacagccactgcctggtttcggaggttttacggggagacggctgtggcagttcatttgcttactgtctgcatttgctttcctgctacagacggcagagctgagtagtggcaatggtgaccacaaaacctacactgtttaccctctgtttatggaaatcgtttgccactcccatccctcagcaaaccgtggtggtcactcggatgtgagttctgtccactgctggggcctcgggagtgaagctgcagagctgaggcctgtgtggtttcagtcgttttgcccggttgccgttttgtgtgtcgggtatgctgtgctcttggatcttggtcacctgaccaacacctgatttgctgtcaggtctctgctcagaagtccccaggaggcacttcctgccccatcaacttagcctcctcctgtctgtccctgggtcagcagcatctgcattggcctctccctgggcagagtacctcaaggggcttggcagccagaccacaagctctgagtgcagggccatgtcctgcagctgacggcccagcatttagtccgcttctgcccagagccagtctcttgggagggatcagtactcattggaggcatgagttcaccggggttgtgatggctgcaaggaacagaactgtggatagcacaagtccagctcaggggaggctggaggtggaagcaccacactgtagacgaggcctccgggtccactaggaggcaaacggggagagaacccagccctgcagcagcagagctgccaagcacgtgaggaggtgtagtggctggttaggctgtcagtcagggagaagtgggcgagccatttcttgagagaatggtgaggggtgcgtggatgtgtgcatcgttacgtatttacactgttcctatgagtatttccagagtggtcatatcgagctgcttgctaatggtgctagaaaaaaaatcttgtaactccaagttattttaagtagaataaattgtgtttttgtttttttacagcaccagtggaacagtgattaacaagctgaaggttgttaagaagcagacatgccctttacagactggggatgtcatctacttggtgtacaggaagaatgaaccggaacacagtaagagagaggaaggcttgccggggtcagacccgcacgggggtgcacgtgagggcgctctctgaacgttcctcctggctacatcccttcccataggaacgttcctcctggctacaccccatttcttgctcacatgggttcctgccgtgaatagtgtctgttgagtgggagtgtcgactttgcagcctgagcccagccattcctcaggaataccactgtggccatgagcagccaatcccaaaatggcagccaaggagaaactgatggggatggtttgggttctacaggagaagaacttgagttatggggaataaaacctaggaccaggggtctggaggccattgatggttctgcttttggagaccttacaagaaacatcaaaggttagactggattccagtaagttttttcagctccagaagtcccgtttttgttttgtggaagaacagtataggacaaggaaagttatgggagtccttcgaaggtcacccctgaaatacttttttttttttgagatagagtttcgctcttgttgcccaggctgaagtgtaatggcgcaatctcagctcaccgcaatctccacctgccgggttcaagcaattctcctgcctcagcctcctgagtagctgggattataggtgcccaccaccacgcccggctcatttttgtatttttagtagagacggggttttgccatgctggacaggctggtctcaaactcccgacctcaggtgatccacccacctcaacctcccaaagtgctgggattacaggcatgagccactgcacctggccaatacttatttatttaattttttaaataaataagagacagagtctcgctctgctctgttgcggaggctggagtgcaatggcgtgatctcagctcactgcaacctccacctcctggtttcaagcgattctcctgcctcagccttccaggtagctgggattacaggtgcacaccaccacacccggctaatttttgtatttttagtacagacagggtttcgccgtgttggccaggctggtctcgaacttgggacctcaggtaatccgcccgcctcggcctcccagagtgctgggattacaggcaagagccactgcacctggccacccctgaaatacctaaagaccacagtggtgagggagaatggggcaaatatgtcttaggcatcttcagcataaacttaaccagcccctggccacacggaaggatcttgtatctgctcctttgtgtagtttgaaattataagtgaggcatagattcttcaccttcttctgcctcctgatgccattttttcccgaggcttatttcttttgtgttggtagagatgttttagattacttgttttgaaatctcttaaactgatgaatttgttattagctgatgagtcaaaataatcaacaaaaacaaatggactggagaacagaagagaaaaatgagttctcagtttgcacaggggccaccacttttctgatttgattgattttcttttagacgtggcatacctctatgaatctttaagtgaaaagcaaggcatgacacaagaatcctttggtaagtaagagtgtagcaaagaagtgggtgcatgttaggagctatagcattccttttgtgttttgagatggagtctcgctctgttacccaggctggagtgcggtggcgcgatctcagctcactgcagcctccgcctcctgggttcaagcaattcccctgcttcagtctcccattttttttttttttttttttgagacggagttttgctcttgttgctcagcctggagtgcagtggcgcgatctcggctcactgcagcctcctcctgccgggttcgagagattctcctgcctcagcctcccgagtagctgggattacaggttgcaccgtcacgcctggctaattttgtttgtttgtttgtttgtttgttttttgagatggagtcgcgctttgtcgcccaggctggagtgcagtggcgcgatctcggctcactgcaacctccacctcccgggttcatgccattctcctgcctcagcctcccgagtagctgggactacaggcagtcgctaccatgcccagctaattttttgtatttttagtagagatggggtttcaccgtgttagccaggttggcctcgatctcctgacctcgtgatctacccgcctcagcctcccaaagtgctgggattacaggtatgagccaccgcgcccggcacgcctggctaatttttatatttttagtagagacggggtttcaccatgttggtcaggctggtctcgaactcctgacctcaggagatacacctgcctcgacttcccaaagtgctgggattacaggcctgcaccaccgtgcctggccttggggctgttgcattcttaagagcatttcaatccctagagtgtctgcttgagccctggttgtgtgctgcttctgctccttttgggttacagaagctaacaaggaaaatgtgttccatgggaccaaagatacctcaggtgcaggtgcagggcgaggggccgatccccgggtccctccgtcgtcgcccgccactcaggtgtgctttgaggaaccacagccatcaacatcgacgtcagacctcttccccacagcctcggcctcttccacggagccttctcctgcagggcgagagcgttcctccagttgtggtgaggtcacatctcatgaggtcttggtgctggttgcatggtttttgttcactactctttacctgtgttgttacagaggcagataagcgactgaggactggcatgaggttctcagtagtgagatttctgtaggagtcaatattgagtgtgttgttcccttcacttcccaagagaagtgaagatcagggactctagtaccattgtgtattttgcagtttcattgagactataattcgcataccataaaagtcatccagccgaagtgtacatttcagtggattttagtacatcacaaggtgtgggaccatcaccactcattgacacgaaaaggaaaccggtgcccaccagcagtgactccacatgtccccttcccctcggccccaccagcagtcactccccatgtccccttcccctcggccccaccagcagtcactccccatgtccccttcccctcggccccaccagcagtcactccccatgtccccttcccctcggccccaccagcagtcactccccatgtccccttcccctcggccccaccagcagtcactccccatgtccccttcccctcgaccccagcagcagtcactccgcatgtccccttcccctcagccccagcagcagtcactccgcatgtccccttcccctcggccccaccagcaatcactccccatgtccccttcccctcggccccaccagcagtcactccccatgtccccttcccctcggccccaccagcagtcactccccatgtccccttcccctcggccccaccagcagtcactccccatgtccccttcccctcggccccatcagcagtcactccccatgtcccctccccccagcccctggcagctgcgtgtgctttcggcctctggatttttctgttctagacacttcacagacatggaatcatgcgtgctcttttttgttgttgttgagacggagtctcgctctgtcgctcaggctggagtgcagtggtgcgatctcggctcactgcaagctccgcctcccaggttcacgccattctcctgcctcagcctcccgagtagctgggactacaggtgcctgcaaccacgcccagctaatttttttttgttttttgtttgtttgttttgagatggagtctcgctctgtcacccaggctggagtgcggtggcgcgatctcggctcactgcaagctccgcctcccacgccattctcctgggtccacgccattttcctgcctcagcctctgagtagctgggactacaggcacccgtcaccacgcctggctaattttttgtatttttagtagagacggagtttcaccgtgttagccaggatggtctcgatctcctgacctcgtgatctgtccgatcggcctcccaaagtgctaggattacaggcgtgagctgccgcgcccagccgtgactgggctctttcacttagcgtggtgttttcagagttcatccagaagaggatgttatttaaaactagttttgcagatgctgttccttacggcatgactcttacctcttccatggtcattgggaagaaattccatctgggtgcagcgtgacgggaatgttttctgttttcttttagggtttgtcacgtggaggatgtgtacatatggattctctaaattggatcgcgctatacatattatttttttttaattttcttagctattctctattctagattatgttttgaattagcttttccagtttaatagaaaaatctttttgagatttttgatttggggagaattgacagttttacagagcccaggaaaatggtgtttctccttgtttgttaagctcttcctgttcttcagtgaagtctcacggctttcttcgtgtcgtctgggctcattcttagtcctggagtgcttggctctcgcgttcttacattccatagcagtctgcagattcctatgaacagaagagcctctgaatctcagattaggctgtgtttcgatctgacaggaaagctggttccctgataaaaagtccagaaatgcccgctcagctcagctactcctgaggtcaccagggccttctgtgcactccacgctgctgtttttgctcaggtttttgcctcgaggtttcacagtggctgccagagctctgaacatcactgacacattcatggcaggcaccaggaagcctccggagaagggacctttgctttccatggatctgttggctgatccgcagcagcaagagccatgtctcccagaagactgctccctctgtctcatgagccagcctggctgctctgctacaggacactccttgtttttatgtctctctgtgtattccagtgggatttggggaaggagcggcatcgggtgcagggactcagtgtgccttcttgaaaccagaaacctctcacgctctctgggcctgtttccacttctgttgatgtggtttttactccgttgtatgccgttgctctgtcttcacacgggcagccacacctctcctgttcgttgatgttcttgaggccttgttgcatccgctccttccttcttcagaggctcctttggatgagcccagctcctcagcagcagagtgctctttattttctgtttttttgagacagagtcttgctctgttgcccaggctggagtgcagtggcgcaatctcggctcactgcaacctccgcctcccgggttcaagtgattcccctgcctcagcctcctgagtagctggggtcacaggcgcgcaccaccaccacgcccagaaaatttttgtatttttagtagagacgttgttggccaggctggtcaccaggagcagagtgttctaaaagcatacctcagtctgatggatgacatcccagccatctgaagagtaacatccagatgtgttgtaacattccagtgtgttgtaacattcctgtaacattccaatgtgttgtaacattctggtgtgttgtaacattcctgtaacattctggtgtgttgtaacattccggtgtgttgtaacatttggtgttacgcggtgtgttgtaactttctggtgtgttgtaactttctggtgtgttgtaacattctggtgtgttgtaacaatcgcggtgtgttgtaacatccggtgtgttgtaacattccagtgtgttgtaacatttggtgttacatgctgtgttgtaacattctggtgtgttgtaacattcccggtgtgttgtaacgttccagggtgtgttgtaacattccggtgtggtgttccggtctgttgtaacattccaacattccggtgtgttggtgtgttgtaacattccagtgtgttgtaacatttggtgtgttgtaacattccggtgtgttaacattccggtgtgttgtcacattctggtgtgttgtaacattctgatgtgatttcgggactcacctgggaggacttctcaggtgctaattggggacactaagttgcaggcaagactgtggagagtgagtgctatgtagtttccacctgatatttctggagataagaggaacagcggagaccaaacccatgacagacaagtttctactagcctgtctcctgtagactaaacacaaccccggcttctcagagcctctttgatttacctttgttttaacatcataaccttaaatttatgagtgaaagaaaataacacttcaagatgaaagcatctcagcactgggcacagtggctcacgcctgtaatcccagcactttgggaggctaaggtgggcagatcccttgagcccaggagttcaagaccagtttgggcaacatggtgaaaccgtatctttacaaaaaatacaatataaaaaatacaaaaattagccgggtgtggtggtgcatgcctgtaatcccagctacttggaaggctgaggagggaggattgcctgagcctgggaggcagaggttacaatgtgctgagattgcaccactgcactccagccttggcaacaaagccagagcccatctcaaaaaaaaaaaaaaaaaaaaaaaagacctgtaatcccagcactttgggaagccaagacaggcgaatcacttgaggtcaggagcttgagacctacctggccaacatggtgaaaccccgtctctactgaaaatacaaaaattatccaggcatggtggcaggcgcctgtagtcccagctactcaggaagctgagacaggagtttcacctgagagaggaggatcacctgaggctgggaggcggaggttgcagtgagccgataccgcgtcactgcactccagcctgggcgacagaccaggtctcaaaaaaaaaaagaaaagaaaacatgccagatttgaatagccacctgaatgctgaagttttaccagctctcttgggctgtgtacccttcatcgtatcttccaggttccttaaaacctacccttgggcacagctgggatgtgcactggctcttcacagctagatccagcatgcactgactctccccgtgcagggacagccccagaggaatagaggtggcgttccggccgctccagcgtggcccacagcgtttcaagtgcagcaagcacagacaggacgcggggttactagtattttggattgactgcagattttgaactgtctgcctagatgaactataccatgtccctagggccaagtcccatgtgcattttgtggctactagaccctcttcagaaatcaaacacaaaatagctctggcctgtaaagaaaacaaacttcaccagtaaaattgtttcctgttcctatccaccaatgtgcatagcacagtgtgtagtctgggtaatacggtttgcataattttttgataatgttctacttaaaaagggcagcgtatttatatattacttatgtaattaaaaaaaaaattcttctggccgggtgtggtggcttacgcctgtaatcccagcactttgggaggccgggtggttggatcgcctgaggtcgggagttcaagaccagcctggccaacatggcaaaaccccatctctactaaaaatataaaaattagccaagtgtggttgcgggcgcctgtaatcccagctactcgggaggctgaggcatgagaatctcttgaacccaggaggtggaggttgcagtgagccaatatcctgccactgcactccagcctgggtgacagcacaagactctgtctcaaaaagaaaataaaaataataaaaaataaaaattcttctatctgtatgcctaagtgtatgcatactaacaaaataagtatagttactgcttattgagcagctactaaatgtgaggcagtgtgccaggtacattctgtaagtggtaagatggtgctcctctccacgttggctgagcacggggcgctggagatgatggcgtgagtgggtgccggctgggggccggcccacaggctgtctctttccttctgttcgtatatgaggtggtttgtccccaaaactattctgttttctttcagctgctgtaagccagtttcttgtgtttttttttttcaaataataacacttacatttgaatactgtaagctagatatgtattatgctgtaatatgataaactaagtctttattaagatataggttattcacacctgtaatccttattcacacctgtaatccttattcacacctgtaattccagcacttggggaggccgaggtgggtggattgtttgggctcaagagtttgagaccagcctgggtaaaatggcaagaccctgtctctaccaaaaatacaaaaaacaatttagctgggcatggtggtgcacacctgtagtcccagatactcaggaggcagaggtggaaggatcgctttagcccaggaggcagaggttgcagtgaatgaagatctcgccactgcattccagcctgggtgaagagtgagaccctgtctcaaaaaaaagatagaggtgattagaaagtctgcctgtttttctgccaaggtcattcctgtcgttatgactctggcttcttgctcgtggagatagcgctctccctacaagtcactgtgctgtatccttcccgttatcacacctcttgtaaaatagttcacacgcagcaccatctccacccgttggaagctatgcatccctccactggagcatctgtgctttacacagacttctgtttttttttgtttgtttgttttgttttactttgtttttttgagacggaattttgatcttactgcccaggctggagtgcaatggcgcgaacttcgttcgctgcaactccgcctcctgggttcaagcagttctcctgcctcagcctcccaagtagctgggttacaggcatgtgccaccacacccggccaattttgtatttttagtagaaatggggtttcactgtgttggtcaggctggtctcgaactcctgacctcagatgatccacccaccttggcctcctgaagttctgggattacaggcatgagccaccgcgcctggcattttttttttttttttaagaaatgaggtcaggccgggcgcggtggctcacgcctgtaatcccagcactttgggaggccgaggtgggtggatcacgaggtcaggagatcgagaccatcctggctaacacggtgaaaccctgtctctactaaaaatacaaaaaattagccgggcgtggtggcgggcacctgtagtcccagctactcaggaggctgaggcaggagaatggcgtgaaccagggaggcagagcttgcagtgagccaagatcacgccactgcactccagcctgggtgacagagtgagactctgtctcaaaaaagaaaaagaaaacaaaagaaatgaggtcttggccaggcacagtggctcatgcctttaatcccagcactttgggaggctgaggcaggtggatcatgaggtcaggagatcgagaccatcctggctaacacggtgaaaccctgtctctactaaaaatacaaaaaaattagctgggtatggtggcgggtgcctgtagtcccagctacttgggaggctgaggcaggagaatggcgtcaacccaggaggcggagcttgcagtgagccactgcactccagcctgggcaacagagcaagagtccgtctcaaaaaaaaaaatgaggtcttgctctgttgtgcaggttgggagagtgatgtggtcatggctcactgtagcctcgaactcccgggctcaagtgatccactcacctcagcctcctgagtagctgggaccatatgctcgtactgtcacgcctagttaatttttttttcttttttgtattttttgtagagatggtgccttgctgtgttgcccaggctggtctaaaactcctgggatcaagtgatcctcccaccttggcctcccaaagtattgtgattacaggtgtgagccccatgcccagcctcagacctctattttttatttttatttttttttccccagagggagtttcgctcttgttgcccaggctggagtgcagtggcacgatcttggctcactgcaacctccgcctcccgggttcaagcaatttttctgcctcagcctcttgagtagctgggactacatgcactcgccaccacgcctgtctaatttttttgtatttttagtagagatggggtttcaccatgttggccaggctggtctcgacctcctgacctcaggtgatccacttgcttcggcctcccaacgtgctgggattacgggtgtgagccaccgcacccggcccaaagctctgttgtaacaagtttatgacacagtgtgtatcatatgaccacgggtatgtgggtttgccctgcgttagactcggtgctcgagggctaagcctggtcacagacatctccgcatttgtttctctgcaaatgggctccttgcccccagctccaccccacgtagagataggcacaaatagagttaagatgtgagttgagtgagcacacactcctcgtaagccacttgtcattcctaaactacgacatctcaggctgccagctgcactgggctccagtcagtgacaccttacaggcatggttctctcctgagctggatggatcagcacctatcttgtttgattcctctcacagggtctgggggtggtggcatctcccctaaaggaagtggtccctctgtggcaagtgatgaagtctccagctttgcctcagctctcccagacagaaagactgcgtccttttcgtcgttggaaccccaggatcaggaggatttggagcccgtgaagaagaaaatgagaggaggttagtgtctggttgtgtgtgtcctcagtcctctcgtgtgctcctggggcatgcgggggccgctgccatgctccgtgctgtggggcattgcttcctgcaggggcatgtggaccctgcctcaggttgatgcctgtaacacctccggcattttcattcagaaaacctgggcctgtttttttgcggtttgcataatccagatagaactgtgatttgctacaggctgttctcttggtctggaaatagtgcattctgaattgcagaattaatctcaaaatcctccttcctggccaggtgcagtagttcatatccgtaatcctaacactgggaggccaaggcaggagaatcacttgaggtcaggcgttcgagaccagcctgggcgacagagcaagactttatctctaaaaataaaaatcaagcctgacaccgtggctcccgcctataatctcagcactttgggaggccaaggtggacggatcatctgaggtcaggagttcaagaccagcctggccaacatggtgaaactccgtctctactaaaaatgcaaaaattagctgggtgtggtggtgcatgcctgtaatcccagctacttggaaggctgaggcaggagaattgcttgaacccggcaggtggaggttgcagtgagccaagactgtgccattgcactgcagccggggcaacaagaacaaaactccatctcaaaaaaaagaaaatcaaaaagaaagccctctgtcctggtaggacaataatttctaaaaatgtagcttaaatcttcacattgaagatgatttagggagaagtctgcactttgaaagccaaagttaagattattagaaaacatttgggaatgttatggtagaagcattgctgtatagcagtccagagagcagccagccactggggcactgtgacaggaaggttctaggaggggtccccagggaaagaaattaggttatctgacacgtggggttgatcggtgtggggaaggtgtggaaagagtcagcaacagttacacaggaaaaataagcacaggaatgaggaaattttaattctagcaaacatgaaaaattgtgtaagtcacacaacttaatctagtaaactacttggctcagcagtgaatacttgcataagcataataatacaaatacagtatcatgaactaatgtaatctgttaatgtaatgttggcaggggtgtctcaggacagagtttttctctaccttaatagatgtcaggaatgatgtctaaaattgataaatcaaatgtaccatgataacttagaaacacagaggtaaataccagaagaaacagctcaaagacatgaaaatagttttcctccgaggagggaaattgggtgaggagcggctgagacggagggtgactgcctttgttttcttctaaatatattatgtatacatttttttaagagacaggatcttgctttgtcacctaggccagagcgccgtggtgcagtcttggctcactgcagcctccacctcctgggctcagactgtcctcccacctcagccttccgagtagctgagaccacaggtgcacgctaccatagctggctaattttttttcccatttttttagagatggggtttcattatattgcccagactggtcttgaactcctgggctcaagcgatctgcccacctcagcctcccaaagtgctgggattacagttgtgagccattgcacctggcttcttctaaatacttggctttttaaattgtgtacagtttctttaattaaaaataaaaattaattgattaccaacatctgagcattatagaaaaataaaaacaccagaagagggtggggcgcggtagctcacacctgttaccctagtactttgggaggccgaggcgggtggatcacgaggtcaggagattgagaccatcctggctaacacggtgaaaccctgtctctactaaaaatacacaaaattagccgggcgtggtggtgggcacctgtagtcccagctactcaggaggctgaggaaggagaatggcatgaacccgggaggcggagcttgcagtgagccgagatcgcgccactgcactccagcctgggcgacagagcgagactctgtctcgaaaaaaaaaagactgcatgtatttccttctcggttacgacagttagaacacatccctttctcctgtggacggggaccttgacctgaacctgcgtgtatttccttcttggttacgacagaacacatccctttctcctgtagatggggaccttgacctgaacgggcagttgttggtcgcacaaccgcgtagaaatgcccaaaccgtccacgaggacgtcagagcagcggctgggaagccagacaagatggaggagacgctgacatgcatcatctgccaggacctgctgcacgactgcgtgaggtgcgaccgtgttcacccttggctcacggaacatggcactgcaggttcttcgtcccgtgtggggcagggctgggcatgagacaagcctgcaggtcctgtttggcctggcatctgctgaggttactctgtcacccagataagtgggtggagtgggtggagtgggtggagctttctcagcccactgcaacctctccctcccaggattgagcggttctctgacctcagccttctgagttgctgggactacaggtgcacaccactatgcctggctgactttttttttttttttaatgttctaaatattttttattcctttttttttttttttttttttttttttttagatggagtctcgctctgtcaccaggctggagtgcagtggcacagtcttggctcactacaacctcagcctcccgggttcagacgattctcctacctcagcttcctgagcagctgggactgcaggcgtgtgccaccatgcccggctaatttttttgtattttttagtagagacagggtttcaccatgttggccaggctagtcttgaactcctgacttcaggtgatctgcccacgtttgcctcctaaagtgctgggattataggcgtgagccactactcccagccaccctgctgatttttgtgttttttgtagagacggtttcgccatgtagcccggggtggttttttgtttttgtttttgttttttggagttagagtctcgctctgtcacccaggctggagtgtagtggtgtgatcttggctcactgcaacctccacctcccaggttcaagtgattctcctgcctcagcctcccaagtagctgggactacaggcatgcgtcaccacatctggctaatttttttgtatttttagtagagacgggagtttcaccatattagccaggctggtctcgaactcctgcactcaggtaatctgcccaccttggcctcccaaagtgttgggattacagacgtgagccaccccgcatggctaccactttcattctactcgtggcaccaacaaggaggaaacctggaacccagagccggaggctgtagaccccacaagttttgagtgtgtgggtcgtgtgtgaccccgtgaactctgcaaacagatgaaaggaactctgcacattttaaatgctccttatctgggaaggtgtatttcgcatagaatgaacgtaggagccgctgaggaagggcctccttgcttttccgcgggaactcaagagtgacaaccttccaacttctgggccagaaacacttgctgtctctgttgtttgtgttcctgaagtcataatctactcgcctctgtctttcctgaaaacacagaggccgtgtggcctctgatttcttttcattaaccaagactgacttaaagggtttttaggttgaacgatggctgggcccctgtaggcccttccgtggtggggctgctgcggaccttggtcgagggtcgcggttgcatctgtgggactgtctggacactgttcctcttgcactttcagtttgcagccctgcatgcacacgttctgcgcggcttgctactcgggctggatggagcgctcgtccctgtgtcctacctgccgctgtcccgtggagcggatctgtaaaaaccacatcctcaacaacctcgtggaagcatacctcatccagcatccaggcaagtgagggcatccacaccagcacccgggcacgtgagggcggtccctccaccaccacccaggcacgtgagggcatccacccagcagcacccgggcacgtgagggctgtccctccaccagcacccgggcacgtgagggtggtccctccaccagcacccgggcacgtgagggcatccacaccagcacccaggcacgtgagggcggtccctccaccaccacctgggcacgtgagggcatccacccagcagcacccgggcacgtgagggctgtccctccaccagcacccgggcacgtgagggctgtccctccaccagcacccgggcacgtgagggtggtccctccaccagcacccgggcacgtgagggtggtccctccaccagcacccaggcacgtgagggcatccacaccagcacccgggcacgtgagggtggtccctccaccagcacctgggcaagcgagggtggtccctccaccagcacccagacaagtgagggcggtccctccaccagcacccaggcaagtgagggcatccacacaccagcacccaggcatgtgagggcggtccctccaccagcacccgggcacgtgagggcatccacaccagcacctgggcacgtgagggcagtccctccaccagcacccgggcacgtgagggcggtccgcccagacccctccttccgcagcactgcgcacgcgagctcccagcagtgtgagctgtgtctgcctgccatgtctcactgccggtgaatggcgctgtgtcctttcaattctagacaagagtcgcagtgaagaagatgtgcaaagtatggatgccagaaataaaatcactcaagacatgctgcagcccaaagtcaggcggtctttttctgatgaagaagggagttcagaggacctgctggagctgtcagacgttgacagtgagtcctcagacattaggtaaatcatgcccctggctcagagcagagtgtgtgagccagaggagcatcacaaccgtgaccgagagctcactactgggtggacagcatgggtcctgagatctagttctgccctgagcagccaagctcttaaatggcttgagcttgttttctgatattggatagtattagcacctcccctgagaggcgtggcagggactgggtgaacacttagcggggtagccagggggtagccagcagagcgtcagccgcaggcgactgctgtagacatttgcaccctcggctgacacccttccctttgcttcgactcgtcatgggtgtggcatctctggctgtgacagagggacatcattccatgttattttttcccacatgagcacatgtattctttgtagttgatctagcgactataaagtcctatagtataaattgcaatgtttatcatttgtcaggacgttattacagaagaggcaccatcaccaggccaagacaatcccagcctcagagaccttatttatctgctgacatgttgaggtttcctaatgcacaagaccggggtctgaatgttgggtcgaggccatgatatttaaaaagacaatgaacgacaaaaaaaaacacttgaaacttttatctttatttccttttgccaagtttagcatgtgactgttaagcaaaaagaaggaaaccaaaaccactttagcattaagattttgctgcctctacccagccattcatacgtgtgtcataatcgttaacaaaatgaaatgtaatgtactaacaaattttttttttcttttttttttgagatggagtgtcgctctgctgccaggctggagtgcagtgacacgatctcagctcactgaaatcaccacctcctgggttcaagcgattctcctgcctcagcctctcgagtagctgggactacaggcgcatgccaccacacccagctaatttttttgtatttttagtagagatggggttttaccacattggccaggatggccttgatctcctgacctcgtgatccgccggcctcgacctcccaaagtgctgggattacaggcatgagccactgcgccctgccaatggcacaatcttggcgcattgcaacctccgcctcccgggttcaagcgattctcctgcctcagcctcccaaatagctgggattacaggcatgcaccaccaaacttggctaatttttttttcttttctttttttttttttttcgagacaaagtctcgctctgttgcccaggctggagtgcagtggcatgaccttcgcccactgcaacattcatctcctgggttcaagtgattctcccgtgttagcctcccgaggggctgggattacgggcatatgccaccacacccagctaatttttgtgtttttagtaaagacagagtttcaccatgttggccagactggtctcgaaatcctgacctcaagtgatccgtctgccttggcctctcaaagtgctgggattataggtgtgagccaccgcgcccggccgctaattttgtatttttagtagagacagggtttcaccatgttggccaggctggtcttgaactcctgacctcaggtgattagcccgcctcggcctcccaaagtgctgggattataggcgtgagaaacaaatttattttttgtttgtttgttttttgagatggagtttcgctctgttgcccaggctggagtgcagtggctggatcttggctcattgcaagctccgcctcccgagttcacgccattttcctgcctcagcctcccgagtagctgggactacaggctcccgataccatgcccggctaattttttgtatttttggtagagactgggtttcaccgtgttagtcaggatggtcttgaactcctgacctcgtgatccgcccgcctcagcctcccaaagtgctgggattacaggcatgagaaacaaatatttttatgaagctgggattcggctgcatgtacagctcggtaatgtccccagcgtttgaattgggaaacagttgctgctgtgcatttcttccatccgtatttgtgcacatgcgcagtgacgtcaatgtttagacgtgaagcagtcgagtcacagagtgtgactgggaattggaccttgatagacgtttgataagtttgttatccagacaccgatcggaaagggtgcacctaatgcactctacaaggtctgcatgagggcctctttttgccagtttagaaggagaagtaggtaatctcattttcatttacattttttccttatgaaaaaaatgtcttttcactgtgccttgttttttacctggttgggtcttacctgttggccttattggcccctggccttggtgtgaggcgcagaaaagcctttcaaatggagaggagagcctcgtgtattttttcctacaggttctttttttacagttgacatttttatctgctcgtttttggaagtacaagggaagtgtggaaaagacaagtgattcggggctttgcaggcgcctggtgtggctcccagtacgttgcccaccgcgctctgcttttaacgggagagtaggcgggtcctgaggagcacggggcgtgcgcgcacgtgctggcccttgccctgctctggcgtcgtctcctgggagcacacgtcagtggggacctagtgaccctggggatggggctccaaagcgtgggggctgagctggggatgcagagtggcgtgtccttgcccttcgactcgttctggtccctctctaacactggggtgctggacaggaatggggcccggcccttcccctcacaccaagcagctgagcgacggtggagctgagctgtgatggctgcggacccgcgttgcaccggccctacctgagaggcttggggcctgcacacagctcggccctgtgcttccttgcagccagccatacgtcgtgtgccggcagtgtcctgagtacagaaggcaggcggcgcagcctccccactgcccagcacccgagggcgagccaggagccccacaggccctgggggatgcaccctccacgtccgtcagcctgacgacaggtgagccgcgccgccctcaggcctcagccttcgcgtgagtcactttgtggctgtgcccggtgctgacgtgcacgtggccgcgctctgcccgcctcctgtctgcactgctcgccccctttgggccctggcctcattggtctccctgcactcacagttggttgcttttcgtgactgattttgggttgggaaatcagataagtaactgttcattcgtagcccctcctgaacactcctgggaattaacaaccctgaccttaatacttggcctctccccagccactgcctcagggcagctgatgtcccccagtgggtttgccagacccaaagtgatgatcgcatatctgtccctcaagtaagaggcgggcttctccccagcagtggcgatgtcaccagaagctgccctgcgtcaccagagttggcttaatgcgaaatgtttccccgtcaggtgcctttttccagcaaggggctccaggtgctatccaggaagtcagaggagagctgggcagggggtatggaggcttcacttctctgccctgctcactccagactcatagaatgggaagatgccctcaggggtcctggcttcctggccacgggtgggggctgagcacatcacgaggccactggcctgggatggatgtagagccacatccttgtgctgcattctcagtggcttcttgtagaacccgtggacggaacggacaaagcagtgcttggcgttggtatggatgcccatccaccagcctgggtttgcttccgccactcagcagctctgtctgggtcactggacaagctccttcctttgcatggtgggaccagcgcctccctctggggtcctgggtccctcagtgggtgctcagtgaacctgggtggtgaaattgccgtccttatggccggcatgttgacctcgcagggtctttcctgtgtgggtggcgagtgtccagggaacttggctgtgtgggctcagacttctgctgccacatcgattggtcttgtgcaccgtggctgtcctttgtttatttgagagatggctgttctctcacctgagcggaaattgaacacacagcttgttttattctatatcataggttctatgggcttgtcctctctttataggaaataatagaaaaccttcaacagatcggccgggcacggtggctcatgcctgtaatcccagcactttgggaggccgaggcgggcggatcacaaggtcaagagattgagaccatcctggctaacatggtgaaaccctgtctctactaaaaatacaaaaaaaaaaaaaattagccaggcgtggcaggcacctgtagtcccagctactcgggaggctaaagcaggagaatggcgtgaacccgggaggcggagcttgcagtgagccgagatcacgccactgcagtccagcctgagcgacagagtgagactctgtctcaaaaaaaaaaagagaacttgcaacagatctttgaaatcttgctccagctgctaaatcaaagatcatttttggttattgttaatctgttttgactccccgagtttgggtggcagaaggtccccggtggtttagcagggcaggtctgcttcttccccggctgtctcaggtgcacctctcctcgctgtgcttcccggcggcctctctaacctgctgtctttctgccctgggtcccacgtgctccggctgaatgtgcgtgtgcttcagcagtccaggattacgtgtgccctctgcaaggaagccacgccctgtgcacctgctgcttccagcccatgcccgaccggagagcggagcgcgagcaggacccgcgtgtcgcccctcagcagtgtgagtgcccgcgccaccgcacgcaggcgggttcctatctgtccttcaggggtcaggtttcaaagcggtgttggccttagggtaacctgtgaagtaaggatgccgtttctttttttccatcagtgtgatcagttttccccacgtcaccatattgaataatctatcttttcccaccatctagtaacattgccccttcacaggctacatctccatccaccgggggctcggcttggatctgtgtctatcccctgccagcactgtggttgctttataatgtgtcactgttaaacctcttatatgaatgttgatgctttagtatacaactctggccaggcacagtggctcacgtctgtaatcccagcactttgggaggccaaggtaggtggatcttctgtgtccaggagtttcagaccagcctgggcaatatggtgaaaccccatctctacaaaaaatacaaacattagccagacatgatggtgtacacctgtaatcccagctactcgggaggctgaggccaaaggatggcttgagtccgagaggaggaggttgcagtgagctgagatcgtgccactgtactccagccttggcgacagagggaaatcctgtctcaaaacaaaacatatatatatatatatatatatatatatatatatgcacacacatacagttattattaaaaatggagcttgtcctttatttcatggctgttttaatgtattcctgcagaaatgtctgtctatgtcctttgccttttttttatgacttcctaatttgtcagagcttcttatatgtgaaagtgttaggtgaagaaagccctagccctgttgagcaccgcggttggctcctgccgcacacaccggtgttgctctgtgcactgagccctgtgtgagcagcacacaggaccacagcactggttctgtctggaatggcttaaaaatgttctgggcactcaggaaaccaaacaggttactgctggggtctgtaccctgagactgggcttggcaggggtggggcctagcctgcagcgtcgggacacatggccgtgggacacacccggtgatctgggcggtcgctgcctcgggggtcatccacggcaggcgctggccactgctgatgctgcacgtgggagggcaggtgagaagccacagagaacagcttgtcccatgtctcacacacgcggtggtcagcagatggcagctcggcccagcttttccccaggaatccaaactcttcactctaatttcacagagcatgcttcgtatatagaggcattggtgaagtggtcgtaggcgttataagacttaaggactcaatcctgtgagaattttagcgagggtttacctaacattatattttagggatttccattgtatagaatatcagacaattaaaaataatttcctttgggaggctgaggtgggtggatcacgaggttagaagatcaagaccatcctggctaacatggtgaaatcccatctctactaaaattacaaaaaattagccgtgtatggtggcgggcgcctgtagttccagctacttgggaggctgaggcaggagaatggcgtgaacccgggaggcagaggttgcagtgagccgagatggcgccagtgcactccagcctgggtgacagagcaagactctgtctaaaataaataaataaataaataaataacgtctacaaagccaaggtgacaacatggaaaaatacctaggtagaaaaaggccacctaggctgggcatgggctcacgcctgtaatcccagcactttgggaggccaaggcaggcggatgacctgaggtcaggagtttgagaccagcctgaccaacgcggtgagaccccatctttactaaaaatgaaaaaattggccagttgtgggcatctgtaatcccagctactggggaggctgaggcaggagaatcgcttgaacccaggaggcggaggttgcagtgagccgagattgctccactatactccagcctaggccacagagcaagactctgtctcaaaaaaaaaaaaaagccacctgaatatgtgcagttgggggcaagcatgttgcatgttcagagctagaatgaagcccatcgaagccgtgttagggtggtggagcaggtgagatttctttcttttgtgtctctcactgttttcctgggatgagcatgtggtgttcagtttaagaaacgatgtgggtctgaggccgggtgcagtgcatcacgcctgtaaatgttcagtttaagaaacgatacgggtctgaggccgggtgcagtgcatcacgcctgtaaatgttcagtttaagaaacgatacgggtctgaggccgggtgcagtgcatcacgcctgtaaatgttcagtttaagaaacgatgtgggtctgaggccgggcgcagtgcatcatgcctgtaatcctagcgctttgagaggctgaggtgggaggatcccttgaagccaggagtttgaaaccatcctgggcaacatggtgagaccctgtctctacaaaaataaaaaataaattagccgggcctggtggtgtgcacctgtagtcctagctactcaggaggctgaggtgggtggatcccttgaacccaggaggcggaggttgcagtgagctgtgattgttcccctgtactccagcctgggccacagagcgagactccatctctaaaaaataacaaaccagaaaatgtgagcctcgccttttttcagggatacaactcctcgccatcacagtccatcacaacctgggtggcgttagctggatgtggccccgccccgatttccatgagacccctcctgaacaatgtttccagaaagagttgagctcctgagcctggtgctgacgaattgtgttggagacagccctcagcgctgagtgcgtgtaacgagtgtcctctctccacaggtgcggtctgcctgcagcctttctgccacctgtactggggctgcacccggaccggctgctacggctgcctggccccgttttgtggtaatactggctcttcaggccccagttgctttgacctttgcatgttctcttggtgaacttgagggcaggggatggtggggtccatagcctgatgtttatagggatgaggccactgttggtcatcaaatgatacctattcctggctggactgcagaggtgtgtcaaattcgtgttagctcaaaatcaagccttaacagaattattaggggagatactcccaggacagaatccttgcagcggggttctgctgttacgataccaagaccaggtgctggggagactcggagagctgatctttttaaggagggagtggaatggaaatcatttctgcttgtcctctgtttaaaattgagttttatcattgaacttcttattctttctagaatctgtaatgaaaagaaatatgtttatcctcagtgtcgggcagacagtgctttcctgcgacatcattataaacaggtaacattgccccttcatctcggcagagctcaacctgggtgacaagtgtctggacggcgtgctgaacaacaacagctacgagtcagacatcctgaaggtaccgactcgctgcgggctggggagccgggagccacattttctccctagtgcagccagctggttctctgcattctattggtgtttatctgttttacctgacccgctgcgggttggggagccgggagccatgtttcctcactggtgcagccagctggttctctgcatgccattggtgtttgtctgttttttccgtattccaaaaataggtatttcgtttttgtgcctcctgccaccaattcgtaggagccgcttcccgcagctcttgttcccggcagctcttgttcccacagctctcggtgagggcttcttgaaggtgccgccctttagcaagaccagggccttttctctggtccctgtctcttctggccatttgccttcccacgtctaggaagctacctcggtttctaggatttacatatgtttaacatgcgcattcgccctcctgccgagcactttgctgacagcacacacaatggtggggccttgaggcttgccacagacacacctggcaggcgcccgctcagccccacactctgctttgatgcccacagaaggagctcaacagctcgtgtgtgtttgaagggcacagagaacagatgccaagtcctcagcttttcttgtgcaacagcctgggctcgttgctgggctgtgtgcactgtggcctggctttcatgtctcattcacacctgggctgtgtaggtcttggcagaacttttgagagactctggtaactgttacactggaaccttttgggacttccaggaggctcttggacaagacttctcgtgctgcaggccgtgaacgtgcagccctctgcaaatgccacttataagggtctgagctttggctttgcacactttcaggggccttttatgaaatgttttctctcgttatttcagtgtttcttcctctaaacgagtatttcttattcctctctttttttgcgtcacagaattacctggcaaccagaggtttgacatggaaaaacatgttgaccgagagcctcgtggctctccagcggggagtgtttctgctgtctggtgagttcttctgttgcctcctgctctaaggcgcatgtgagtgtccagggctgtgcctgcgtgtctgctctcccagtgacaactccgaccttcacccaccctggaagagaggaaaaagatcctgatgctttcaggttgtttttgtttgtttgtttgttttttgagatggagtctcgctcttgttgcccagactggagtgcagtggcatgatctcagctcaaggccccctcggcctcctgggttcaagcgattctcctgcatcaacctcctgagtagctgggattacaggcatgtgccaccacacccagctaattttgtatttttagtaaagatggggtttccccatgttggccagcctggtcttgaacttctgacttcaggtgatctgcccacctcagcttcccaaagtgctggaattacaggcgtgagccactatgcccggccttcaggttgttttttgaaagttgagcgtgggccgggtgtggtggctcacgcctgtaatcccagcactttgggaggctgaggcgggcggatcatgaggtcaagagattgagaccatcctggctaacacggtaaaaccctgtctctactaaaaaaagaaaaatacaaaaaattagccgggcgtggtggcgggcgcctgtagtcccagctactcgggaggctgaggaaggagaatggcgtgaacccgggaggcggagcttgcagtgagccaaaatcacgccactgcactccagcctgggggacagagcgagactccgtctcaaaaaaaaaaaaaaaaagacagttaagcatgaacctgtatgacatattccagcagcttctatccttgtaggggagggtgggtgtggccgactgccactactgctgcttgagaccctcactacagcagttactgctgttactgcttgagaccatcattacaggactgaacaaagggacaaacgtagaaatgaaaacaaaaagacaaaagaaacttttaaggaaaggcaacatggggaagaagaggagagctccctgcttctagtgagtaaaggctgcccctgagcttctacagcccttcatatttattgggtaacaagagcaaggaggaggtaacaactgggcagctgctaaattgatcacaggttcatactgttactgacaggcttcaattatgcctaatcataagaaacatttgtgtggcctccaacaggtggggccagcttggagggtctctaccacttgtctatccagaggtcctggggtcagttgtcctgggaccctcggggacttggtgaatctcttgcttgatgtgtcagtcacttggtgagggtcactcctctccaggggggcacacgatgctttgtggagtatgataatttatcactaagggaggctgtagaaatatatatatgagacaggttcttgctctgtcgcccaggctggagtgcaggggcatgatcacagctcactgcagcctcgacctcctgggctcaagagatcatctcacctcagcctcccaagtagctgggaccacaagcgtgtgctaccatgcctggctaatcttagtttttttatttttatttatttatttatttttttttttgagatggaatcttgctgtgtcacccaggctggagtgcaatggcacaatctcagctccctgcaagctccgcctcccaggttcaacaattgtcctgcctcagcctcctgagtagctgggattacaggcacccgccaacatgcccagctaattttttttttgtatttttagtagaggtgaggtttcaccatcttggttaggctggtctcgaactcctgaccttgtgatccgcctgcctcggcctcccaaagtgctgggattacaggcgcgagccaccgtgcctggccgatatctttgttaattaagggtatagcacattttcatttgtgttgcaaatgtttccactatagtagtagttcacttttgttgtatttattttaattttgatgtttaaattgtagatagccaaatgtacaaatcctttcctctgtgcaatttggttttcaagacatacttagaaatagctaattttctcattttcttcttgttttttgggagttttaatatttaaattttatatccatgtggggccgggcgtggaggctcacgcctgtaatcccagcattttgggaagccgaggcgggcggatcatctgaggacaagagtttgagaccagcctggccaacatggtgaaaccccatctctactaaaaaagtataaacattagccgggcacggtggcacacacctgtagtcccagctactcgggaggctgagacaggagaatcagttgaacgcaggaggtggaggttgcagtgagctgagaccccgccactgcactctagcctgggcgacagagcaagacttggtctcaaaaaataaataaaataaatgttatatccacgtgggattgttttgctgtaagaaaataaattggtggccgggcgcagtggctcacgcctgtaatcccagcactttgggaggccgaggcgggtggatcacgaggtcaggagatcgagaccatcctggctaacacggtgaaacccagtctctactaaaaatacaaaaaattagcccggtgtggtggcgggcacctgtagtcccagctactcaggaggctgaggcaggagaatggcgtgaacccgggaggcggagcttgcagtgagccgagatcgcaccactgcactccagccagggcgacagagcgagactccgtctcaataaaaataaattcgtatctagattggctttgttcttattttcctaatgtgtcgcccgttgtcttcaccccatttatggtcagtgcgttagtctcccactgctgtgaagtccgtgcgctgctgttgggaagatggtgttgctgggtaactggctgtgtttcttccagattacagagtcacgggagacaccgttctgtgttactgctgtggcctgcgcagcttccgtgagctgacctatcagtatcggcagaacattcctgcttccgagttgccaggtaaggagcccccgacttcctcatggctctagttctgtctgggttggcttcttggcttctgcctctcttttttttttttgagacagtttcgctgtttttgcccaggctggagtgcagtggtgcaatctcggctcactgcaacctctgcctcctgagttcgagcaattcttctgccttagcctcctgagtagctgggattacaggcacccgccaccacgcccggctaattttttgtgttttagtagagacggggtttcaccatgttggccaggctggtctcgaactcttgacctcggcctcccaaagtgctaggattgcaggcatgagccaccacgctcggccagcactcttttctttacagacaccctgtttgcactttgctcaatgttctaagcagaatttggcctcagtcaggagccggcaggacgtcaggccatacagggctgtggttgttttaggccctgggtctatttgcagttactcatgagtgtaacgtgggtttctaaaacagatttgtaaagacatccaatagtcaactggggtaattttatttcctcaattgggtttttattttttaatttttatttatttatttatttttgagacagagtctgactctgtcgcccaggctgaagtgcagtggtgtgatcttggctcactgcaacttccctctcccaggttcaagcgattctcctgcctctgcctcccaaagtgctgggattacaggcatgaaccactgtacctgaccctcagttgggtttttagttaaacatgtgtttcctttcctgaaatctcagaacggtccgaggaaactagttatggagggaccagaggccgtgcgtttccaccgcagcgtctgtcgttgggtctctgctgggattcaggtagctgagtgggtgcgtgcaatacatctcatagatgcgtaccccttctctttttccagtggccgtaacatcccgtcctgactgctactggggccgtaactgccgcactcaggtgaaagctcaccacgccatgtgagtgcagctgggggcacaggcgtcagctacagagtgatgaatgagttaactgcctgcttataaataggctgatatggtcattatgcttctctcaggttgcatcctttaggaaccggtatcttcatttagaaatcctgctcttcctttatcccttcgtttcatgcagttttatctccgtcttccacttctgtgtcttcctggctggagtagctttatctgttgtctgaggcatccggggcacaccccatcatttcaggcttagccgtttctaagtcgaaggctgcagtcactgagggcctcaggcccccctcgcaaagcgctgcacagctgggttctcgtccgtcccgtgagcaggcatttgtgattgctgtcacatcgtcaccctcacgtggtgtctttcccgtgctccttaaaggaggttcacagcgccatctgcattgccctgggaggcgtaggtcaggaggcatctcttaggttaggtgatcacgtaaatcactcctgtggcccaaggagttcagattaaagtgatggagacagtgccctcaggacgagatgttgtgtggactcagagaaaggcgcctccctcacagggattttgtggaataaaaaccttgctttgtgtttgagcacaaacagcacatggaagagaccatgttgttacaaaaagagatttcactgttgactggcagacagttttcagtagaaatgtgcagccatgctggtcctccttgcccacagtctgtggagagggaaggtggccacaggccatccagcttggtgtgtctgcctcagccctgtcagcagatgccacggggatgcctgaggaggtgcagcttttattctcttctctaaaaaaattatctaagatgtttgcacttcttttttttttttttttttttgagatggagtctcgctctgtctgccaggctggagtatagaggtgtgatctcagctgattgcaaccctgcctcccaggttcaagcaattcttttgcctcagcctcccgagtagcagggactacaggtgctcgccaccacatcaggctaattttttaaatatttttagtagagatggggttttaccatgttggccaggctggtctcgaactcctgacctcaagtgatccgcccgcctcggcctcccaaagtgctagattacagacattagccactgtgcgtggccagatgtttgcacttctgtttcaaaatttttaaagggataaagaagtttacctttgggggttagtttctttgatattgtgagaagcacacacactctttctcaggtagctctttctgtgtatggtttccgaatgcgtttatttgaatgcctttctgatgctctgttgtgtaatttatttgattgcctctccaatgctctcttgtgtaatttggccattttctccctgcaggaaattcaatcatatctgtgaacagacaaggttcaaaaactaagcatccagaggccctgagcagctttcagcactggaggtgaagagagcgtgtttttaaaatacagagacaagcacgtcaaggtgttttcacagccccctgagggaagggacgcagggtctccgacaggtgctctggggtgactcttctgtggagctttaccctctgagtgagaccctccccagagccccgggggccgcagcccgccctcctggtgagcgctgggcagggctcgtggtggcatcagcagcagagacgaagcctttctgtaacatgcggccgtcccgccgagaggggcagttttgctcttttgtacattttccgaaactacagttaaagcagaagtctgtttttaggaaaagtttcaagggagaagggcaagtttatcaaaaacattgtttcaggagaagggagcataagtttacagcctacaggacgtacacaatatcctgctgctgggaaaaccacagcattttatctattttttattttaataggtttggtgcttatcttctaataagatttaaatgtcacaaactgtagcacaaataatataatttataatttacaaattgactaaaattgggtatagtatggtatttgaaagaataagcatatgcttctgtttattaaaaaaagaaaccttccaatgtccaaaactgctaaccctcgacgtggccgccaagttagtcgctccttgctaaccggtgagtgaccgcggccccgagcctggggctggacgcaggtcccaggacatgctgctcccttgtgtgagtgaccgcggccccgagcctggggctggacgcaggtcccaggacgtgctgctcccttgtgtgagtgaccacggccccaagcccagggctggaggcaggtcccaggacgcgccgctccctcatgctgcccgggcccttcctccaagaccctacagagcctgaggggcaccttggcttccgcctgtgctagctttgccatgtcatctggaataatacttgaaattttgatttttggaaaaaaaagttttttatcttttgttgaaatcacctgttatccttgtttgtaaactgataacttttttgcttcttctcaggaatacagttttcaactgttgtcttgctcttgatagaaactgagaagcagcaatctgtatttgtggaggaaagtcctctcttttgcatattctaataaatgagccgcgtttgctcctc

SEQ ID NO: 15517 - DNA, 47272 bp, Homo sapiens
ggatcagctgagggagccgcaatgtctcttgacagcggcggcggcgcagccggttccgggttcggcgcggggcgggggtaagcgcggctggcgagggggctgcggcgggcggcgaagggggacctggttgcggccgtgggagggggcgcccgccggcgtccaggccgggctgcggggctgcgtgggcgcgggcggccgggccggggcccgcggggtggggcgggcgccgagtctcggcctctggggtcgggagtctccatgggcgtttccggggtctccgcagatgtgaatcccgatggagcggcccgaggaaggcaagcagtcgccgccgccgcagccctggggacggctcctgcgtctgggcgcggaggagggcgagccgcacgtcctcctgaggaagcgggagtggaccatcgggcggagacgaggtgcggggctgaggccggggccgggggccggggccgggcagagccaccgggttgcgggcaggccacacgggcggcggtgcagtgtgcgctccagatttttccgtggagtgaaatgtcatgtaagaactggtatttattcggtgttctgcccaccgattcttgcgcatgattcacgcacatcatttagccttcgttacaactgtataagttagttgtgttcatatactctccagaatgcaatattgtcacgttcgttgccgtacagagtatcttttctgactgtaatggaacgaaattaaaaataatagaaggaaaagtggaaaattcacagatatgtggacatgaaacaccacactcttaaagcaaccggtgggtcaaataagtctttacaacggggaccttgttttgagacaaatgaaacaaaaatagaatacaccaaaaggtatttaggatgcagccaaggcagtactcagagggaaatttatagctgtagtgcttatattaaaaaagatctcaagtcccagcccctagaatatttatttatttaataaacctggaaagctaaaaacttgaacaaagtcatacaacgggtgagagaaagttccctcagcctccacattcactgcctccagtctcccaagtgaccatctggttgtttgatttcctctgaagcctttgtatggggagagaaatgcgctggtcctgtcaacaaaaatgtttagtttgtctgaaaattaatgaattagctccgacattatactctaaaaaggagcgaggatgggaaatatttgctgtttggaagcaattttttttttttttttggttaatttcaccccttataatgtgcttgcacctggttttttttgtttttttgtttgtttttttgagataagagtcttgctctgtggcccagactggggtgcagtggtgtgatctcagctcactgcaccctctgcctcccggttcaagtgattctcccgcctcagcctcggagtagctgggactacaggcgtgcgccaccatgcctggctaatttttgtatttttagtagagatgagctttcgccatattgcccaggctggtcttgaacaactgaactaaagtgattcacctgcttcggcctccgaaagtgctgggattacaggtgtgaaccactgtgtctgacctggttttgttttttggggtgttttggtagtcttacattccagtatcaagtcaaagtttattttacaactttgaaagtatttagatatcatcataacatatcaaaattatccctttaagacaagaggaagtatttgaagatttttccctttgtctttacttgatagactaggaggtttggtgaagagcagaggccctagagacaaattatgtgggtttccaatctgtcaacacattactctgggctaacgacatctttctgcgcctatgtacctacttcatagatttgctctgaggagttaatgagatcatacacggactgcttagaaggaactttagcgttagcacttagcattagccattgttattgtaacatgttatacatgttattacatggtaggacattacatgttaagacaaggagagaaaatatgtcgttgagtttatcttttaataggaacgattttagtgaatttataaataatgttgccagcaaaaactttaagattattgtattagtttgttcatactaccatagcaaaatactacattctgggtggcttaagcaacagaaatttatttatttatttatttatttatttatttatttatatattttttgagacagagtctcactctatcacccaggctggagtgcagtggcgcgatctcggcccactgcaagctccacctcccgggttcttgccattcttctgcctcagcctcccgagtagctgggactacaggcgcccaccaccacgcctggcagtggtattttgtatttttagtagagacggggtttcaccatgttagccaggatggtctcaatctcctgacctcgtgatctgcctgcctcagcctcccaaagtgctgggattacaggcgtgagctatcgcgcccggccagaaatttattttttattttattttatttttttaatttttgagatagagtcctgctctgtcacccaggctggagtgcagtggcatgatctcggctcactgcaacttccctcttccaggttcaagcgattctcctgcctcagcctcccgagtagctgggactacaggcacgtaccaccacacctggcttatttttttctattttagtagagatggggtttcactgtgttgcccaggctggtctcgaactcctgagctccagcaatctgtctgcctcggcctctcaaagtgctaggattacaggtgtgagccactgtgcctggccagaaatttattttcatggttcaggaggctgggaagtccaagatcaaggtgttggcagattgggttcctggtgagggctctcttggcttgcaggtggccactttcttgctgtgtcctcacatggcagagagggggactctgcttgctctctctgcctcctcttaagagggcaccagccctgtgacatctgattcccacctagtgacctcatttaacatttatcagctcacaggccccatttccaaatacagtcacattggggattaggacttaaatatatgaattttaggggggtacagacactcagttacaaacattcagttcctaacagttgtagaacttgattattttatttatttattttatatatatatatgtatttttttttttgagacggagttttgctcttattgcccaggctgtagtgcagtggtgccttcttggctcaacctccaacctcccgggttcaagcaattctcctgcctcagcctcccgagtagctgggattacaagtatgtgctaccacgctcagctactttttgtatttttagtagagacggggtttctccatgttcgtcaggctggtcttgaactcctgacctcaggtgatccacccgcctcggcttcccaaagtgctgggattacaggcgtgagccactgtgcccggcctgatatatttattttttgagacggagtcttactctgtcacccaggctggagtgcagtggtgcgatcttcactcactacaacctgcatcttccaggttaaagtgattctcctgcctgagcctccagactagctgagatttcaggcgtgtgccaccacacctggctagttttttggtatttttagtagagatgaggttttaccatgttggtcaggctggtcttgaactcctggcctcaaatcaaatgatccacctgccttggcctcccaaagcgttgggattacagccatgagccacctcgcccagacagaacttgattattttaaagcaatgatgtgcctgccatttataaggcattatttgggggaaaagggaaagcctaggtaacgtgtaggaaggggtgcaacaaccttgttttcccaaagagctctttatccagtctggagtgcagtggcacgatctcggctcactgcaagctctgcctcttgggttcacaccattctcctgcctcaacctcccaagtagctgggactacaggcacccgccaccatgcccggctaattttttttgtatttttagtagagacagggtttcaccatgttagccaggatggtcttgatctcctgacctcatgatccacccgcctcggcctcccaaagtgctgggattagaggcgtgagccactgcgcccagtctttttttttttttttttgagacggagtttcactcctatttctcaggctggagtgcaatgatgtgatctcggctcactgcaacctccgcctcccaggttcaagtgattctccttcctcagcatccagagtagctgggattacaggcactcaccaccatgcttggctaatttttgtattttgtagagacagggtttcatcatgttggctaggctagtctctaagtcctgacctcaggtgatcctcccgcctcggcctcccaatgtgctgggattacaggtgtgatccaccgcgcccagccaagagctctttattctaagagagtggcagaaatgtacatcaactgcttgaaagatttaacccaccaagcgtcaagcgcagcaaatgctgtgaatagaactttagcacaaagcatctcggttccagattagaatgctgatattcaggccaggcacggtggctcatgcctgtaatcccagcagtttgggaggccaaaacaggaggatctcttgaccctatgagtttgagaccagctagggcaacatagaccctgtatctacaaaaacttaaaaaattagctgagcgtggtggtgcatattggtagtctcagctactcaggaggctgaagtgggaggatcacatgagcctgggagttcaaggctgcagtgagctgtgattgctccactgcaccacagctggggtaacagcgcaaggccttgtctcaaagaaaaaaaaaaaaacctgatgttctggcatggagacgcctctgttacaaactggctctggcgacaccgtgacttgcactggttttggggcttgaaggagactgtcctggcagttaacgctcaatggaatgggaagagcttgaccacaggtgatacttgccttggatacagtacttccaatagtacagaatgtttgcacaaataagatttttaatatccggtttcatggcagtatcatttacttgtagtaaaattcaccttttttggggttcagttccatgagttttgggaaatgtactcaccagtgcagtcaagatgtagaacatgttcgtcaccctgaaaggtccccctgagtcccggctcctggcagccactgatctggtttctttgccttctgctgcttccagcgtgtcgtgacacagggtcacagggtgtctgccatcatcttctgcgcctggcttctttccctggcacgcaccttgttgcatggatgagcagtttgctcctttctgttaccgggtagtgttctgtggtttggatgcaccatggcttgttagtttacaaccagtggatggacatttatactgcttcctgtttttgtaagaaataaagctaatataaacataagtgtgcagtctttgtagggacatacatttttctcttagctaagtaactatgaatggaattgctgggccacgtggccagtgtctgtttaacttgctgagaaactgccgcattgtttcccatgtgcttgtccattttgcagtcccacagcacagtacgagagttccaggttttccacttcccttttggccacttgtaggtggtcagtctttttttttttttttttttttgagacagcgtcttgccctgtcgccaggctggatttgcagtggcgcaatctcagctcactgcaacctccgcctcccgggttcaagccattctcttgcctcagcctcctgagtagctgggactacaggcacgtgccaccatgcccggctaatttttttgtatctttagtagagacggggtttcaccatgttggccaggatggtctcaatctcttgaccatgtgatccgcccgcctcggcctcccaaagtgctgggattacaggcgtgagccaccgtgcccggcccgtggtcagtattttcagccaattcttatttggtgtgtagtggtatttcatggttttaatttgcatttctctgaagattaatgatgttgagcattttgtcatgtgcttaatttgccatccatatctcttctttgataaagtgtttaaattgttttaagttgcattatttactttctatttattgagttatcagagttctctatacattctggatacaagatctttgtcagatatgtgttttacaaatatttccaccagtccatagcttgtcttttcatctttttaaacaatatctttgaagaacagatttttacttttttttttttttgagatggagtctcgctctgttgccaggctggagtgcagtggcacgatctcagctcactgcaacctccacctcccatgttctcccacctcagcctctcaagtagctgggattacaggtgcatgctaccatgcccggctaattttttgtatttttagtcgagatggggtctcatcctgttggccaggctggtctcgaagtcctggtctgaagtgatccgcccgccttggccacccaaagtgatgggattataggcgtgaaccaccgcccccagccttactttttttgttgttgttgagccagagtctcgctctgtcgcccaggctggagtgcagtggcgtgatctcggctcactgtaacctccgcttcctgggttcccaccattctcctgccttagcctcccgtgtagctgggattataggcgcccgccaccatgcctggctaagttttgtatttttagtagagactgggtttcaccatgttggtcaggctggtcttgaactcctgaccttgtgatccgcccgcctcggcctcccaacgtgctgagattacaggtgtgagccaccacgcctggcccagaattgactttttttttctttttttgagtcggagtcttgctctgttgcccaggctggagtgcagtggcaccatcttggctcactgcaagctccacctcctgggttcacgccattcttctgcctcagcctcctgagtagctgggactacaggcgcccgccatcacgcccagctaattttttgtagttttggtagagacgtggtttcaccatgttagccaggatggtctcgatctcctgaccttgtgatccgccccccccttggcctcccaaagtgctgggattacaggtgtgagccacggcacctggcccacattttacttttgacaaacctcagcttattattattattttttcctggtttgtgctttttatatcctatctgcgaagtccatgcaagacccaacggcactaagatttttgcctgtcttttccactggaagtttcatagttttagattttacatttgtctctgtctggccatccttacacagccacaatactgtattgtttactatagcatgatggtaagtcagttaagtaatatgagtcttccagcttcattctttttcaaaattgctttggtttttctacacgttttttctgtgaactttagaatcagcttgtcagtgtctacaagccctctgggattttgactggaattgcattgaatgtatgaaacaatctggaggacagctgacattttaacaatactgagtcttctgattcacacacccataggtcagtgatgggagcaaggctcaggctaaagcagattcagggtgtctttctgtgtggaacgtttaggaaaagtatgtttgcatgccactgtctcctgaccaaacccttcgcttttttgtcttctagtatctttatgtatccttatagattattataggcagtaatgattaatgatgagatattaaaacgcctttgttcttttgatttaaggagagggcaagtattgaggattttccctcttgcttttgtattcagggccgggcgctggtggctcacgcctgtaatcccagcactttgagaagccgaggcgggcatatcacgaggtcaagagatcgagaccatcctggccaacattgtgaaacctcatctctactaaaaatacaaaaattaactggccctggtggtgtgcgcctgtaatcccagctactcaggaggctgaggcaggagaatcgcttgaacccgggaggcagaggttgcagtgagctgagatcgtgccactgcactccagcctgggccacagaaagagactccgtctcaaaaaaaaaaaaagaaaaaaaaaatcccaaagtgtcagaattactgtattcagctatagatgcatccctgtatataagatgcagtttcttatacgtgtacaaatgcctatcgcaggccaggtgcggtggctcaagcctgtaatcccaacactttgggaggctgaggcgggtggatcaagaggtcaggagttcaagaccagcatggtgaaaccccgtctctactaaaaatacaaaaaattagctgggtatggtggcgcatgcctgtagtcccagctgctcaggaggctgaggcaggagaatggcttgaacctgggaggtggaggttgtggtgagccgagatggtgccactgcactccagcctgggcgacagtgcgagactccatctcaaaaaaaaaaaaacaaacaaaaacaaaaaaaaaaacaaatgcctatcacagttggctcagtcactttttctgtgactgtcattgcttcaattttatgttgatttatgaaacctaagtttacacagaaaagaaattaaggactaaattaagatactgaagaattacttaagcccctgagtttttttttttctttttttttttttgagacagagtcttgctctgtcacccaggctggagtgcagtggcgccatatcggctcactgcaagctcctcctcccgggttctcgccattctcctgcctcatcctcctgagtagctgggattacaaggcgcccgccaccacgcccggctaattttttgtatttttagtagagatggggtttcactgtgttagccaggatggtctcgatctcctgaccttgtgatctgcccgcctcggtgtgagccaccggacctagccaaccccctgagtttttttaaagttctaataatactcatcaggttagctgtgtatgcaagcatattgtaaaattgcttttttttttttttatttccagttggagtctagctctgtcgccaaggctggagtgcagtggcgcgatctcagctcactgcaacctctgcctcctgggttcatgcgattctcctgcctcagcctcccaagtagctgggattataggcaaccgccaccatgcccagctaatttttgtatttttagtagatatggggtttcactgtgttggccaggctggtctcgaactcctgacctcgtgatccattcacctcagcttctcaaagtgctgggtttacaagtatgagccactgcgcctggctgtaaaattgccatttaagaggctgtgtgtaactggaggtattgatgggtgtctttgagagggtggggattcagaaaggttcaggatgggccgggcgcggtggctcacgcctgtaatctcagcactttgggaggccaaggtgggcagatcatgaggtcaaaagatcgagaccatcctggctaacatggtgaaaccccgtctctactaaaaacacaaaaaattagccaggcgtgatggcgggcgcctgcagtcccagctactctggaggctgaggcaggagaatggtgtgaacctgggaggcggagcttgcagtgagccgagatggtgccactgcactccagcctgggcgacagagcgagactccgtctcaagaaaaaaaaaaaaatttctttatgtctttcttggtcaagtgtttttttttacatatgtacaatggggatcctgagttggaaccacatactttggtaaacaaagtgcagtagtgttcacagttaccacgatcatatcccgtgttgacccaccctctcttttttaggttgcgacctttccttccccagcaataaactggtctctggagatcactgtagaattgtagtggatgaaaaatcaggtcaggtgacactggaagataccaggtgagtatgttctgagcttcttttggtgtttcttcttgtagcttaagaagcctgacttcgtgctctgtgctgtgtgccacggctgaggaggagaagaaatgctgtctttagtgtgataacagcggctcatttttataacagcacagtcatgtgtcccttagcaacagggatccagtctgagaaatgtgtcagacaatttgatcatcttgcaaacatcatggagtatacttaaacaaacctagatggtgtagcctactacatacctaggctatatggtatagccgattgctcctaggctatcaacctatacagcgtgctactgtactgaatgctataggcagttgtaacacaatggtaagagtatttatctaaacacagaacaggtgcagtaaaaatatgatattttaatcttgtgggactcctatcgtatatgcgtctgttgaaaaaaacattattatcagcccgggcgcggtggctcacacctgtaatcccagcactttgggaggctgaggcagttggatcacctgaggtcaggagctcaagcccagcctggccaacatggagaaaccctgtctctcttaaaaatataaaaattagccgggcgttgtggcatgcgcctgtaatcccagctactcgggaggctgagacaggagaatcacttgaacccgggagtcggagattgtggtgagctgagatggcaccactgcactccagcctgggaaacgagtgaaactccatctcaaaacaaaacgaaacaaaagtttattatctggggcatgactgtagttaattaggctcccaaggtattagaagatgtatttcctggtttccaggatgggacacttagtgacactttggtgtctatgacccttcttgaatgtattcaaattaagtatgtctcagaaataagacttaaaagatgctggtaatttttggttcttgcaagcctattcaagtttgatttctttccctcaaatcaaaaaatcattttttaaaactaataaattctcgttcttgtacaactgaagtacagattgagtatctgaaatgattgaaactagactgtttagattttggattgtttcagattttagaatattttcattatacttaccagttgagcatgtctgaatcaaaattctgaaatgttccagtgagtatttttttgagtgtcttgttggtgctcaaaaagttttggatttcacatttctgattagggacattcagcttagggatattcaacttggaaagtggaaagctttccaaaatcctattcatacgttaaaaatgcatatgttggtatatatattttgcataaatgcaatcacactacacatactgttgtagcgtcagcttttttctttctttcttttttttttttgagatggagtttcactgtgttgcaggctgaagtgcagtggtacgatctcggctcactgcgacctccgactcccaggttccagccattctcctgccccagcctcccgagtagctggcattgtaggcacacactaccaagcccggctatttttttgtgtttttagtagagacgggatttcaccatgctggccaggctggtctcgaactcctgatctcaggtgatctgcctgcctcagcctcccaaagtgctgggattacaggcgtgagccatcgcgcccggccagcttttttcacttacggtgttttatggagcgcttcacatgtcactgcatctacatccagctcatcttttcattatcttaggatagtttctttgtcacttcccttattggtggacatttattgttttgactttttcttactataaataacactgcagtgactctttcccaaactctgccttcatgtctgttttcttgggatgatttctcggaagggaagtctgtgtcagtgttactcagaatgtgcctattcctttttttctcttttttgagacggagtctcgctctgtggctcaggctgaagtgctgttggtgcgatctcggctcactgcaacctccgccacccgggttcaagcgattctcctgcctcagcctcccgagtagctgggattacaggtgcccgccgccacgcctagctcagatggggtttcacaatgctagccaggctggacttgaactcctggcctcaggtgatccacctgcctcagcctccccaagtgctgggattgcaagtgtgagcccccacacccggccagaatgtgcgtcttttaaatctgctgcaagtggcaggtggtcttctagcagtatgttgagagtgtgctgttctcactgcaggattttttttgtttggtaaagatcaggctctgtgagattctttggtaactgatagtttcagggatagaagactaggaagtaggttttaataggaagaactgatgctccgtttcctagtctaatagatatcagattaagttctctatttcttggcacaatgggaaaggcagggtgctggtccctagctgtcccgcctgcttcagggcctggcttccccatgctgggtgctggtcctgggctttcctgcctacatcagggcctggcttctccacgctgggtgctggtcctgggctttcccgcctacatcagggcctggcttccccgtgctgggtgctggtcctgggctttcccgcctacatcagggcctggcttccccgcgctgggtgctggtcctgggcagtcccgcctgttccagggcctgggttccctgcactgggtgctggtcctgggcagtcccgcctgttccagggcctggcttccccacgctgggtgctggtcctgggtagtcccgcctgttccagggcctggcttccccgcgctgggtgctggtcccgggccttcctgcctgttccggggcctggcttcctcgcgctgggtgctggtcccgggcagtcccgcctgttccggggcctggcttccccgcgctgggtgctggtcctgggcagtcccgcctgttctggggcctggctttcccacgctgggtgctggtcctgggcagtcccgcctgttccggggcctggcttccccgcgctgggtgctggtcctgggccttcccacctgttccagggcctggtttccctgtgctgggtgctggtcctgggccttcccgcctacatcaggacctggcttccccgcgctgggtgctggtcctgggcctttctacctgttccagggcctggcttccttgcgctgaatgctggtcctgggcctccctgcctgttccagggcctggcttccccacgctgggtgctggtcctgggccgtcccgcctgcttcagggcatggcatccctgtgctgactgcatggtggtggtactttcttatggctattgtaatttaccacaagcttaatggatttaaaaaacacaaatttgctgtcttactatagttatggaggtccagagtccgatatgggtctgatggggctaaaatccaggtctgaacagggctggtttcttctggaggctccaggggagaatttgttctctgccttttccaggttccagaggtgccacgttccttggcagaggtgggctggaggggaggggtgctcaggcagaaggaaccacgtgtgtaggggcccctgagcataagcagggctgtgtggtcggagcgtgtggtgagcggcaaagtcacacaagggagcttgggctttagcctgagagcagtgaggagtcatcaaaggggtgtaagcggaggagtgaaataatcagatttttgtttggaaagaacaggaggatgagtgatggctgcagtcgcccctcggcatctggggggattggctccagccccctgcatgcacccaagtccgtgcacactctagccccgtagccagccctgtggagcaggaggacacagaaagtcagtccagctccagcgcccctgcatgcacccaagtccgtgtgcactccagccccgtagccagccctgtggagcaggaggacacagaaagtcagtccagctccagcgcccctgcatgcacccaagtccgtgtgcactccagccccgtagccagccctgtggagcaggaggacacagaaagtcagtccagcatatgtgtgggattcattccctctcattgaaaaaaacccgtgtataagtgcatctgcacagctcaaaaccgcatcttccagggtcagctttgtgttgtaacagcagaactcagacacacacagccactgcctggtttcggaggttttacggggagacggctgtggcagttcatttgcttactgtctgcatttgctttcctgctacagacggcagagctgagtagtggcaatggtgaccacaaaacctacactgtttaccctctgtttatggaaatcgtttgccactcccatccctcagcaaaccgtggtggtcactcggatgtgagttctgtccactgctggggcctcgggagtgaagctgcagagctgaggcctgtgtggtttcagtcgttttgcccggttgccgttttgtgtgtcgggtatgctgtgctcttggatcttggtcacctgaccaacacctgatttgctgtcaggtctctgctcagaagtccccaggaggcacttcctgccccatcaacttagcctcctcctgtctgtccctgggtcagcagcatctgcattggcctctccctgggcagagtacctcaaggggcttggcagccagaccacaagctctgagtgcagggccatgtcctgcagctgacggcccagcatttagtccgcttctgcccagagccagtctcttgggagggatcagtactcattggaggcatgagttcaccggggttgtgatggctgcaaggaacagaactgtggatagcacaagtccagctcaggggaggctggaggtggaagcaccacactgtagacgaggcctccgggtccactaggaggcaaacggggagagaacccagccctgcagcagcagagctgccaagcacgtgaggaggtgtagtggctggttaggctgtcagtcagggagaagtgggcgagccatttcttgagagaatggtgaggggtgcgtggatgtgtgcatcgttacgtatttacactgttcctatgagtatttccagagtggtcatatcgagctgcttgctaatggtgctagaaaaaaaatcttgtaactccaagttattttaagtagaataaattgtgtttttgtttttttacagcaccagtggaacagtgattaacaagctgaaggttgttaagaagcagacatgccctttacagactggggatgtcatctacttggtgtacaggaagaatgaaccggaacacagtaagagagaggaaggcttgccggggtcagacccgcacgggggtgcacgtgagggcgctctctgaacgttcctcctggctacatcccttcccataggaacgttcctcctggctacaccccatttcttgctcacatgggttcctgccgtgaatagtgtctgttgagtgggagtgtcgactttgcagcctgagcccagccattcctcaggaataccactgtggccatgagcagccaatcccaaaatggcagccaaggagaaactgatggggatggtttgggttctacaggagaagaacttgagttatggggaataaaacctaggaccaggggtctggaggccattgatggttctgcttttggagaccttacaagaaacatcaaaggttagactggattccagtaagttttttcagctccagaagtcccgtttttgttttgtggaagaacagtataggacaaggaaagttatgggagtccttcgaaggtcacccctgaaatacttttttttttttgagatagagtttcgctcttgttgcccaggctgaagtgtaatggcgcaatctcagctcaccgcaatctccacctgccgggttcaagcaattctcctgcctcagcctcctgagtagctgggattataggtgcccaccaccacgcccggctcatttttgtatttttagtagagacggggttttgccatgctggacaggctggtctcaaactcccgacctcaggtgatccacccacctcaacctcccaaagtgctgggattacaggcatgagccactgcacctggccaatacttatttatttaattttttaaataaataagagacagagtctcgctctgctctgttgcggaggctggagtgcaatggcgtgatctcagctcactgcaacctccacctcctggtttcaagcgattctcctgcctcagccttccaggtagctgggattacaggtgcacaccaccacacccggctaatttttgtatttttagtacagacagggtttcgccgtgttggccaggctggtctcgaacttgggacctcaggtaatccgcccgcctcggcctcccagagtgctgggattacaggcaagagccactgcacctggccacccctgaaatacctaaagaccacagtggtgagggagaatggggcaaatatgtcttaggcatcttcagcataaacttaaccagcccctggccacacggaaggatcttgtatctgctcctttgtgtagtttgaaattataagtgaggcatagattcttcaccttcttctgcctcctgatgccattttttcccgaggcttatttcttttgtgttggtagagatgttttagattacttgttttgaaatctcttaaactgatgaatttgttattagctgatgagtcaaaataatcaacaaaaacaaatggactggagaacagaagagaaaaatgagttctcagtttgcacaggggccaccacttttctgatttgattgattttcttttagacgtggcatacctctatgaatctttaagtgaaaagcaaggcatgacacaagaatcctttggtaagtaagagtgtagcaaagaagtgggtgcatgttaggagctatagcattccttttgtgttttgagatggagtctcgctctgttacccaggctggagtgcggtggcgcgatctcagctcactgcagcctccgcctcctgggttcaagcaattcccctgcttcagtctcccattttttttttttttttttttgagacggagttttgctcttgttgctcagcctggagtgcagtggcgcgatctcggctcactgcagcctcctcctgccgggttcgagagattctcctgcctcagcctcccgagtagctgggattacaggttgcaccgtcacgcctggctaattttgtttgtttgtttgtttgtttgttttttgagatggagtcgcgctttgtcgcccaggctggagtgcagtggcgcgatctcggctcactgcaacctccacctcccgggttcatgccattctcctgcctcagcctcccgagtagctgggactacaggcagtcgctaccatgcccagctaattttttgtatttttagtagagatggggtttcaccgtgttagccaggttggcctcgatctcctgacctcgtgatctacccgcctcagcctcccaaagtgctgggattacaggtatgagccaccgcgcccggcacgcctggctaatttttatatttttagtagagacggggtttcaccatgttggtcaggctggtctcgaactcctgacctcaggagatacacctgcctcgacttcccaaagtgctgggattacaggcctgcaccaccgtgcctggccttggggctgttgcattcttaagagcatttcaatccctagagtgtctgcttgagccctggttgtgtgctgcttctgctccttttgggttacagaagctaacaaggaaaatgtgttccatgggaccaaagatacctcaggtgcaggtgcagggcgaggggccgatccccgggtccctccgtcgtcgcccgccactcaggtgtgctttgaggaaccacagccatcaacatcgacgtcagacctcttccccacagcctcggcctcttccacggagccttctcctgcagggcgagagcgttcctccagttgtggtgaggtcacatctcatgaggtcttggtgctggttgcatggtttttgttcactactctttacctgtgttgttacagaggcagataagcgactgaggactggcatgaggttctcagtagtgagatttctgtaggagtcaatattgagtgtgttgttcccttcacttcccaagagaagtgaagatcagggactctagtaccattgtgtattttgcagtttcattgagactataattcgcataccataaaagtcatccagccgaagtgtacatttcagtggattttagtacatcacaaggtgtgggaccatcaccactcattgacacgaaaaggaaaccggtgcccaccagcagtgactccacatgtccccttcccctcggccccaccagcagtcactccccatgtccccttcccctcggccccaccagcagtcactccccatgtccccttcccctcggccccaccagcagtcactccccatgtccccttcccctcggccccaccagcagtcactccccatgtccccttcccctcggccccaccagcagtcactccccatgtccccttcccctcgaccccagcagcagtcactccgcatgtccccttcccctcagccccagcagcagtcactccgcatgtccccttcccctcggccccaccagcaatcactccccatgtccccttcccctcggccccaccagcagtcactccccatgtccccttcccctcggccccaccagcagtcactccccatgtccccttcccctcggccccaccagcagtcactccccatgtccccttcccctcggccccatcagcagtcactccccatgtcccctccccccagcccctggcagctgcgtgtgctttcggcctctggatttttctgttctagacacttcacagacatggaatcatgcgtgctcttttttgttgttgttgagacggagtctcgctctgtcgctcaggctggagtgcagtggtgcgatctcggctcactgcaagctccgcctcccaggttcacgccattctcctgcctcagcctcccgagtagctgggactacaggtgcctgcaaccacgcccagctaatttttttttgttttttgtttgtttgttttgagatggagtctcgctctgtcacccaggctggagtgcggtggcgcgatctcggctcactgcaagctccgcctcccacgccattctcctgggtccacgccattttcctgcctcagcctctgagtagctgggactacaggcacccgtcaccacgcctggctaattttttgtatttttagtagagacggagtttcaccgtgttagccaggatggtctcgatctcctgacctcgtgatctgtccgatcggcctcccaaagtgctaggattacaggcgtgagctgccgcgcccagccgtgactgggctctttcacttagcgtggtgttttcagagttcatccagaagaggatgttatttaaaactagttttgcagatgctgttccttacggcatgactcttacctcttccatggtcattgggaagaaattccatctgggtgcagcgtgacgggaatgttttctgttttcttttagggtttgtcacgtggaggatgtgtacatatggattctctaaattggatcgcgctatacatattatttttttttaattttcttagctattctctattctagattatgttttgaattagcttttccagtttaatagaaaaatctttttgagatttttgatttggggagaattgacagttttacagagcccaggaaaatggtgtttctccttgtttgttaagctcttcctgttcttcagtgaagtctcacggctttcttcgtgtcgtctgggctcattcttagtcctggagtgcttggctctcgcgttcttacattccatagcagtctgcagattcctatgaacagaagagcctctgaatctcagattaggctgtgtttcgatctgacaggaaagctggttccctgataaaaagtccagaaatgcccgctcagctcagctactcctgaggtcaccagggccttctgtgcactccacgctgctgtttttgctcaggtttttgcctcgaggtttcacagtggctgccagagctctgaacatcactgacacattcatggcaggcaccaggaagcctccggagaagggacctttgctttccatggatctgttggctgatccgcagcagcaagagccatgtctcccagaagactgctccctctgtctcatgagccagcctggctgctctgctacaggacactccttgtttttatgtctctctgtgtattccagtgggatttggggaaggagcggcatcgggtgcagggactcagtgtgccttcttgaaaccagaaacctctcacgctctctgggcctgtttccacttctgttgatgtggtttttactccgttgtatgccgttgctctgtcttcacacgggcagccacacctctcctgttcgttgatgttcttgaggccttgttgcatccgctccttccttcttcagaggctcctttggatgagcccagctcctcagcagcagagtgctctttattttctgtttttttgagacagagtcttgctctgttgcccaggctggagtgcagtggcgcaatctcggctcactgcaacctccgcctcccgggttcaagtgattcccctgcctcagcctcctgagtagctggggtcacaggcgcgcaccaccaccacgcccagaaaatttttgtatttttagtagagacgttgttggccaggctggtcaccaggagcagagtgttctaaaagcatacctcagtctgatggatgacatcccagccatctgaagagtaacatccagatgtgttgtaacattccagtgtgttgtaacattcctgtaacattccaatgtgttgtaacattctggtgtgttgtaacattcctgtaacattctggtgtgttgtaacattccggtgtgttgtaacatttggtgttacgcggtgtgttgtaactttctggtgtgttgtaactttctggtgtgttgtaacattctggtgtgttgtaacaatcgcggtgtgttgtaacatccggtgtgttgtaacattccagtgtgttgtaacatttggtgttacatgctgtgttgtaacattctggtgtgttgtaacattcccggtgtgttgtaacgttccagggtgtgttgtaacattccggtgtggtgttccggtctgttgtaacattccaacattccggtgtgttggtgtgttgtaacattccagtgtgttgtaacatttggtgtgttgtaacattccggtgtgttaacattccggtgtgttgtcacattctggtgtgttgtaacattctgatgtgatttcgggactcacctgggaggacttctcaggtgctaattggggacactaagttgcaggcaagactgtggagagtgagtgctatgtagtttccacctgatatttctggagataagaggaacagcggagaccaaacccatgacagacaagtttctactagcctgtctcctgtagactaaacacaaccccggcttctcagagcctctttgatttacctttgttttaacatcataaccttaaatttatgagtgaaagaaaataacacttcaagatgaaagcatctcagcactgggcacagtggctcacgcctgtaatcccagcactttgggaggctaaggtgggcagatcccttgagcccaggagttcaagaccagtttgggcaacatggtgaaaccgtatctttacaaaaaatacaatataaaaaatacaaaaattagccgggtgtggtggtgcatgcctgtaatcccagctacttggaaggctgaggagggaggattgcctgagcctgggaggcagaggttacaatgtgctgagattgcaccactgcactccagccttggcaacaaagccagagcccatctcaaaaaaaaaaaaaaaaaaaaaaaagacctgtaatcccagcactttgggaagccaagacaggcgaatcacttgaggtcaggagcttgagacctacctggccaacatggtgaaaccccgtctctactgaaaatacaaaaattatccaggcatggtggcaggcgcctgtagtcccagctactcaggaagctgagacaggagtttcacctgagagaggaggatcacctgaggctgggaggcggaggttgcagtgagccgataccgcgtcactgcactccagcctgggcgacagaccaggtctcaaaaaaaaaaagaaaagaaaacatgccagatttgaatagccacctgaatgctgaagttttaccagctctcttgggctgtgtacccttcatcgtatcttccaggttccttaaaacctacccttgggcacagctgggatgtgcactggctcttcacagctagatccagcatgcactgactctccccgtgcagggacagccccagaggaatagaggtggcgttccggccgctccagcgtggcccacagcgtttcaagtgcagcaagcacagacaggacgcggggttactagtattttggattgactgcagattttgaactgtctgcctagatgaactataccatgtccctagggccaagtcccatgtgcattttgtggctactagaccctcttcagaaatcaaacacaaaatagctctggcctgtaaagaaaacaaacttcaccagtaaaattgtttcctgttcctatccaccaatgtgcatagcacagtgtgtagtctgggtaatacggtttgcataattttttgataatgttctacttaaaaagggcagcgtatttatatattacttatgtaattaaaaaaaaaattcttctggccgggtgtggtggcttacgcctgtaatcccagcactttgggaggccgggtggttggatcgcctgaggtcgggagttcaagaccagcctggccaacatggcaaaaccccatctctactaaaaatataaaaattagccaagtgtggttgcgggcgcctgtaatcccagctactcgggaggctgaggcatgagaatctcttgaacccaggaggtggaggttgcagtgagccaatatcctgccactgcactccagcctgggtgacagcacaagactctgtctcaaaaagaaaataaaaataataaaaaataaaaattcttctatctgtatgcctaagtgtatgcatactaacaaaataagtatagttactgcttattgagcagctactaaatgtgaggcagtgtgccaggtacattctgtaagtggtaagatggtgctcctctccacgttggctgagcacggggcgctggagatgatggcgtgagtgggtgccggctgggggccggcccacaggctgtctctttccttctgttcgtatatgaggtggtttgtccccaaaactattctgttttctttcagctgctgtaagccagtttcttgtgtttttttttttcaaataataacacttacatttgaatactgtaagctagatatgtattatgctgtaatatgataaactaagtctttattaagatataggttattcacacctgtaatccttattcacacctgtaatccttattcacacctgtaattccagcacttggggaggccgaggtgggtggattgtttgggctcaagagtttgagaccagcctgggtaaaatggcaagaccctgtctctaccaaaaatacaaaaaacaatttagctgggcatggtggtgcacacctgtagtcccagatactcaggaggcagaggtggaaggatcgctttagcccaggaggcagaggttgcagtgaatgaagatctcgccactgcattccagcctgggtgaagagtgagaccctgtctcaaaaaaaagatagaggtgattagaaagtctgcctgtttttctgccaaggtcattcctgtcgttatgactctggcttcttgctcgtggagatagcgctctccctacaagtcactgtgctgtatccttcccgttatcacacctcttgtaaaatagttcacacgcagcaccatctccacccgttggaagctatgcatccctccactggagcatctgtgctttacacagacttctgtttttttttgtttgtttgttttgttttactttgtttttttgagacggaattttgatcttactgcccaggctggagtgcaatggcgcgaacttcgttcgctgcaactccgcctcctgggttcaagcagttctcctgcctcagcctcccaagtagctgggttacaggcatgtgccaccacacccggccaattttgtatttttagtagaaatggggtttcactgtgttggtcaggctggtctcgaactcctgacctcagatgatccacccaccttggcctcctgaagttctgggattacaggcatgagccaccgcgcctggcattttttttttttttttaagaaatgaggtcaggccgggcgcggtggctcacgcctgtaatcccagcactttgggaggccgaggtgggtggatcacgaggtcaggagatcgagaccatcctggctaacacggtgaaaccctgtctctactaaaaatacaaaaaattagccgggcgtggtggcgggcacctgtagtcccagctactcaggaggctgaggcaggagaatggcgtgaaccagggaggcagagcttgcagtgagccaagatcacgccactgcactccagcctgggtgacagagtgagactctgtctcaaaaaagaaaaagaaaacaaaagaaatgaggtcttggccaggcacagtggctcatgcctttaatcccagcactttgggaggctgaggcaggtggatcatgaggtcaggagatcgagaccatcctggctaacacggtgaaaccctgtctctactaaaaatacaaaaaaattagctgggtatggtggcgggtgcctgtagtcccagctacttgggaggctgaggcaggagaatggcgtcaacccaggaggcggagcttgcagtgagccactgcactccagcctgggcaacagagcaagagtccgtctcaaaaaaaaaaatgaggtcttgctctgttgtgcaggttgggagagtgatgtggtcatggctcactgtagcctcgaactcccgggctcaagtgatccactcacctcagcctcctgagtagctgggaccatatgctcgtactgtcacgcctagttaatttttttttcttttttgtattttttgtagagatggtgccttgctgtgttgcccaggctggtctaaaactcctgggatcaagtgatcctcccaccttggcctcccaaagtattgtgattacaggtgtgagccccatgcccagcctcagacctctattttttatttttatttttttttccccagagggagtttcgctcttgttgcccaggctggagtgcagtggcacgatcttggctcactgcaacctccgcctcccgggttcaagcaatttttctgcctcagcctcttgagtagctgggactacatgcactcgccaccacgcctgtctaatttttttgtatttttagtagagatggggtttcaccatgttggccaggctggtctcgacctcctgacctcaggtgatccacttgcttcggcctcccaacgtgctgggattacgggtgtgagccaccgcacccggcccaaagctctgttgtaacaagtttatgacacagtgtgtatcatatgaccacgggtatgtgggtttgccctgcgttagactcggtgctcgagggctaagcctggtcacagacatctccgcatttgtttctctgcaaatgggctccttgcccccagctccaccccacgtagagataggcacaaatagagttaagatgtgagttgagtgagcacacactcctcgtaagccacttgtcattcctaaactacgacatctcaggctgccagctgcactgggctccagtcagtgacaccttacaggcatggttctctcctgagctggatggatcagcacctatcttgtttgattcctctcacagggtctgggggtggtggcatctcccctaaaggaagtggtccctctgtggcaagtgatgaagtctccagctttgcctcagctctcccagacagaaagactgcgtccttttcgtcgttggaaccccaggatcaggaggatttggagcccgtgaagaagaaaatgagaggaggttagtgtctggttgtgtgtgtcctcagtcctctcgtgtgctcctggggcatgcgggggccgctgccatgctccgtgctgtggggcattgcttcctgcaggggcatgtggaccctgcctcaggttgatgcctgtaacacctccggcattttcattcagaaaacctgggcctgtttttttgcggtttgcataatccagatagaactgtgatttgctacaggctgttctcttggtctggaaatagtgcattctgaattgcagaattaatctcaaaatcctccttcctggccaggtgcagtagttcatatccgtaatcctaacactgggaggccaaggcaggagaatcacttgaggtcaggcgttcgagaccagcctgggcgacagagcaagactttatctctaaaaataaaaatcaagcctgacaccgtggctcccgcctataatctcagcactttgggaggccaaggtggacggatcatctgaggtcaggagttcaagaccagcctggccaacatggtgaaactccgtctctactaaaaatgcaaaaattagctgggtgtggtggtgcatgcctgtaatcccagctacttggaaggctgaggcaggagaattgcttgaacccggcaggtggaggttgcagtgagccaagactgtgccattgcactgcagccggggcaacaagaacaaaactccatctcaaaaaaaagaaaatcaaaaagaaagccctctgtcctggtaggacaataatttctaaaaatgtagcttaaatcttcacattgaagatgatttagggagaagtctgcactttgaaagccaaagttaagattattagaaaacatttgggaatgttatggtagaagcattgctgtatagcagtccagagagcagccagccactggggcactgtgacaggaaggttctaggaggggtccccagggaaagaaattaggttatctgacacgtggggttgatcggtgtggggaaggtgtggaaagagtcagcaacagttacacaggaaaaataagcacaggaatgaggaaattttaattctagcaaacatgaaaaattgtgtaagtcacacaacttaatctagtaaactacttggctcagcagtgaatacttgcataagcataataatacaaatacagtatcatgaactaatgtaatctgttaatgtaatgttggcaggggtgtctcaggacagagtttttctctaccttaatagatgtcaggaatgatgtctaaaattgataaatcaaatgtaccatgataacttagaaacacagaggtaaataccagaagaaacagctcaaagacatgaaaatagttttcctccgaggagggaaattgggtgaggagcggctgagacggagggtgactgcctttgttttcttctaaatatattatgtatacatttttttaagagacaggatcttgctttgtcacctaggccagagcgccgtggtgcagtcttggctcactgcagcctccacctcctgggctcagactgtcctcccacctcagccttccgagtagctgagaccacaggtgcacgctaccatagctggctaattttttttcccatttttttagagatggggtttcattatattgcccagactggtcttgaactcctgggctcaagcgatctgcccacctcagcctcccaaagtgctgggattacagttgtgagccattgcacctggcttcttctaaatacttggctttttaaattgtgtacagtttctttaattaaaaataaaaattaattgattaccaacatctgagcattatagaaaaataaaaacaccagaagagggtggggcgcggtagctcacacctgttaccctagtactttgggaggccgaggcgggtggatcacgaggtcaggagattgagaccatcctggctaacacggtgaaaccctgtctctactaaaaatacacaaaattagccgggcgtggtggtgggcacctgtagtcccagctactcaggaggctgaggaaggagaatggcatgaacccgggaggcggagcttgcagtgagccgagatcgcgccactgcactccagcctgggcgacagagcgagactctgtctcgaaaaaaaaaagactgcatgtatttccttctcggttacgacagttagaacacatccctttctcctgtggacggggaccttgacctgaacctgcgtgtatttccttcttggttacgacagaacacatccctttctcctgtagatggggaccttgacctgaacgggcagttgttggtcgcacaaccgcgtagaaatgcccaaaccgtccacgaggacgtcagagcagcggctgggaagccagacaagatggaggagacgctgacatgcatcatctgccaggacctgctgcacgactgcgtgaggtgcgaccgtgttcacccttggctcacggaacatggcactgcaggttcttcgtcccgtgtggggcagggctgggcatgagacaagcctgcaggtcctgtttggcctggcatctgctgaggttactctgtcacccagataagtgggtggagtgggtggagtgggtggagctttctcagcccactgcaacctctccctcccaggattgagcggttctctgacctcagccttctgagttgctgggactacaggtgcacaccactatgcctggctgactttttttttttttttaatgttctaaatattttttattcctttttttttttttttttttttttttttttagatggagtctcgctctgtcaccaggctggagtgcagtggcacagtcttggctcactacaacctcagcctcccgggttcagacgattctcctacctcagcttcctgagcagctgggactgcaggcgtgtgccaccatgcccggctaatttttttgtattttttagtagagacagggtttcaccatgttggccaggctagtcttgaactcctgacttcaggtgatctgcccacgtttgcctcctaaagtgctgggattataggcgtgagccactactcccagccaccctgctgatttttgtgttttttgtagagacggtttcgccatgtagcccggggtggttttttgtttttgtttttgttttttggagttagagtctcgctctgtcacccaggctggagtgtagtggtgtgatcttggctcactgcaacctccacctcccaggttcaagtgattctcctgcctcagcctcccaagtagctgggactacaggcatgcgtcaccacatctggctaatttttttgtatttttagtagagacgggagtttcaccatattagccaggctggtctcgaactcctgcactcaggtaatctgcccaccttggcctcccaaagtgttgggattacagacgtgagccaccccgcatggctaccactttcattctactcgtggcaccaacaaggaggaaacctggaacccagagccggaggctgtagaccccacaagttttgagtgtgtgggtcgtgtgtgaccccgtgaactctgcaaacagatgaaaggaactctgcacattttaaatgctccttatctgggaaggtgtatttcgcatagaatgaacgtaggagccgctgaggaagggcctccttgcttttccgcgggaactcaagagtgacaaccttccaacttctgggccagaaacacttgctgtctctgttgtttgtgttcctgaagtcataatctactcgcctctgtctttcctgaaaacacagaggccgtgtggcctctgatttcttttcattaaccaagactgacttaaagggtttttaggttgaacgatggctgggcccctgtaggcccttccgtggtggggctgctgcggaccttggtcgagggtcgcggttgcatctgtgggactgtctggacactgttcctcttgcactttcagtttgcagccctgcatgcacacgttctgcgcggcttgctactcgggctggatggagcgctcgtccctgtgtcctacctgccgctgtcccgtggagcggatctgtaaaaaccacatcctcaacaacctcgtggaagcatacctcatccagcatccaggcaagtgagggcatccacaccagcacccgggcacgtgagggcggtccctccaccaccacccaggcacgtgagggcatccacccagcagcacccgggcacgtgagggctgtccctccaccagcacccgggcacgtgagggtggtccctccaccagcacccgggcacgtgagggcatccacaccagcacccaggcacgtgagggcggtccctccaccaccacctgggcacgtgagggcatccacccagcagcacccgggcacgtgagggctgtccctccaccagcacccgggcacgtgagggctgtccctccaccagcacccgggcacgtgagggtggtccctccaccagcacccgggcacgtgagggtggtccctccaccagcacccaggcacgtgagggcatccacaccagcacccgggcacgtgagggtggtccctccaccagcacctgggcaagcgagggtggtccctccaccagcacccagacaagtgagggcggtccctccaccagcacccaggcaagtgagggcatccacacaccagcacccaggcatgtgagggcggtccctccaccagcacccgggcacgtgagggcatccacaccagcacctgggcacgtgagggcagtccctccaccagcacccgggcacgtgagggcggtccgcccagacccctccttccgcagcactgcgcacgcgagctcccagcagtgtgagctgtgtctgcctgccatgtctcactgccggtgaatggcgctgtgtcctttcaattctagacaagagtcgcagtgaagaagatgtgcaaagtatggatgccagaaataaaatcactcaagacatgctgcagcccaaagtcaggcggtctttttctgatgaagaagggagttcagaggacctgctggagctgtcagacgttgacagtgagtcctcagacattaggtaaatcatgcccctggctcagagcagagtgtgtgagccagaggagcatcacaaccgtgaccgagagctcactactgggtggacagcatgggtcctgagatctagttctgccctgagcagccaagctcttaaatggcttgagcttgttttctgatattggatagtattagcacctcccctgagaggcgtggcagggactgggtgaacacttagcggggtagccagggggtagccagcagagcgtcagccgcaggcgactgctgtagacatttgcaccctcggctgacacccttccctttgcttcgactcgtcatgggtgtggcatctctggctgtgacagagggacatcattccatgttattttttcccacatgagcacatgtattctttgtagttgatctagcgactataaagtcctatagtataaattgcaatgtttatcatttgtcaggacgttattacagaagaggcaccatcaccaggccaagacaatcccagcctcagagaccttatttatctgctgacatgttgaggtttcctaatgcacaagaccggggtctgaatgttgggtcgaggccatgatatttaaaaagacaatgaacgacaaaaaaaaacacttgaaacttttatctttatttccttttgccaagtttagcatgtgactgttaagcaaaaagaaggaaaccaaaaccactttagcattaagattttgctgcctctacccagccattcatacgtgtgtcataatcgttaacaaaatgaaatgtaatgtactaacaaattttttttttcttttttttttgagatggagtgtcgctctgctgccaggctggagtgcagtgacacgatctcagctcactgaaatcaccacctcctgggttcaagcgattctcctgcctcagcctctcgagtagctgggactacaggcgcatgccaccacacccagctaatttttttgtatttttagtagagatggggttttaccacattggccaggatggccttgatctcctgacctcgtgatccgccggcctcgacctcccaaagtgctgggattacaggcatgagccactgcgccctgccaatggcacaatcttggcgcattgcaacctccgcctcccgggttcaagcgattctcctgcctcagcctcccaaatagctgggattacaggcatgcaccaccaaacttggctaatttttttttcttttctttttttttttttttcgagacaaagtctcgctctgttgcccaggctggagtgcagtggcatgaccttcgcccactgcaacattcatctcctgggttcaagtgattctcccgtgttagcctcccgaggggctgggattacgggcatatgccaccacacccagctaatttttgtgtttttagtaaagacagagtttcaccatgttggccagactggtctcgaaatcctgacctcaagtgatccgtctgccttggcctctcaaagtgctgggattataggtgtgagccaccgcgcccggccgctaattttgtatttttagtagagacagggtttcaccatgttggccaggctggtcttgaactcctgacctcaggtgattagcccgcctcggcctcccaaagtgctgggattataggcgtgagaaacaaatttattttttgtttgtttgttttttgagatggagtttcgctctgttgcccaggctggagtgcagtggctggatcttggctcattgcaagctccgcctcccgagttcacgccattttcctgcctcagcctcccgagtagctgggactacaggctcccgataccatgcccggctaattttttgtatttttggtagagactgggtttcaccgtgttagtcaggatggtcttgaactcctgacctcgtgatccgcccgcctcagcctcccaaagtgctgggattacaggcatgagaaacaaatatttttatgaagctgggattcggctgcatgtacagctcggtaatgtccccagcgtttgaattgggaaacagttgctgctgtgcatttcttccatccgtatttgtgcacatgcgcagtgacgtcaatgtttagacgtgaagcagtcgagtcacagagtgtgactgggaattggaccttgatagacgtttgataagtttgttatccagacaccgatcggaaagggtgcacctaatgcactctacaaggtctgcatgagggcctctttttgccagtttagaaggagaagtaggtaatctcattttcatttacattttttccttatgaaaaaaatgtcttttcactgtgccttgttttttacctggttgggtcttacctgttggccttattggcccctggccttggtgtgaggcgcagaaaagcctttcaaatggagaggagagcctcgtgtattttttcctacaggttctttttttacagttgacatttttatctgctcgtttttggaagtacaagggaagtgtggaaaagacaagtgattcggggctttgcaggcgcctggtgtggctcccagtacgttgcccaccgcgctctgcttttaacgggagagtaggcgggtcctgaggagcacggggcgtgcgcgcacgtgctggcccttgccctgctctggcgtcgtctcctgggagcacacgtcagtggggacctagtgaccctggggatggggctccaaagcgtgggggctgagctggggatgcagagtggcgtgtccttgcccttcgactcgttctggtccctctctaacactggggtgctggacaggaatggggcccggcccttcccctcacaccaagcagctgagcgacggtggagctgagctgtgatggctgcggacccgcgttgcaccggccctacctgagaggcttggggcctgcacacagctcggccctgtgcttccttgcagccagccatacgtcgtgtgccggcagtgtcctgagtacagaaggcaggcggcgcagcctccccactgcccagcacccgagggcgagccaggagccccacaggccctgggggatgcaccctccacgtccgtcagcctgacgacaggtgagccgcgccgccctcaggcctcagccttcgcgtgagtcactttgtggctgtgcccggtgctgacgtgcacgtggccgcgctctgcccgcctcctgtctgcactgctcgccccctttgggccctggcctcattggtctccctgcactcacagttggttgcttttcgtgactgattttgggttgggaaatcagataagtaactgttcattcgtagcccctcctgaacactcctgggaattaacaaccctgaccttaatacttggcctctccccagccactgcctcagggcagctgatgtcccccagtgggtttgccagacccaaagtgatgatcgcatatctgtccctcaagtaagaggcgggcttctccccagcagtggcgatgtcaccagaagctgccctgcgtcaccagagttggcttaatgcgaaatgtttccccgtcaggtgcctttttccagcaaggggctccaggtgctatccaggaagtcagaggagagctgggcagggggtatggaggcttcacttctctgccctgctcactccagactcatagaatgggaagatgccctcaggggtcctggcttcctggccacgggtgggggctgagcacatcacgaggccactggcctgggatggatgtagagccacatccttgtgctgcattctcagtggcttcttgtagaacccgtggacggaacggacaaagcagtgcttggcgttggtatggatgcccatccaccagcctgggtttgcttccgccactcagcagctctgtctgggtcactggacaagctccttcctttgcatggtgggaccagcgcctccctctggggtcctgggtccctcagtgggtgctcagtgaacctgggtggtgaaattgccgtccttatggccggcatgttgacctcgcagggtctttcctgtgtgggtggcgagtgtccagggaacttggctgtgtgggctcagacttctgctgccacatcgattggtcttgtgcaccgtggctgtcctttgtttatttgagagatggctgttctctcacctgagcggaaattgaacacacagcttgttttattctatatcataggttctatgggcttgtcctctctttataggaaataatagaaaaccttcaacagatcggccgggcacggtggctcatgcctgtaatcccagcactttgggaggccgaggcgggcggatcacaaggtcaagagattgagaccatcctggctaacatggtgaaaccctgtctctactaaaaatacaaaaaaaaaaaaaattagccaggcgtggcaggcacctgtagtcccagctactcgggaggctaaagcaggagaatggcgtgaacccgggaggcggagcttgcagtgagccgagatcacgccactgcagtccagcctgagcgacagagtgagactctgtctcaaaaaaaaaaagagaacttgcaacagatctttgaaatcttgctccagctgctaaatcaaagatcatttttggttattgttaatctgttttgactccccgagtttgggtggcagaaggtccccggtggtttagcagggcaggtctgcttcttccccggctgtctcaggtgcacctctcctcgctgtgcttcccggcggcctctctaacctgctgtctttctgccctgggtcccacgtgctccggctgaatgtgcgtgtgcttcagcagtccaggattacgtgtgccctctgcaaggaagccacgccctgtgcacctgctgcttccagcccatgcccgaccggagagcggagcgcgagcaggacccgcgtgtcgcccctcagcagtgtgagtgcccgcgccaccgcacgcaggcgggttcctatctgtccttcaggggtcaggtttcaaagcggtgttggccttagggtaacctgtgaagtaaggatgccgtttctttttttccatcagtgtgatcagttttccccacgtcaccatattgaataatctatcttttcccaccatctagtaacattgccccttcacaggctacatctccatccaccgggggctcggcttggatctgtgtctatcccctgccagcactgtggttgctttataatgtgtcactgttaaacctcttatatgaatgttgatgctttagtatacaactctggccaggcacagtggctcacgtctgtaatcccagcactttgggaggccaaggtaggtggatcttctgtgtccaggagtttcagaccagcctgggcaatatggtgaaaccccatctctacaaaaaatacaaacattagccagacatgatggtgtacacctgtaatcccagctactcgggaggctgaggccaaaggatggcttgagtccgagaggaggaggttgcagtgagctgagatcgtgccactgtactccagccttggcgacagagggaaatcctgtctcaaaacaaaacatatatatatatatatatatatatatatatatatgcacacacatacagttattattaaaaatggagcttgtcctttatttcatggctgttttaatgtattcctgcagaaatgtctgtctatgtcctttgccttttttttatgacttcctaatttgtcagagcttcttatatgtgaaagtgttaggtgaagaaagccctagccctgttgagcaccgcggttggctcctgccgcacacaccggtgttgctctgtgcactgagccctgtgtgagcagcacacaggaccacagcactggttctgtctggaatggcttaaaaatgttctgggcactcaggaaaccaaacaggttactgctggggtctgtaccctgagactgggcttggcaggggtggggcctagcctgcagcgtcgggacacatggccgtgggacacacccggtgatctgggcggtcgctgcctcgggggtcatccacggcaggcgctggccactgctgatgctgcacgtgggagggcaggtgagaagccacagagaacagcttgtcccatgtctcacacacgcggtggtcagcagatggcagctcggcccagcttttccccaggaatccaaactcttcactctaatttcacagagcatgcttcgtatatagaggcattggtgaagtggtcgtaggcgttataagacttaaggactcaatcctgtgagaattttagcgagggtttacctaacattatattttagggatttccattgtatagaatatcagacaattaaaaataatttcctttgggaggctgaggtgggtggatcacgaggttagaagatcaagaccatcctggctaacatggtgaaatcccatctctactaaaattacaaaaaattagccgtgtatggtggcgggcgcctgtagttccagctacttgggaggctgaggcaggagaatggcgtgaacccgggaggcagaggttgcagtgagccgagatggcgccagtgcactccagcctgggtgacagagcaagactctgtctaaaataaataaataaataaataaataacgtctacaaagccaaggtgacaacatggaaaaatacctaggtagaaaaaggccacctaggctgggcatgggctcacgcctgtaatcccagcactttgggaggccaaggcaggcggatgacctgaggtcaggagtttgagaccagcctgaccaacgcggtgagaccccatctttactaaaaatgaaaaaattggccagttgtgggcatctgtaatcccagctactggggaggctgaggcaggagaatcgcttgaacccaggaggcggaggttgcagtgagccgagattgctccactatactccagcctaggccacagagcaagactctgtctcaaaaaaaaaaaaaagccacctgaatatgtgcagttgggggcaagcatgttgcatgttcagagctagaatgaagcccatcgaagccgtgttagggtggtggagcaggtgagatttctttcttttgtgtctctcactgttttcctgggatgagcatgtggtgttcagtttaagaaacgatgtgggtctgaggccgggtgcagtgcatcacgcctgtaaatgttcagtttaagaaacgatacgggtctgaggccgggtgcagtgcatcacgcctgtaaatgttcagtttaagaaacgatacgggtctgaggccgggtgcagtgcatcacgcctgtaaatgttcagtttaagaaacgatgtgggtctgaggccgggcgcagtgcatcatgcctgtaatcctagcgctttgagaggctgaggtgggaggatcccttgaagccaggagtttgaaaccatcctgggcaacatggtgagaccctgtctctacaaaaataaaaaataaattagccgggcctggtggtgtgcacctgtagtcctagctactcaggaggctgaggtgggtggatcccttgaacccaggaggcggaggttgcagtgagctgtgattgttcccctgtactccagcctgggccacagagcgagactccatctctaaaaaataacaaaccagaaaatgtgagcctcgccttttttcagggatacaactcctcgccatcacagtccatcacaacctgggtggcgttagctggatgtggccccgccccgatttccatgagacccctcctgaacaatgtttccagaaagagttgagctcctgagcctggtgctgacgaattgtgttggagacagccctcagcgctgagtgcgtgtaacgagtgtcctctctccacaggtgcggtctgcctgcagcctttctgccacctgtactggggctgcacccggaccggctgctacggctgcctggccccgttttgtggtaatactggctcttcaggccccagttgctttgacctttgcatgttctcttggtgaacttgagggcaggggatggtggggtccatagcctgatgtttatagggatgaggccactgttggtcatcaaatgatacctattcctggctggactgcagaggtgtgtcaaattcgtgttagctcaaaatcaagccttaacagaattattaggggagatactcccaggacagaatccttgcagcggggttctgctgttacgataccaagaccaggtgctggggagactcggagagctgatctttttaaggagggagtggaatggaaatcatttctgcttgtcctctgtttaaaattgagttttatcattgaacttcttattctttctagaatctgtaatgaaaagaaatatgtttatcctcagtgtcgggcagacagtgctttcctgcgacatcattataaacaggtaacattgccccttcatctcggcagagctcaacctgggtgacaagtgtctggacggcgtgctgaacaacaacagctacgagtcagacatcctgaaggtaccgactcgctgcgggctggggagccgggagccacattttctccctagtgcagccagctggttctctgcattctattggtgtttatctgttttacctgacccgctgcgggttggggagccgggagccatgtttcctcactggtgcagccagctggttctctgcatgccattggtgtttgtctgttttttccgtattccaaaaataggtatttcgtttttgtgcctcctgccaccaattcgtaggagccgcttcccgcagctcttgttcccggcagctcttgttcccacagctctcggtgagggcttcttgaaggtgccgccctttagcaagaccagggccttttctctggtccctgtctcttctggccatttgccttcccacgtctaggaagctacctcggtttctaggatttacatatgtttaacatgcgcattcgccctcctgccgagcactttgctgacagcacacacaatggtggggccttgaggcttgccacagacacacctggcaggcgcccgctcagccccacactctgctttgatgcccacagaaggagctcaacagctcgtgtgtgtttgaagggcacagagaacagatgccaagtcctcagcttttcttgtgcaacagcctgggctcgttgctgggctgtgtgcactgtggcctggctttcatgtctcattcacacctgggctgtgtaggtcttggcagaacttttgagagactctggtaactgttacactggaaccttttgggacttccaggaggctcttggacaagacttctcgtgctgcaggccgtgaacgtgcagccctctgcaaatgccacttataagggtctgagctttggctttgcacactttcaggggccttttatgaaatgttttctctcgttatttcagtgtttcttcctctaaacgagtatttcttattcctctctttttttgcgtcacagaattacctggcaaccagaggtttgacatggaaaaacatgttgaccgagagcctcgtggctctccagcggggagtgtttctgctgtctggtgagttcttctgttgcctcctgctctaaggcgcatgtgagtgtccagggctgtgcctgcgtgtctgctctcccagtgacaactccgaccttcacccaccctggaagagaggaaaaagatcctgatgctttcaggttgtttttgtttgtttgtttgttttttgagatggagtctcgctcttgttgcccagactggagtgcagtggcatgatctcagctcaaggccccctcggcctcctgggttcaagcgattctcctgcatcaacctcctgagtagctgggattacaggcatgtgccaccacacccagctaattttgtatttttagtaaagatggggtttccccatgttggccagcctggtcttgaacttctgacttcaggtgatctgcccacctcagcttcccaaagtgctggaattacaggcgtgagccactatgcccggccttcaggttgttttttgaaagttgagcgtgggccgggtgtggtggctcacgcctgtaatcccagcactttgggaggctgaggcgggcggatcatgaggtcaagagattgagaccatcctggctaacacggtaaaaccctgtctctactaaaaaaagaaaaatacaaaaaattagccgggcgtggtggcgggcgcctgtagtcccagctactcgggaggctgaggaaggagaatggcgtgaacccgggaggcggagcttgcagtgagccaaaatcacgccactgcactccagcctgggggacagagcgagactccgtctcaaaaaaaaaaaaaaaaagacagttaagcatgaacctgtatgacatattccagcagcttctatccttgtaggggagggtgggtgtggccgactgccactactgctgcttgagaccctcactacagcagttactgctgttactgcttgagaccatcattacaggactgaacaaagggacaaacgtagaaatgaaaacaaaaagacaaaagaaacttttaaggaaaggcaacatggggaagaagaggagagctccctgcttctagtgagtaaaggctgcccctgagcttctacagcccttcatatttattgggtaacaagagcaaggaggaggtaacaactgggcagctgctaaattgatcacaggttcatactgttactgacaggcttcaattatgcctaatcataagaaacatttgtgtggcctccaacaggtggggccagcttggagggtctctaccacttgtctatccagaggtcctggggtcagttgtcctgggaccctcggggacttggtgaatctcttgcttgatgtgtcagtcacttggtgagggtcactcctctccaggggggcacacgatgctttgtggagtatgataatttatcactaagggaggctgtagaaatatatatatgagacaggttcttgctctgtcgcccaggctggagtgcaggggcatgatcacagctcactgcagcctcgacctcctgggctcaagagatcatctcacctcagcctcccaagtagctgggaccacaagcgtgtgctaccatgcctggctaatcttagtttttttatttttatttatttatttatttttttttttgagatggaatcttgctgtgtcacccaggctggagtgcaatggcacaatctcagctccctgcaagctccgcctcccaggttcaacaattgtcctgcctcagcctcctgagtagctgggattacaggcacccgccaacatgcccagctaattttttttttgtatttttagtagaggtgaggtttcaccatcttggttaggctggtctcgaactcctgaccttgtgatccgcctgcctcggcctcccaaagtgctgggattacaggcgcgagccaccgtgcctggccgatatctttgttaattaagggtatagcacattttcatttgtgttgcaaatgtttccactatagtagtagttcacttttgttgtatttattttaattttgatgtttaaattgtagatagccaaatgtacaaatcctttcctctgtgcaatttggttttcaagacatacttagaaatagctaattttctcattttcttcttgttttttgggagttttaatatttaaattttatatccatgtggggccgggcgtggaggctcacgcctgtaatcccagcattttgggaagccgaggcgggcggatcatctgaggacaagagtttgagaccagcctggccaacatggtgaaaccccatctctactaaaaaagtataaacattagccgggcacggtggcacacacctgtagtcccagctactcgggaggctgagacaggagaatcagttgaacgcaggaggtggaggttgcagtgagctgagaccccgccactgcactctagcctgggcgacagagcaagacttggtctcaaaaaataaataaaataaatgttatatccacgtgggattgttttgctgtaagaaaataaattggtggccgggcgcagtggctcacgcctgtaatcccagcactttgggaggccgaggcgggtggatcacgaggtcaggagatcgagaccatcctggctaacacggtgaaacccagtctctactaaaaatacaaaaaattagcccggtgtggtggcgggcacctgtagtcccagctactcaggaggctgaggcaggagaatggcgtgaacccgggaggcggagcttgcagtgagccgagatcgcaccactgcactccagccagggcgacagagcgagactccgtctcaataaaaataaattcgtatctagattggctttgttcttattttcctaatgtgtcgcccgttgtcttcaccccatttatggtcagtgcgttagtctcccactgctgtgaagtccgtgcgctgctgttgggaagatggtgttgctgggtaactggctgtgtttcttccagattacagagtcacgggagacaccgttctgtgttactgctgtggcctgcgcagcttccgtgagctgacctatcagtatcggcagaacattcctgcttccgagttgccaggtaaggagcccccgacttcctcatggctctagttctgtctgggttggcttcttggcttctgcctctcttttttttttttgagacagtttcgctgtttttgcccaggctggagtgcagtggtgcaatctcggctcactgcaacctctgcctcctgagttcgagcaattcttctgccttagcctcctgagtagctgggattacaggcacccgccaccacgcccggctaattttttgtgttttagtagagacggggtttcaccatgttggccaggctggtctcgaactcttgacctcggcctcccaaagtgctaggattgcaggcatgagccaccacgctcggccagcactcttttctttacagacaccctgtttgcactttgctcaatgttctaagcagaatttggcctcagtcaggagccggcaggacgtcaggccatacagggctgtggttgttttaggccctgggtctatttgcagttactcatgagtgtaacgtgggtttctaaaacagatttgtaaagacatccaatagtcaactggggtaattttatttcctcaattgggtttttattttttaatttttatttatttatttatttttgagacagagtctgactctgtcgcccaggctgaagtgcagtggtgtgatcttggctcactgcaacttccctctcccaggttcaagcgattctcctgcctctgcctcccaaagtgctgggattacaggcatgaaccactgtacctgaccctcagttgggtttttagttaaacatgtgtttcctttcctgaaatctcagaacggtccgaggaaactagttatggagggaccagaggccgtgcgtttccaccgcagcgtctgtcgttgggtctctgctgggattcaggtagctgagtgggtgcgtgcaatacatctcatagatgcgtaccccttctctttttccagtggccgtaacatcccgtcctgactgctactggggccgtaactgccgcactcaggtgaaagctcaccacgccatgtgagtgcagctgggggcacaggcgtcagctacagagtgatgaatgagttaactgcctgcttataaataggctgatatggtcattatgcttctctcaggttgcatcctttaggaaccggtatcttcatttagaaatcctgctcttcctttatcccttcgtttcatgcagttttatctccgtcttccacttctgtgtcttcctggctggagtagctttatctgttgtctgaggcatccggggcacaccccatcatttcaggcttagccgtttctaagtcgaaggctgcagtcactgagggcctcaggcccccctcgcaaagcgctgcacagctgggttctcgtccgtcccgtgagcaggcatttgtgattgctgtcacatcgtcaccctcacgtggtgtctttcccgtgctccttaaaggaggttcacagcgccatctgcattgccctgggaggcgtaggtcaggaggcatctcttaggttaggtgatcacgtaaatcactcctgtggcccaaggagttcagattaaagtgatggagacagtgccctcaggacgagatgttgtgtggactcagagaaaggcgcctccctcacagggattttgtggaataaaaaccttgctttgtgtttgagcacaaacagcacatggaagagaccatgttgttacaaaaagagatttcactgttgactggcagacagttttcagtagaaatgtgcagccatgctggtcctccttgcccacagtctgtggagagggaaggtggccacaggccatccagcttggtgtgtctgcctcagccctgtcagcagatgccacggggatgcctgaggaggtgcagcttttattctcttctctaaaaaaattatctaagatgtttgcacttcttttttttttttttttttttgagatggagtctcgctctgtctgccaggctggagtatagaggtgtgatctcagctgattgcaaccctgcctcccaggttcaagcaattcttttgcctcagcctcccgagtagcagggactacaggtgctcgccaccacatcaggctaattttttaaatatttttagtagagatggggttttaccatgttggccaggctggtctcgaactcctgacctcaagtgatccgcccgcctcggcctcccaaagtgctagattacagacattagccactgtgcgtggccagatgtttgcacttctgtttcaaaatttttaaagggataaagaagtttacctttgggggttagtttctttgatattgtgagaagcacacacactctttctcaggtagctctttctgtgtatggtttccgaatgcgtttatttgaatgcctttctgatgctctgttgtgtaatttatttgattgcctctccaatgctctcttgtgtaatttggccattttctccctgcaggaaattcaatcatatctgtgaacagacaaggttcaaaaactaagcatccagaggccctgagcagctttcagcactggaggtgaagagagcgtgtttttaaaatacagagacaagcacgtcaaggtgttttcacagccccctgagggaagggacgcagggtctccgacaggtgctctggggtgactcttctgtggagctttaccctctgagtgagaccctccccagagccccgggggccgcagcccgccctcctggtgagcgctgggcagggctcgtggtggcatcagcagcagagacgaagcctttctgtaacatgcggccgtcccgccgagaggggcagttttgctcttttgtacattttccgaaactacagttaaagcagaagtctgtttttaggaaaagtttcaagggagaagggcaagtttatcaaaaacattgtttcaggagaagggagcataagtttacagcctacaggacgtacacaatatcctgctgctgggaaaaccacagcattttatctattttttattttaataggtttggtgcttatcttctaataagatttaaatgtcacaaactgtagcacaaataatataatttataatttacaaattgactaaaattgggtatagtatggtatttgaaagaataagcatatgcttctgtttattaaaaaaagaaaccttccaatgtccaaaactgctaaccctcgacgtggccgccaagttagtcgctccttgctaaccggtgagtgaccgcggccccgagcctggggctggacgcaggtcccaggacatgctgctcccttgtgtgagtgaccgcggccccgagcctggggctggacgcaggtcccaggacgtgctgctcccttgtgtgagtgaccacggccccaagcccagggctggaggcaggtcccaggacgcgccgctccctcatgctgcccgggcccttcctccaagaccctacagagcctgaggggcaccttggcttccgcctgtgctagctttgccatgtcatctggaataatacttgaaattttgatttttggaaaaaaaagttttttatcttttgttgaaatcacctgttatccttgtttgtaaactgataacttttttgcttcttctcaggaatacagttttcaactgttgtcttgctcttgatagaaactgagaagcagcaatctgtatttgtggaggaaagtcctctcttttgcatattctaataaatgagccgcgtttgctcctc

SEQ ID NO: 15518 - DNA, 31626 bp, Homo sapiens
actgcccggacccagccctggcccaatggggctcgcacctccaaagcccacgtccacacgttccgagcccgccgtcccatcgcaaacatccgggggccgccactgcgcctaacgaccgcccatctctgacgcctcgggtcggcgtttgatttttaacccaagaaaagagtaaaagtcaagcggaaatcaacgcagaagcggtgctgcagcctctgagcttcctgacggccgtgtccagagccgggctcctcctccggcggcagccgccgggctcacttcagtgcgctcagcttctcgcggggacaagcgtctgggcggggacggcccgaggcgggggtgtggcgaggctggagaacgctgaaagctggtgggcttgggaagacaaacgacgctctgaaatttggctcccaggtaatacgttccggcacttcgcggcggctcagtcagcgctgctgggttccacccctcctatgcgttgctcagggacaggtttcttagtgacaggcccctcactattcccattggccaggacgcccaaggcccacgcagccgttggctaaaattgttgtctgtttcagacacgttggcgaattccccgcctctacgttgccgggagacagcatgttgcctagcagcgtgcggctcccattgcctttgggcgcggctctccgccccgacccgcccctctgggacccatccgggtctgcgcctcagctagacagggcgggctgcggcgcgcagtcttaggcgtgcgcttcggggaaggggccctcgcgtgggaggagcgcgtctgcgagggatgcgccggcgcaggcgagacccggagccgcgtggtctctgcgcagtgcgtcgtgtggggcggccgaccccggcccgggtttccctgctcgttttcgtccgggcgggcgtcttggttcccgttccaggccagccccatcctaggtcgctgcttcatccagcgcttggggcatttgtgtcgttggcgttgttttcctcttaactacaaactttaaatgtgttcatctactcgtgacggcgagtttagcagactttcattcccagaagacgtgtcacacgatctgtatatttttcatacagaaattgacggacgtcgttacttctaaatttccacaggggctggttcatcccgcggctttacctagagaaaaacgtctgaggccgggcgcggcggctcccgcctgtaatcccaacactttgggaggccgaggcgggcgaatcacgaggtcaggagttcgagaccagactggccaacatggtgaaacctcgtctctactaaaaatacaaaaaaaaaaaaaaaaaaaaaaaaaaaaaaaaatagccgggcgtggcggcgcatgcctgtaatcccagctactcaggaggctgaggcaggagaatcgcttgaacccgagatggtgccactgcactccagcatgggcgatagagcgagactccgtctcaaaaaataataataaaataaaaaccatggacaatgggaggagaacatcacacaccggggcctgtcgggggtggggggccaggggagggatagcatcaggagaaatacgtaatgtagataactggttgatgggtgcagcaaaccaccatggcacgtgtatacctatgtaacaaacctgcaggttctgcacatgtaccccagaacttaaagtataattttaaaaagagagagagaagcgtctgagcgtttctcagggacggcgggtggcagccaggacgggctggggcggtgaagtgcggggcgggaagcgacgcgtgcgcctcctgcgctggcttctgtgaaaggagggactgattggagatcactgctgaaaagtggactacgcatcagtgaatagttagtgaaatatgagcttctacattcaaaaccatttgtgctttaaagattttgtttcaccatggtatcgtatttatctgaatcctatgttgcttttgctttgtaatctgaattgtctgtcactcccccagtctcagttttttgttaactgttcaatattcatagaaatgtctctacatgggaccctttaacagagagagtaatctgtcatagcaagtatttcctgagtagtttcactgattctatgtttttagcaggtcaatgttttcctggttagttttatgattttatctcaatttttaccagtttgtaaccagaactggagtattaatgagaagatatataattgtaagtaaatattctatttattagaagaataaatcaccctgacagtcaacaaataatctttttaaaatttttcattgatgtattgatttatttattagagggagagtctctgtcgcctcatctggagtgcagtggtgccatcatagctcacttcagcctcgaactcctgggctcaagtggtcctcccgccttagcctcccaagtagctgagactacaggcacgtgccactgcgtcaggctgatttttgtatttttattggagatgaggtctgcctaggttgcccaggctggtctcaaacgcctgggctcaagccatcctcccgcctcagcctcgcagagtgctgggattagaggcacgagccaccacactcggcaataataacaatctttttaatggatccactcaaacaaaatagaacctgctcaactaaaatttcctgtctatcctcaaataatattaaaaaccatcctatcttaatatgaattaccctaaaatctattattggcaaatataagttttcagtacatcagtgaatgctgaagttagttatattggggaaactggcttttgaaatatattttttaatcgattgtagatagcattgtgtgttcagaagctgtgatggaagtggcattctacaccggacatctgctgatacaatacacatctctatagaatctacttattataaggaccacttcatgtattatcattatgaaaatcatgatctgcgaaaataggaagaaaattaaagctagaaatgtatgtgatttaatctctctgttttggctggcctcaattctgcagcttcctaacacgtttgaagcaagggtccttgcctgtgattgtattattaatacattctatgtaagcttagtttaaatgatattgttccagccaggcgtggtggcacctatagtaacagctactcaggaggctgaggtgggaggatcccttgatcctaggaattcgaggcttcagtgagctataatggtgccagtgcactccagcctgggtgacagcaacaccctgaaaaaaaattaaaaataagataaaatgatattgttcatgtgaaagaatgcccattcttttgcaaagatagtgctcttttggtagcttttagaagttttggatttggaagttgagttcttcaagttcattattattcagggttgtatttacaattctaggtttacaaacagtttgtcaacatctacgaaattaattgcggggatttttgtcggagcggcaccaactctacagttgggaagaattgacatcttagcaatattgtgactacaataatgaaaaaggagtatgctccggttatgttttccttttttttctctctttctctctctttcttttccgtccctcctttccttccttccttccctccctccctcccttaagatagagtctccctctgttcccccggctggagtgcagtggccccatcatggctcactgcaacctccctctccagggctcaagccatccttccatctcagcctcccgagtagccgggactacagccgcacaccaccaagccagtctaatttttgtatttttagtaacgacagggcttggccatatttcccaggctcctctggactcctgacctcaggcgagccctctgtgctccggaccttccggagtgctgggattacaggtgtgagccactgcgccggcctacgttttcttttaatagtgtttcatagttttctggatacagatggtttcatattttgttagagcaaggatttcttggatttgttgtatccaaggatttctttttgttgttttattgcaaacggtaggcctttaaagttttccagtttcagttgactttaatatattggctttgtacttttgcttcttgttacctcccccactcctatcaagccacagaagaggaggctccaccgcacttttgatctccaaaattatagtttaggagatacggttcagaaaagagcggggaggcgcgcttctttcgctgatggggtgcgctcagctcctgcgctgcccctggtggccggcagggcgcgcccaaccctacgattgtggctcgtggcgcgcatgcgcattccgcccgcggcgtcgccacagggtgagggagcttggcttcctgagaagccacccaggagccccggcttggggatgacttgaggccgcgtcttcggtgaggaaaagcttcccagaggaactctgccggggaatctctagagtcattgtccttttttaaaaatgtttttataggccgggcgcggtggctctcgcctgtaatcccagcactttgggaggccgaggcgggtagatcatgaggtcaggatatccagaccagcctggccaacaaggtgaaatccagtctctactaaaaatacaaaaattagccgggcgtggtgccgcgcgcctgtaatcccagctactcaggaggctgaggcaggggaattgcttgaacctgggtggccgaggttgcagtgagccgagatcgtgccattgcactccagcctgggcaacttgagcaagactccgtctctaaataaataaataaataaataacgttttttcgctttttttttttttttctctgagacagagtctgtttctgtcgcccaggctggaggtggtttcggctcactgcaaccgccgcctcccgggttcaagcgattctcctgcctcagcctccagggtagctgggattacaggctcccgccaccacgcccagctaatttttgtatttgtagtagagatggggtttcaccatcttggccaggctggtcttgaactcctgaccttgtgatccatccgcctcggcctcccaaagtgctgagattacaggcatgagccgctgtgccccgccatgcgccgcattttctttctttctttctttttttttttttttttttgagacggagtctcgctctgttgcccaggctggagtgcagtggcgcgatctcagctcattgcaacctccacctcccgggttcacgccattctcctgtctcagcctctccagtagctgggactgcaggcgcccgccaccacgcccggctaattttttgtatttttagtagagacgggggtttcaccgtgtcagccaggatggtctcgatctcctgacctcatgatccgcccgcctgggcctcccaaagtactgggattacaggcgccgcattttcttatccattcatctgttgatggacatttaggttgcttccaaatcttggctgttgtgaacagtgctgcagcaaacatggcagtgcagacatctcttagacatgctgattccctttccggtatctagccatcagggattgctggagcttgtggtagctcaatttttagttttctgaggtacctccaaacagttctcggtagtggttgtactaatttacattccttccaaccgtgtatgagggttcccttttctccacgtccaccagagacactttccttaaattcataagcagagattccctcatgttctggaatgttcccatgcgttattctttactttctctggaaagtaaagatctcggagtgagatctgttttaggcatttcccttcacagaggggttggcagcgggaaacagagagcacctggtgtttccttaatcaggattgttctgggaggaaatccatgcaagtccagagaagtgcgtggcccaggtgagacttgcagagaacagtgttcgtgcctacagcttggggagtctgggagaaggaaaatgagcactcctgtggatgtgctttattcatttcttcctgtcttattttccctacagggttaaagtagttgtaaagaagaaagttttgcaaagtacatgtattaaaactcaaaacattaggccaggtgcagtggctcatgcctgtaatcccagcattttgggaggctgaggtgggcagatcacacggtcattagatcgagaccatcctggctaacacggtgaaaccccgtccctactaaaaatacaaaaattagccgggcgtggtggcacgcgcctgtagtcccagctactcgggaggctgaggcaggagaattgcttaaacccagaaggcagaggttgcagtcagccgagattgcgccattgcactccagcctgggcaacagagcaagactctgtctcaaaataaaaaataataaaatagaataaaaatcattatttccacttaaaatagttcatagcggctgggcacagtggctcacaccagtaatcccagcactttgggaggccaaggcaggcagatcacctgaggtcaggagttcaagaccagcctggccaacatggtgaaaccctgtctctactaaaaatacaaaaaaaagcagctgggtatggtggtgcatgccagtagtcccagctactagggaggctgaggcaggagaatcgcttgaacccgggaggcagaggttgcagtgatcccagatcccgccactgcactccagcctgggcaatagaatgagactccatctcaaaaaaaaaaaaaaagttcatatcaaaaggaaaatataggctgctctgcctgtggagtagctattcttttgtttctttacatctctaataaacttgctttcacttacaaaaaaaaaaaaaaaaaaaaaaggaaaatcctagcactctgggaagctgaggcaggcagatcacctaaggtcaggagttcgagaccagaatacaaaaattagccgggtgtggtggtgcatgcctgtaatcccagctactcaggaggctgagacaggagagttgcttgaaactgggaagcggaagaggttgcagtgagccgagatcatgccactgcactccagcctgggcaacagagcaagactccatctcaaaaaaaaaaaaaaaagggctgggcacggtggctcatgcctgtaatcccagcagtttgggaggccaaggcaggcagatcacctgaggtcaggagttcgagcccagcctggccaacatggagaaaccctgtctctactaaaaatataaaattaactgggtgtggtggcacatgcctgtaatccgagctactggggatgctaaggcaggagaatcgcttgaaccagggaggtggaggttgtggtgagccgagattgcgccactgcactccagcctgggcaacagtagcgaaactctgtctcaaaaaaaaaaaaaaagaaaatgtaaaaggtaattttacttttctggttttaatagaagcaaattcctcagtaatctttttttttttttttttgagacagagtctctcgctctgtacccaggctggagtgcagtggccgatctcggctcactgcagcctgcgcctcccgggttcaagcaattctcctgcctcagcctcccgagtagctaggactacaggagtgcgctgccacatctggctaatttttgtattttttagtagagacaaggtttcatcaggtcgggcaggatggtcttgatctcctgaccttgtgatctgcccatcccagcctcccaaagtgctgggattacaggcatgagccaccgcacccagcccatcagtaatcttttaaaaatgtacttattagctcacttcattttcacttaagagaatttccatgtttgataattttttatgactcactgactatctcaaaaggttttctgtggccaggtgtggtggctcacgcctgtaatcccagcactttgggaggccgagactagcggatcacctgaggtcaggagttggagaccagccgggccaagatggcaaaaccccatctctactaaatatacaaaaattagttgggcctggtggtgggcacctgtaatctcaggtactcaggaggctgaggcgggggagaattgcttgaaccctggagacagaggttgcagtgagccgagattgtgccactgcactccatcctaggtgacagagtgagactctgtctcaaaaacaaataaataaataaataaatgggttttttttgtttgttttttgagacagggtctcactctgttgcccaggctggagtccagtggtgctatcatggctcattgcagcctccacctcccgggctcaagcaatcctcccaccttagcctcctacattagcctccctagtacaggtgtgcatcaccacatccggctaattttttgtatttttggtggagacggggtttcaccatgttggccaggctggtctcgaactcctgagctcaggcaatccacccaccttggcttcccaaagtgatgggatgacaggcttgagctcccagccagctgctagttttgagtggggcccagaacaagtgaaggctctgcaacagatgcaggctgttgtgcaaggtgctctaccacttggtcacatgacccagcagatccaatggtgcttgacatgtcagtggcagagagcgatgctgggtggagccttggcaggcccgcataggagaatcacaatgtagacttttaggattttggtgcaaagccctgacattgtctgcagataattactcttctttttttttttttttttttttttgacttcaacgttttataacaatagagagtagctgaaaatactacatgctaacacagacaatatgatacacaacctcgggggacaagttggcagggagcacgtggcagaggccacaggtttagactaagagccttttgatggactgctgaatggattggatctgctgtttcagctgtgagccttctttgatggtgacagaacaggtgatgacaggcctggagaccccacaggctcttcccagggcctgcttggagcgcacaaatatgaagggcacgttcttgtcttcacacagcagtggaggtgcggaatgatctcctgtggctcggtgtctgcagccatcacgatgaactcagagatgcccctgttaagggttttggtggcctcgttggctcttttctgaagctgcttgtagttacacgactactgaatgaactccagtggtttcttggtgaggtgggcatcggcgaggggctaggccttcagattcacattggcctcagtcatggctgtggttccgtgagctcggcactcctagggccgcgcagccgaggtctgagaagcgctctcttccacccgtactcttcttttgacaaccagcttttggcttgctacaggacggtattagggactgaataattaagcatggcccaccaaattactgcatgacctgagctgctcatcacgaactcagtgttatctgaccccccaagccataaagtgaggcatacagagtagtactccatcatcacgcaatgacagtgcaaaactcacagaataccttacccaccgttgtggtgttagagaaacctgtttaccaggcctctggtttcataaaacatgaccagagtgactctatcttaaggtaagtagctaggcactcacaagacacctgtaaggttgctatggtctgaaaatagccacattctaagctgaccaccaattataattgcagaaatatttatggtcatacgggacatctcccaccaagcctgcagaatgtccagatgtcctaagagtgcagcccactttactcagagagaaccttaatgagcaggcttaggttgaaggattaatggtcactgatagcaccaatagccctaccttcagtgagcacatctgcacattccaggtttaattgtagctccttaagagtttcctgtacagcattcctcttcctgctttctgaggatgccttactctgtaacagagtagattctgataaacttgcttctttcacggtgctcagtgactcacctcaaattctttcctgtgtaagatctaagagccctttcttggagcctggactggaactcctctttttcctgtaacaatgacatcgcttctgatcgaagaacccacttcacagtaaatgaggtgcaccgtgggcccatgctcatggaattcatgggtcttgctgtgttctccatcatcctaccgattttggttctgtttttctggtggaactgactgagagaaacatatagtgaaaggtaagtcttcattaccccttgactttaagtccgtgtttcagaggaagccaccgccatttccttgtgtatccttctagagagattttcattttcataaacatatttgtatgtacacattattaattaaaagagtcaagctctacaaaatttgaagaggtttattctgagccaaaagtgagtgatcacggcccacggcacagtcccaagaggtcctaagaccctgtgcccatggtggtggggctacagcttggttttatactttttttttttttaaagacagagtctcactctgtcacccaggctggagtgcagtgacgcaatctcggctcactgcaacctctgcctcccgggttcaagcaattctctgcctcagcctcctgagtagctgagattacaggcacctgccaacaagcccgactaatttttttttgtatttttagtagacaaggggtttcaccatcttggccaggttggtcttgaactcctgacctcgtgatctttcactcgcgtccgtgtgaagagaccaccaaacaggctttgtgtgagcaataaagctttttaatcacctgggtgcaggcgggctgagtctgaaaagagggtcagcaaaggggagatggggtggggccgttttataagatttaagtaggtaaaggaaaattacagtcaaagggggttgttctctggcgggcaggggtaggggtcacaaggtgctcagtgagggagctttttgagccaggatgagccaggagaaggaatttcacaaggtaattgtcatcagttaaggcaaggaccggccattttcacttcttttgtagtggaatgtcatcagttaaggcaggaacaggccattttcacttcttttgtgattcttcagttacttcaggtcatctgggcatatacatgcaggtcacaggggatgtgatggcttagcttgggcccagaggcctgacattcctgccttcttatattaataagaaaaataacataaaatagtgttgaagtgttggggcagcgaaaaaaatttttttggggggctggcatggagagataatgggcgatgtttctcagggctgcttccagcgggattaggggtggcgtgggaacctagaatgggagaggtcaagttgaaggaggattttgtggtaaggggtgatattgtgggattgttagaaggagcatttgtcatatagaatgattggtgatggcctggatacggttttggatgaattgagaaactaaacggaagatacaatgtctgaataaaagaaggagaaaaatgggtattaaaggactaagaattgggaggacctaggacatccaattagagagtgcccaagggagttcagcgtaattacttgcttggttggcaagtttttgggccctatccttgagtttttttatgttgtcatacaccaggccagattaatttaggtaaaaacaacactcttcatttaaaaatatacagagtcctcctttttcagcattgagtaagtcaaggcctcagcgattttggaggacagctaaagagtcaacttgggcctggaggactgataaagtttgtgatatgtctgtgatgctagcagagaagtcattagagaggctacagaaggttgtgacagaggttgaaatgcctgctatcccagtactgagagcaatagtagaggcagaaagtcttaaaccgacaagcaagggaattagtggaataactcttttttgtcatgttggtgtcatgaggggaacaaggagctttttgctcctattggcaaattgaattttgggagtaaggaaaactaatgtgcatgtgcctgtccaattagcaggtagacacatgtaggtagaggatccacagaggaagaagggaccttgtgccaggcaaaattggagatgcaaagtaaaaagatgagaaggagtgctgaaaggggtgtcttgtacctacactcctagggatccagctagggcagcagccatcagaggttgtaatggggactggtggggtgactgcatagagggggacgttcgattttcatggtgtatgagaaaacgtctagtgtctatgagcaacctttcatgatggggtaactgcatagaggggaggatcgattttcatggtgtgtgagaaaacattgagtgtctacgagcaacctttcatgatggggtaactgcatagaggggaggatcgattttcatggtgtgtgagaaaacgttgagtgtctacgagcaacctttcatgatggggtaactgcgtagagggggaggttagactttcatggtgtatgagaaaacgtcgagtgtctacgagcaacctttcatgatggggtaactgcgtagagagggaggttcgattttcatggtgtatgaggaaacgctgagtgtctacaagcaacctttcatgatggggtaactgcgtagagggggaggttccattttcatggtgtgtgagaaaatgtcgagtgtctacgagcaacctttcatgatggggtaactgcgtagaggagaggatcgattttcatggtgtgtgagaaaacgtcaagtgtctacgagcaacctttcatgatggggtaactgcatagagggggaggttagactttcatgatgtatgagaaaatgtcgagtgtctatgagcaacctttcatgatgaggtaactgcgtagagagggaggttcgattttcatggtgtgcgagaaaacgtcgagtgtctacgagcaacctttcatgatgaggtaactgcgtcgaggggagggtcgattttcatggtgtgtgagaaaacgtcaagtgtctacgagcaacctttcatgatggggtaactgcatagagggggaggttagactttcatggtgtatgagaaaatgttgagtgtctatgggcaacctttcatgatggggtaactgcgtagagagggaggttcgattttcatggtgtatgaggaaatgctgagtgtctacgagcaacctttcatgatggggtaactgcgtagaggaggaggtttgattttcatggtgtatgaggaaacgctgagtgtctacaagcaacttttcatgatggggtaactgcgtagagggggaggttcgattttcatggtgtgcgagaaagcgttgcgtgtctacgagcaacctttcatgatgaggtaactgcgtagaggggagggtcgattttcatggtgtgtgagaagacatcaagtgtctacgagcaacctttcatgatggggtaactgcatagagggggaggttagactttcatggtatatgagaaaatgtcgagtgtctatgggcaacctttcatgatggggtaactgcgtagagagggaggttcgattttcatggtgtatgaggaaacgctgagtgtctacgagcaacctttcatgatggggtaactgcgtagagggggaggttcgattttcatggtgtgcgagaaaacgtcgcgtttctacgagcaacctttcatcatgaggtaactgcgtagaggggagggtcgattttcatggtgtgtgagcaaatgtcaagtgtctacgagcaacctttcatgatggggtaactgcatagagggggaggttagactttcatggtgtatgagaaaatgtcgagtgtctatgagcaacctttcatgatggggtaactgcgtagagggggaggttcgattttcatggtgtatgaggaaacgctgagtgtctacgagcaacctttcatgatggggtaactgcgtagagggggaggttcgattttcatggtgtatgaggaaacgctgagtgtctacgagcaacctttcatgatggggtaactgcgtagagggggaggttcgattttcatggtgtgcgagaaaacgtcgcgtttctacgagcaacctttcatcatgaggtaactgcgtagaggggagggtcgattttcatggtgtgtgagcaaatgtcaagtgtctacgagcaacctttcatgatggggtaactgcatagagggggaggttcgattttcatggtgtatgagaaaacgtcaagtatctacgagcaacctttcactattatttatgggtctgggtataagtaaacaagaagagggcctgggaggagagcctgatgagcaaggggaaggtagccaaggatggagtgaaatgcagggtaagtgtcttcttaagcaataattactactaatatttttaagtttgtcagtattgatagagggcttatctgtaatatggagctggaaggcttcaattgtttcagtgatgtgtgtagttgggctttggagatgaagaataaaggaacatcgagaaggtgaaaggttacctaggggaattccagtgggtctttgctgagagatacataaaggagcggccttgagcagagtttttattaaagaggcattaatgatggaggaactttgcgtagtgaggaaacctctttcagcctatataacagcatggtggtgcagaatatggaaggcatatttagagtcagtataaatattgacatgtagtccttttgcaagagtgagggcgccgggtgtggtggctcacacctgtaatcccagcactttgggaggctgagacgggcagatcacctgagtttgggagttcaagaccagcctgaccaacatggagaaaccctgtctctactacaaatacaaaattagccgggcgtggtggtgcatgcctgtcatcccagctacttgggaggctgaggcaaaagaattgcttgaacccaggaggcagaggttgcagtgagccgagattgcgccattgcactccagcctgggcaataagagcgaaactccatctcaaaaaaaaaaaaaaaaaaaaaaaaaaaagagtgagggactgagttaaggcaactagttcagcttcctgagaggtagtggagggaggcagagtggtagcctcaatgatagatgtggaagatactatagcatagcctgcctttgctagtgagtggcaattaggcctggtggaactgccatcaataaaccaaatgtgatcagggtgaggaacaggaaagaaggaaatatggggtgaatgtcaggtggatcagagagatacagtcatgagggtcaggtgtggtatccggaataatgtgggaggccgaattgaagtctgggccaggagcaatggtaattgtgggagactaaaggaagagtgagtatagctgaaggagccagggagcagaaattatatgtatcaggtgtgaggaagaaaatagattttggaagttatgagagctgcagagagtgagtggagcatagtttgtgatttttgagggcctctgaaagtattagggcggcagcagccactgcatggagacatgatggccagcctaaaacagtaaagtcaagttgtttggccaaaaggctacaggatgcaatcctggtccttgtgtaacaattctgactgcacagctctgcacttcggctgtgtgtaatgaaaagggttgggatgaatcagggagagctagtgggggcagtctctaaaactgtctttaaggaaaggaaagaggagtggggaaaggatttaggatctatggggtcagctaggtttccttttgtgagtttatatgatggttttgttaggatggcaaaaccatgtatccaaagttgaacgtatctaaccatgcctaggaaggaaaggagttgttttgtagacggtgttggggtttgagatatcagttggacatgatcagcagggagagcacgtgtgtctttatgaagaattatcatgaggtaggtaacagatgaagaaatttgagctttggagggggatacctgatatcctttggagaataaatgttgaaggagcaggagggtgtcttgttgagaatattcaaaggaggggctacaaagaagaaggtcatcaacatattgaataaggtgagaagcggaggggtggaaagaaagtaaatcatgagaaagagcttggctgaagtaatgagggctgtccccgaaaccttgcggcagcacagcccaggtaagctgctgggaccgatgggtgtcagggtcagtccaggtaaaagcaaagagaggctgggacgaggggtgcagcggaatagtgaaaaaagcatctttaagatcaagaacggaatagtgagttgtggaggaaggtattgaggacaaaagagtgtacggtggggcaccacgtggtgactaggcaaaacaatttggttgataaggcgcagatcctgaactaacctgtaagacttgtctggtttttggacggtaaaatgggggaattgtaaggagagtttataggttttagaagcccatgctgtagcaggcgagtggtaacaggctttaatccttttaaagcatgccacgggatgggatattggcattgagcggggtaaggttgattaggttttaaggggatagtaatgggcatgtgatcggttgccagggagggagtagaggtgtcctatatttgtgggttaaggtggggggatacgagaggaagacgcaaagcaggccttgggttgggaagaagggcggcaatgagatatggctgtagtccaggaatagtcagggaagcagataatttggttaaaatgtctcggcctaataagggaactgggcaagtggggataactaaaaaagagtgcataaaagaatgttgtccaagttggcaccagagtgggggagttttgaggggttttgaagcttggccgtcaacacccacaacagttataggggcaagggaaacaggcccttgaaaagaaggtaacgtggagtgggtagcccccgtatcgattaaacaggggatggacttacccgccactgtgagagttacccgaagctcagcatccatgatggtccagggggcttccagggtgatcaggcagcgtcagtcttcagccgctaagccaagcagatcttggaaggagtcagtcagagagtcttgggctagagctttaggggctctaggggtggctgccaggcgagctgggcagtctgatttccagtgggtccctgcacagatgggacacggcttgggaggaatcccaggctatgggcattccttggctcagtggccagatttctggcacttgaagcaagatcctgatggaggaagtcttgtaagaatgcttgactgctgtggcttaggtgtgtgcggcttaggcattttgaatttcttgtgtgctggaggtgtggctgggttttgtcttacagcagaggcaagtaattgtaactcagaaatgcgttgccgtctggctgcctcctctctattattgtacaccttgaaggcaaggttgattcattcctattgtggggtttgagggccagattctaatttttgaagttttttcctaatgtcaggagtggattggatgataaaatgcatattaagaataaggcggccttctggcccttctgggtctagggcggtaaagtgtctgagtgttgctgctaagcaggccatgaactgggcttggttttcgtctttaccttgggtagtttctttaagcttgtcataattaacaggtttgtaagctgcctttttaagcccttcaactaggcaggaaatcatgtaatcttgcctagctgtacctggggaatctgcctgatagttccattggggatcctctcggggaactgctctgatgccttcctggaggtatggctcgtgaagccggtggttatcagcgtgagattgggctagagaaaaaactctttcccgttcatctggggagagggtagaagtcaggatgacatttaggtcactccaggttaacttgtaggacaaagttagatatcggaattcctgtatatgtttagtggggtctgatgagaaagagcctaaatgttgactgatctgagagaggtctgatagagaaaaaggcacatgtaccctgactatgccttcagctccagccacctctctaagaggaaattgttgggcaggtggggaagagctagtcaaggaactaaactgtaagccggaccgggtgtgaggaggggaggtgacagaaagattatagggtggaggagcggaggctgaggaagaattgggacttagcttggcctggcgacgagcagcctggggaggaggggagaggtcagatgggtctgtagaaaaggaagactggaaagactcagcgacgcttggggttgggactgagggaacaggcaggagggagagaaggaggatttgggaggaatcgcattgggaacagagactagggagggaacgaagtgtgaaaaatgcctggatgtaaagcacctcagatcatttgcctattttttgacaaaaattatttaggtcttgtagaatggagaagttgaaagtgccgttttctggctatttagagccattgtcaagtttgtattggggccaagcggtgttgcagaagaaaacaaggcgtttaggttttaggtcaggtgtgagttgaagaggttttaagtttttgagaacacaggctaatggagaagagggaggaatggagggtggaagtttgcccatagtgaaggaggcaagcccagagaaaagagagggtagagacatggagagaagggggtggggggtgcttgccacccaggaaagtgaagaaggggtagagacacggagagaaggggttggggggttcttgccccccaaaaaagcattacttgccactaagggtgaaggaccaaggcaggcgtccctgcatggtcagacacctctgaaacgtgggtgaataatcaggcaggcgtccctgcgcgattaaacaccaagggaagactgtcttcccgagtccatgaccggcgccggaattttgggttcatggataaaacgcgtctcctttgtctctaccagaaaaggaaaggaactgaaattaagagtagggagagattaaagtgtggcaccaagattgaaaggagaaagaggttgaaggatagtgagagaggtgggagaagagagtgaaaagaggccattacccgatttaaaattggtgagatgttccttgggctggttggtctgaggacctgaggtcgtaggtggatctttctcacggagcaaagagtaggacaggggattgatctcccaagggaggtctcccgatccgagtcacggcaccaaatttcactcgcgtccatgtgaagagacgatcaaacaggctttgtgtgagcaataaagttttttactcacctgggtgtaggcgggctgagtccgaaaagagagtcagcaaagggcagataggggtagtggggccgttttataagatttaagtaggtaaacgaaaattacagtcaaaggggggttgttctctggtgggcaggggtgggggtcacaaggtgctcaatgagggagctttttgagccaggatgagccaggagaaggaatttcacaaggtaatgtcatcagttaaggcaaggaccggccattttcacttcttttgtagtggaatgtcatcagctaaggcaggaacaggccattttcacttcttttgtgattcttcagttacttcaggccatctaggcatatatatacatgcaggtcacaggggatgcgatggcttagcttaggttcagaggcctgacatgatccacctgcctcagcctcccaaactgctgggattacagacgtgagccactgcgcccagccggttttacaccttttagggagaaagttcatagatggattcaaagattttctgattggcacttggttgaaagagttgttattatctaaagacctggaatcaatagaaaggattgtctgggttaagctaagggagacaaagtttctattttgttattttttttttgacagggtctctgttgcccaggctggattgcagtggcacagactgtggtttaccgcagccttgtcctcccgggctcaaggaatctgcccacctcagcctcctgaatagctgggactataggcatgtgctgtcatcatgtccagctaagacggggtctccccatgttgcccaggatggtctgaattcctgggctcaagcgatccacccacctcggcctcccaaagtgctaggattacaggcttgagcaccaccactctggccattctaatgcagatgccgctccaggcagcaggcttcagagagaatagatggtaaacttttcttatcagagttaaaaaggtgccagagtcttacattctctcctggatcaggaaaagatgtggaaaaggaaggagattctctacaaagtagatttcccccaggagacagttttgcagggctacgtaaaactatgttaaataaatacatgtcagggtaaaatacttcgttttcttccagggcctgctatttgtcatgtgatgtatcttaatgctacagaccgtttggtcagccttaagttgtctgttttaacgtcgacgctggtcagttatacctgaattccaaagggaggacagtataatgggacatatccaaaccctgcttcccatcagggactgaactggtttttcagattaactttggcgttgagagactcagttcattcagttggttggggaggcttacaattttatttttggtttacaaggtatagataactatgcctatacctatatatacaaatgtttatatatgtatatatgtgtgtatatatggtttgttttacacaaatggatgcctactttatttattttggtagcgatgaggtctcaggctaatctcgaactcctgggctcgagatcctcctgcctaggccttccaaagcacttagattacaggcgtaagtcactgcgcccggtcctgcttcaccctcttaaaaccgcccttgggggctcctcatgagtgcagacattggcgcgttcctccaaaccgcacagactccccctgcgtggacgcgtctcgccgtctttactcctctttcgccgacctttcactttcagggaataccctctggcgcccttctctggagcacacacgtgaacgccgccggattccaagaagtgagatactgaggcaaaagttacgcgcgttcagaacaggaagaccccgcaaaacgccggccaagacgtggccccgcgtccaccctgcccacaagcagccgctcccactcgcggaccgcgccctgtgcctcagacttcggatctgtgtgatccactgtgtgcaactgtacccgaaagggtccccacgtgcactacctcgtgacaactaagatggaccgtcttctactcctaggagtcatccccagattagcggggctctcagaatccttggggcttccaatccggaagttccccgtcccttctgccccaacataacatggcgccgaccgcagccacttccgtgatccgcaggcgacgaagtcgcctggtcaggatcaaagatggccgagcgccctccacgcgcctactctcgcgggccactcccggctccgctttagctgccgctcttggtgagcgccgccgccagccaatcgcggggcgcagaggcctctggccccgccccgcggatcagctgagggagccgcaatgtctcttgacagcggcggcggcgcagccggttccgggttcggcgcggggcgggggtaagcgcggctggcgagggggctgcggcgggcggcgaagggggacctggttgcggccgtgggagggggcgcccgccggcgtccaggccgggctgcggggctgcgtgggcgcgggcggccgggccggggcccgcggggtggggcgggcgccgagtctcggcctctggggtcgggagtctccatgggcgtttccggggtctccgcagatgtgaatcccgatggagcggcccgaggaaggcaagcagtcgccgccgccgcagccctggggacggctcctgcgtctgggcgcggaggagggcgagccgcacgtcctcctgaggaagcgggagtggaccatcgggcggagacgaggtgcggggctgaggccggggccgggggccggggccgggcagagccaccgggttgcgggcaggccacacgggcggcggtgcagtgtgcgctccagatttttccgtggagtgaaatgtcatgtaagaactggtatttattcggtgttctgcccaccgattcttgcgcatgattcacgcacatcatttagccttcgttacaactgtataagttagttgtgttcatatactctccagaatgcaatattgtcacgttcgttgccgtacagagtatcttttctgactgtaatggaacgaaattaaaaataatagaaggaaaagtggaaaattcacagatatgtggacatgaaacaccacactcttaaagcaaccggtgggtcaaataagtctttacaacggggaccttgttttgagacaaatgaaacaaaaatagaatacaccaaaaggtatttaggatgcagccaaggcagtactcagagggaaatttatagctgtagtgcttatattaaaaaagatctcaagtcccagcccctagaatatttatttatttaataaacctggaaagctaaaaacttgaacaaagtcatacaacgggtgagagaaagttccctcagcctccacattcactgcctccagtctcccaagtgaccatctggttgtttgatttcctctgaagcctttgtatggggagagaaatgcgctggtcctgtcaacaaaaatgtttagtttgtctgaaaattaatgaattagctccgacattatactctaaaaaggagcgaggatgggaaatatttgctgtttggaagcaattttttttttttttttggttaatttcaccccttataatgtgcttgcacctggttttttttgtttttttgtttgtttttttgagataagagtcttgctctgtggcccagactggggtgcagtggtgtgatctcagctcactgcaccctctgcctcccggttcaagtgattctcccgcctcagcctcggagtagctgggactacaggcgtgcgccaccatgcctggctaatttttgtatttttagtagagatgagctttcgccatattgcccaggctggtcttgaacaactgaactaaagtgattcacctgcttcggcctccgaaagtgctgggattacaggtgtgaaccactgtgtctgacctggttttgttttttggggtgttttggtagtcttacattccagtatcaagtcaaagtttattttacaactttgaaagtatttagatatcatcataacatatcaaaattatccctttaagacaagaggaagtatttgaagatttttccctttgtctttacttgatagactaggaggtttggtgaagagcagaggccctagagacaaattatgtgggtttccaatctgtcaacacattactctgggctaacgacatctttctgcgcctatgtacctacttcatagatttgctctgaggagttaatgagatcatacacggactgcttagaaggaactttagcgttagcacttagcattagccattgttattgtaacatgttatacatgttattacatggtaggacattacatgttaagacaaggagagaaaatatgtcgttgagtttatcttttaataggaacgattttagtgaatttataaataatgttgccagcaaaaactttaagattattgtattagtttgttcatactaccatagcaaaatactacattctgggtggcttaagcaacagaaatttatttatttatttatttatttatttatttatttatatattttttgagacagagtctcactctatcacccaggctggagtgcagtggcgcgatctcggcccactgcaagctccacctcccgggttcttgccattcttctgcctcagcctcccgagtagctgggactacaggcgcccaccaccacgcctggcagtggtattttgtatttttagtagagacggggtttcaccatgttagccaggatggtctcaatctcctgacctcgtgatctgcctgcctcagcctcccaaagtgctgggattacaggcgtgagctatcgcgcccggccagaaatttattttttattttattttatttttttaatttttgagatagagtcctgctctgtcacccaggctggagtgcagtggcatgatctcggctcactgcaacttccctcttccaggttcaagcgattctcctgcctcagcctcccgagtagctgggactacaggcacgtaccaccacacctggcttatttttttctattttagtagagatggggtttcactgtgttgcccaggctggtctcgaactcctgagctccagcaatctgtctgcctcggcctctcaaagtgctaggattacaggtgtgagccactgtgcctggccagaaatttattttcatggttcaggaggctgggaagtccaagatcaaggtgttggcagattgggttcctggtgagggctctcttggcttgcaggtggccactttcttgctgtgtcctcacatggcagagagggggactctgcttgctctctctgcctcctcttaagagggcaccagccctgtgacatctgattcccacctagtgacctcatttaacatttatcagctcacaggccccatttccaaatacagtcacattggggattaggacttaaatatatgaattttaggggggtacagacactcagttacaaacattcagttcctaacagttgtagaacttgattattttatttatttattttatatatatatatgtatttttttttttgagacggagttttgctcttattgcccaggctgtagtgcagtggtgccttcttggctcaacctccaacctcccgggttcaagcaattctcctgcctcagcctcccgagtagctgggattacaagtatgtgctaccacgctcagctactttttgtatttttagtagagacggggtttctccatgttcgtcaggctggtcttgaactcctgacctcaggtgatccacccgcctcggcttcccaaagtgctgggattacaggcgtgagccactgtgcccggcctgatatatttattttttgagacggagtcttactctgtcacccaggctggagtgcagtggtgcgatcttcactcactacaacctgcatcttccaggttaaagtgattctcctgcctgagcctccagactagctgagatttcaggcgtgtgccaccacacctggctagttttttggtatttttagtagagatgaggttttaccatgttggtcaggctggtcttgaactcctggcctcaaatcaaatgatccacctgccttggcctcccaaagcgttgggattacagccatgagccacctcgcccagacagaacttgattattttaaagcaatgatgtgcctgccatttataaggcattatttgggggaaaagggaaagcctaggtaacgtgtaggaaggggtgcaacaaccttgttttcccaaagagctctttatccagtctggagtgcagtggcacgatctcggctcactgcaagctctgcctcttgggttcacaccattctcctgcctcaacctcccaagtagctgggactacaggcacccgccaccatgcccggctaattttttttgtatttttagtagagacagggtttcaccatgttagccaggatggtcttgatctcctgacctcatgatccacccgcctcggcctcccaaagtgctgggattagaggcgtgagccactgcgcccagtctttttttttttttttttgagacggagtttcactcctatttctcaggctggagtgcaatgatgtgatctcggctcactgcaacctccgcctcccaggttcaagtgattctccttcctcagcatccagagtagctgggattacaggcactcaccaccatgcttggctaatttttgtattttgtagagacagggtttcatcatgttggctaggctagtctctaagtcctgacctcaggtgatcctcccgcctcggcctcccaatgtgctgggattacaggtgtgatccaccgcgcccagccaagagctctttattctaagagagtggcagaaatgtacatcaactgcttgaaagatttaacccaccaagcgtcaagcgcagcaaatgctgtgaatagaactttagcacaaagcatctcggttccagattagaatgctgatattcaggccaggcacggtggctcatgcctgtaatcccagcagtttgggaggccaaaacaggaggatctcttgaccctatgagtttgagaccagctagggcaacatagaccctgtatctacaaaaacttaaaaaattagctgagcgtggtggtgcatattggtagtctcagctactcaggaggctgaagtgggaggatcacatgagcctgggagttcaaggctgcagtgagctgtgattgctccactgcaccacagctggggtaacagcgcaaggccttgtctcaaagaaaaaaaaaaaaacctgatgttctggcatggagacgcctctgttacaaactggctctggcgacaccgtgacttgcactggttttggggcttgaaggagactgtcctggcagttaacgctcaatggaatgggaagagcttgaccacaggtgatacttgccttggatacagtacttccaatagtacagaatgtttgcacaaataagatttttaatatccggtttcatggcagtatcatttacttgtagtaaaattcaccttttttggggttcagttccatgagttttgggaaatgtactcaccagtgcagtcaagatgtagaacatgttcgtcaccctgaaaggtccccctgagtcccggctcctggcagccactgatctggtttctttgccttctgctgcttccagcgtgtcgtgacacagggtcacagggtgtctgccatcatcttctgcgcctggcttctttccctggcacgcaccttgttgcatggatgagcagtttgctcctttctgttaccgggtagtgttctgtggtttggatgcaccatggcttgttagtttacaaccagtggatggacatttatactgcttcctgtttttgtaagaaataaagctaatataaacataagtgtgcagtctttgtagggacatacatttttctcttagctaagtaactatgaatggaattgctgggccacgtggccagtgtctgtttaacttgctgagaaactgccgcattgtttcccatgtgcttgtccattttgcagtcccacagcacagtacgagagttccaggttttccacttcccttttggccacttgtaggtggtcagtctttttttttttttttttttttgagacagcgtcttgccctgtcgccaggctggatttgcagtggcgcaatctcagctcactgcaacctccgcctcccgggttcaagccattctcttgcctcagcctcctgagtagctgggactacaggcacgtgccaccatgcccggctaatttttttgtatctttagtagagacggggtttcaccatgttggccaggatggtctcaatctcttgaccatgtgatccgcccgcctcggcctcccaaagtgctgggattacaggcgtgagccaccgtgcccggcccgtggtcagtattttcagccaattcttatttggtgtgtagtggtatttcatggttttaatttgcatttctctgaagattaatgatgttgagcattttgtcatgtgcttaatttgccatccatatctcttctttgataaagtgtttaaattgttttaagttgcattatttactttctatttattgagttatcagagttctctatacattctggatacaagatctttgtcagatatgtgttttacaaatatttccaccagtccatagcttgtcttttcatctttttaaacaatatctttgaagaacagatttttacttttttttttttttgagatggagtctcgctctgttgccaggctggagtgcagtggcacgatctcagctcactgcaacctccacctcccatgttctcccacctcagcctctcaagtagctgggattacaggtgcatgctaccatgcccggctaattttttgtatttttagtcgagatggggtctcatcctgttggccaggctggtctcgaagtcctggtctgaagtgatccgcccgccttggccacccaaagtgatgggattataggcgtgaaccaccgcccccagccttactttttttgttgttgttgagccagagtctcgctctgtcgcccaggctggagtgcagtggcgtgatctcggctcactgtaacctccgcttcctgggttcccaccattctcctgccttagcctcccgtgtagctgggattataggcgcccgccaccatgcctggctaagttttgtatttttagtagagactgggtttcaccatgttggtcaggctggtcttgaactcctgaccttgtgatccgcccgcctcggcctcccaacgtgctgagattacaggtgtgagccaccacgcctggcccagaattgactttttttttctttttttgagtcggagtcttgctctgttgcccaggctggagtgcagtggcaccatcttggctcactgcaagctccacctcctgggttcacgccattcttctgcctcagcctcctgagtagctgggactacaggcgcccgccatcacgcccagctaattttttgtagttttggtagagacgtggtttcaccatgttagccaggatggtctcgatctcctgaccttgtgatccgccccccccttggcctcccaaagtgctgggattacaggtgtgagccacggcacctggcccacattttacttttgacaaacctcagcttattattattattttttcctggtttgtgctttttatatcctatctgcgaagtccatgcaagacccaacggcactaagatttttgcctgtcttttccactggaagtttcatagttttagattttacatttgtctctgtctggccatccttacacagccacaatactgtattgtttactatagcatgatggtaagtcagttaagtaatatgagtcttccagcttcattctttttcaaaattgctttggtttttctacacgttttttctgtgaactttagaatcagcttgtcagtgtctacaagccctctgggattttgactggaattgcattgaatgtatgaaacaatctggaggacagctgacattttaacaatactgagtcttctgattcacacacccataggtcagtgatgggagcaaggctcaggctaaagcagattcagggtgtctttctgtgtggaacgtttaggaaaagtatgtttgcatgccactgtctcctgaccaaacccttcgcttttttgtcttctagtatctttatgtatccttatagattattataggcagtaatgattaatgatgagatattaaaacgcctttgttcttttgatttaaggagagggcaagtattgaggattttccctcttgcttttgtattcagggccgggcgctggtggctcacgcctgtaatcccagcactttgagaagccgaggcgggcatatcacgaggtcaagagatcgagaccatcctggccaacattgtgaaacctcatctctactaaaaatacaaaaattaactggccctggtggtgtgcgcctgtaatcccagctactcaggaggctgaggcaggagaatcgcttgaacccgggaggcagaggttgcagtgagctgagatcgtgccactgcactccagcctgggccacagaaagagactccgtctcaaaaaaaaaaaaagaaaaaaaaaatcccaaagtgtcagaattactgtattcagctatagatgcatccctgtatataagatgcagtttcttatacgtgtacaaatgcctatcgcaggccaggtgcggtggctcaagcctgtaatcccaacactttgggaggctgaggcgggtggatcaagaggtcaggagttcaagaccagcatggtgaaaccccgtctctactaaaaatacaaaaaattagctgggtatggtggcgcatgcctgtagtcccagctgctcaggaggctgaggcaggagaatggcttgaacctgggaggtggaggttgtggtgagccgagatggtgccactgcactccagcctgggcgacagtgcgagactccatctcaaaaaaaaaaaaacaaacaaaaacaaaaaaaaaaacaaatgcctatcacagttggctcagtcactttttctgtgactgtcattgcttcaattttatgttgatttatgaaacctaagtttacacagaaaagaaattaaggactaaattaagatactgaagaattacttaagcccctgagtttttttttttctttttttttttttgagacagagtcttgctctgtcacccaggctggagtgcagtggcgccatatcggctcactgcaagctcctcctcccgggttctcgccattctcctgcctcatcctcctgagtagctgggattacaaggcgcccgccaccacgcccggctaattttttgtatttttagtagagatggggtttcactgtgttagccaggatggtctcgatctcctgaccttgtgatctgcccgcctcggtgtgagccaccggacctagccaaccccctgagtttttttaaagttctaataatactcatcaggttagctgtgtatgcaagcatattgtaaaattgcttttttttttttttatttccagttggagtctagctctgtcgccaaggctggagtgcagtggcgcgatctcagctcactgcaacctctgcctcctgggttcatgcgattctcctgcctcagcctcccaagtagctgggattataggcaaccgccaccatgcccagctaatttttgtatttttagtagatatggggtttcactgtgttggccaggctggtctcgaactcctgacctcgtgatccattcacctcagcttctcaaagtgctgggtttacaagtatgagccactgcgcctggctgtaaaattgccatttaagaggctgtgtgtaactggaggtattgatgggtgtctttgagagggtggggattcagaaaggttcaggatgggccgggcgcggtggctcacgcctgtaatctcagcactttgggaggccaaggtgggcagatcatgaggtcaaaagatcgagaccatcctggctaacatggtgaaaccccgtctctactaaaaacacaaaaaattagccaggcgtgatggcgggcgcctgcagtcccagctactctggaggctgaggcaggagaatggtgtgaacctgggaggcggagcttgcagtgagccgagatggtgccactgcactccagcctgggcgacagagcgagactccgtctcaagaaaaaaaaaaaaatttctttatgtctttcttggtcaagtgtttttttttacatatgtacaatggggatcctgagttggaaccacatactttggtaaacaaagtgcagtagtgttcacagttaccacgatcatatcccgtgttgacccaccctctcttttttaggttgcgacctttccttccccagcaataaactggtctctggagatcactgtagaattgtagtggatgaaaaatcaggtcaggtgacactggaaga

SEQ ID NO: 15519 - DNA, 86581 bp, Homo sapiens
agttctgcgcgttcacgtccccgatcgggccgtgtccgccgcggccctgcgaggtccgaggggtaagggagcgtgcagcgggggcgggaccacgaggcggcggggctgggggcggcctctgtgtctgcgccggggatcgcggtgaccccgctgcggaccggctcgcggtgaccccagcgcgaacgagctggctgccggctggggcgagaaaggcctgcggaccggcctgggcgcatgcgcggaaggcgggcctcaggcgggggctctgggggcgcgcgggggtgggaggcagagggtggggtgggggctgtagggcgggcggcggcggggcgctgaatgtgggtgtcgggggagatttggggtcagctgggcgattcactgggggcctatggaggtcgctgtagacttggggtgcagcacgggcggggcaaggggacgcgaggttgcccttggccccaggggagaggggcccctgggaggccgtgtggaggatttgtctgcagcgattaggactctgctgatgaatgatttggatgcctttgggtgagcattggaggccagcggggtgaatgatgaggcttctgcgggggcctgcgttggagggcttaggggcttgcttgtgtgggttccattcactggaaagcctgccggctgtgacagtgttggatttcaccagagccctgtgctcctggaaaacagcgaaggttgaggaatttcccacccttttgggttccagcaaatggctcactgcaaagatctcccgttccctatatgactttggtcagcctccaggatgccccttgttcacacagacctgccacgttgccgtcgcttgcctcatcggtgactggctgaactccaccgagcggtcggagcaaaatgctccttaagcaaactttagctaagcttctttcctttccccattttcttgagctttggcccatccccagcctgagccaacacgcagcctcgcctgagaacaggctggctcagggtcaagctttccccgctctgctgtctggtcgcccgcacttccacctcgcttggccaggcctggtctttgctaaccttgttcacacctctctgtgaaagaaaaaccctttttgccttgcagagatgcacgtgagtctcgtggcttcacggttcttcccagaagcccgttctccttccccttcccaaccctcttccgcgtctttttttccccacttccaataaccctttggaaccgtctttctttgctctgtccagttgtatgttttatttgacagctgaataacagtggttgctctttcaacccctgtctccaatagcggaggcgagtatggggtggcctatgctggcgagtggctggggtttgtttctgtgcttgtgtttggggatcttatgatggaagcattaggaatggcgctgtgtatttgtgacaagggagtctggatgtaagttaatggtggacctgttgcaagttgtgagtgcgtggacaacgggggtcatacttggcgtcattggaggggcctgcgggatcggcatttgtgcagagccccacaatccctttccaggtggtgtttgggagggcctgtgggaatgtcagtgaatgctccagcatggagtggattagagaatggggtgtcatgggggcgaatgcttgggggccccggggataagggattagggatccctgggcattgagtgactggggtctaatttagggggtctgtggcgcaagcctcagaatgtcagttacaggggaggggctctgtgagcgcctgacttgggcacctgatgaagtgagtgaatggagaccagtgtgttcgtcccaggacagaagccccttctcctcccctccccacccttctcctcccctccctacccttctcctcccccatccttctcatcccctccccacctcacctgcaggagtgactgaagccccttctcccccgctccccacccttctcctcccctccccagctcatctgcaggagtatctgagttctgtggggatcctttgggactcagagtttggggtttcagtctgtggtgattcttaagtggggctttgggggtgctggtgattatggtgtctggcatctgtatttaaaagccctgtgggagtcactgaggtccagtcatcagttgggcctgtagggataactctgcctggcctgtgaggtctatggtgtgacgtaggaatggtaagtgtctgggggcctgtggaggattaggaataaagggtccagtgtacatcgttgaatgggggacagttttattggctcgtgccctggcattggctttgttatttgagggtgttggaaccaggtgagaaggagcttgtttgtattagtgaccgggtaccagagatgactgaatgactgatggggtgggcagtgaggtctgtgaggaggaatgatcggagggcttgggatcaatgccaagtatgcgtgcaagtgtctgtgatgggtgtgcgggtgggtgagggtgagaaattggggaccctgtgggtgtcagtgagagggaagcctggggagcctaagagtttgtttgccatttgcggtgaatgtggagttagaagttagtggccttagctgggcaccgtggctcacacctgtaatcccagcactttgggaggctgaggcaggcagatcaggaggtcaagagatccacaccatcctggccaacatggtgaaaccccgtctctactaaaaatacaaaaattagctgggcatggtggtgggcgcctgtaatcccacctactcaggaggctgaggcaggagaattgcttgaacccaggaggcagaggttgcagtgaaccgagattttgccactgcactccagcctgatgacagagtgagactccatcttaaaaaagataataataagttagtggcctttgggtatctgtgattagtggtctatactgtgccagtctgtggagtctgtggtcaggtgtttctggaggctgttgtggggccactagagttaccgcctggggtctttgttggatggtcactggggaacccatagtgtgtgtctctgaaggccctggaggggcggcctcttggggagagagactgggtggcctgtgaagtcagccattgtggtcctgtgggagtgatgggggcacatggggtgagtgagagtggggttgatggggttcggtggttgtgtggtctggaggtctgtgaagcaggcctattggattcagtgatctggggatgtcttgggatgtggacctggagaattctcaggtggtcactgtgagtgactgggggacttgggatgctggaggttggcaggggcttggagctgcggagttcagtggtttgtgtctggggtgtgtgtgtgatggaggccctctctgggacttggtaatccggggaacttggcagggccgtgttggtgggtctggaagcagatccgaatgtgaatgggtcgtgggttggctcaggcaagcctctcgtgagtgacaggtctttttgccctttggccctctccttgtagcttgtgaccgctgatcagtgatcactctttttacgtgattatttccttttttaaaagttctcagtgaccccgttggccttaaggtcttctccttgtagaatttcccccttgctgtttgtacctcctaggcctcttccatccctcctgatgacctccggctcccccacccaagacctttgcatctgaggtgcctggagtggtgtggtcggcccagccttccgtggcggactgctcctgcttcaggctcagctaaaagccacctcctcccacaagcctctacgacgtctgggaggaatatcttctgcccattcatcccttggtcacagttaaaatttcctttttttttttttttttttgagacagagtcgcccatgcttgagtgcagtggcgtgatctcagctcactgcaacctccatctcctgggttccagtgattcttccgcctcaacgcccccagtagctgggattacaggtgcccgccaccatgcccggctaattttttgtatttttagtaaagatggggtttcaccatgttggccaggctggtctcgaactcctgacctcaagtgatctgcctaccgcctcagcctcccaaagtgctgggattacaggcgtgagccaccgcgcctggcccacagttaaaatttcttctgagcgctcacagtcagaaatcatttatttacttggctgtttccctagagggcagagacaccgtacatcttgttgagtggtctttcccgtgtgctcagaacagtgcctggtgtgtaataggaattcagcaaatgctgctttcgtagcgagtaaatgagactgtgtgtgtgtgatgtgtgtgaacgtgtgtgtatgtgatgtatgtacgtgtgtgggaatgtgtattgtgtgatgtacgtatgtgtttgaatgtgtgtgatgtgtgtatgagtgtgtatgtgtgtatgagtgtgagtatagtgtgtgatgtatgcgtgtatgtgtatgtgtggtgtatgtgtatgtgtgtgatgtgtgatgtacatgtgtatcaatgtgtgtgtacttgtctgtgtgatgtgtgttgtacatgtgtatgtgtcatgtatgtatcattgtgtgtgcatgtgtggtgtacgtgtatatctgagtttgtgcatgtctgtgtatgttatgtgggatgtacgtgtgcatcagtgtatctgtacgtgtctgtgatacgaacgtgtgtatctgtgtctgagtgtgtgcatgtctgtgtgtatggtatacgtgtgcatcagtgtgtgtatgtgtgtgtgtgacgtacgtgtacatcagtgtgtgtgtacgtgtgtgtgtatatgtgatgtatgtatgaatctgcgtgcatgtctgagtgtgtatatgtatgagatacgtatctgtgggtgtacgtgtctgtgagtgtgtgtgatgtacgtatctgtgtgtacgtatatgtgtgatgtacgtgtgtatctgtgtgtacgtgtctgtgtgtgtgatgtacgtgtgtatcagtgtgtgcatgtctgtgtacgtgtctgtgtgtacgtgtatctgtgtgtgatgtacatgtgcgtctgtatgtacgtgtctgagtgtatgtgtgatgtacatgtgtatcagtgtgtctgagtgtgtgtgcatgtctgtgtgtacgtctgtgtatacgttatgtaccagtgtgtgtgtatgcgtgatgtacttgtgtatcagtgtgtctgtacgtctgtgagtatgcgtgatgtacgtatcagtgtgtgtacatgtctgtgtatgatgtatctgtgtgtacatgtctgtgatgtacgtgttatcagtatgtctgtacatgtctgcgtgtgatgtacatgtgtatcagtgtgtctgagtgtgtgtgtgcatgtctatgtgtacgtgtctgtgtatacgttacgtgtgtatcagtatgtgtgtgcgtctgtgagtatgtgtgatgtatttgtatcagtgtgtctgtacatgtctgtatgtgtgatgttcgttatcagtgtgtgtacatgtctctgtgtatgatgtatcagtgtgtctgtgtgtacatgtctgtgatgtacgtgtgttatcagtatgtctgtacatgtctgtgtgatgtacatatctgtgagtgtgtgtgcatgtctgtgtgtactgtgtgtgtacctgtgtatctgtgtgtgtctgtgagtgtatgtgcgatgtactcagggtgtctgtgtatgcctgtctttgtgtgtgtgtacgtgtgcatcagtgtgtgtgcacgtctgtgtgtgatgtacgggtgtattagtgtgtctgagtgtgtgtgcgtctgtgtgtgtgcatgtctgcgcatgtctgtacgtgtgcgtctgtgtgtgcatgtctgtgtgtctgtatgtgcgtctgtgcacgtctgcacgtatgtgcgtgtctgtacgtgtgcatgtgtgtgcatccgtgagtgtgtgcgcatgtctgagtgtgcgtgtacttgtagatcagtgtgtgtggggtgagagtttcggtgtgaatgtgagagcagagggattaaatactcaggattctgaagggggaggccagggtggctgcttttggactcaggacgacaagatgttccctttgctggagaagcagccggaggaggtcccctctgcattcactcaaaaagggtccgaactaattcgaagcttccgggagggcagggggaccttgatctcagggaccccaggtttggatgccagtaactatggggtctctttgtagtcagggcttctctctgggcctcctagatggtagagcccccgacctctgtgccacaagcctgaaggagctcccaggcgtctcaggaggagctgcgtctttggatgccaatctctgggctcttccaggatgttttttctcgagaatctgcctcgagccgcaaacccttcacactgcggactagaaagagtcctcttagagcctctgacctttctctctacttcagctgcgaacgggcgaagcctgcgccatgcctctcctttcccgccatttctaggaattcctcctacctcagtgtccttgctctgccattcaccacggtttgggtcagaatccagagttcagccaatgcttccagagagactgtggctgttaactgtccctgttgacactgggacctgtctcccctcatgacctgagtcttaccttgattctcttaatgacggagagggagacattaagaacttgggagccaatgccaggcgcgagctacactggtctccgcctcctgctccctgcagatactgttggggaccagcctcaacaccacccgtagggtacccaaagtccggtggcgacaaaggaatgagaagagacaggttaagagtgcataaagagtgagggccagggggccaattgcaaatcggaggctgcaaaaggcgcagggttctggtctccactctattgattgagtaccatcacttacagctaagaagcagacgttcagggcgaaacagtgaaagggaggcagtgcgcccatcatacgtgtaatctatagcactggtggtttaaatgaatctcctttgtgctcaaacagcctatttttaacttatcggagagtagctagtgggagtgggcttaagtaggagcctgcacgtctggcttccagtgcttcaaaggagtgtccttctccttgaacacagtgtttatggatgatggagcaactcactcagagcctgggaacatcacggcgataagaaggctttcctcctcagaggcctcttgtggctttccacaacttcttgtcccatatttttatggccagttaatacaggcaccccataagcctttcccccaacagataccaagcaggcgtgagctacactggtctctgcctcctgctccctgcaggtgccaggcgtgagctacgctgatgtctgcttccgcaggtgccaggcgtgagctacactggtccccgcctcctgggccctgcaggtgtggctgctgctggctgtgcaccgtggggttcctgagcgtggggtcacctgggaacgacccttgtctaattctccaatcctcagcctctggggtacgtgggagaccgcgcagaggagtggcgtctggctgtactctttttttcagttgccctgaggcaaaacccggccatttgctaatatccagtcctaactttcctccctcatttgaggcaggggagcggagacttcagtcattgcttactctatttctgtgggacagtgaagacacacaaagacgagaaaagggctcttgctgtaggtcttctcgctcagtttacctcactttctggaaaggtgccactggcctcgtgccacttgttatcttcctggctagccggttagccccttgcctgtggggcccttgccgtgtgcttgggagtcacctgcttcagccctgggagcttcagagctgctcgacaaccattcctaggccacgtggcctcgctccacaggtgtagatggcaagtgctggacaaacgttgcttggcaggattgctacgtgaggtagaatttccgtccctcttgtctcccaagtttacaggaagctttttttggacatttcttttcagactcattctgatgaaggaaagagcgtccctgtgcagctgcgtgtccttcagttctttggctctgattccgtgtctggcttcatctaagtggcctggtccatgggcagtgaagaaatgtaaagtgtgagcattcgtgtgtaccaggatgtggtgctttttgagttcattatgcttattttaaatcttggtcagtcttttccatcttctgcctaagatggtatcttttgtgcagtttgtggtctttgaaaaagttttaaaagtttttaaaactggaaaagataccgcctgcactttccttcagaaatcagcagtaacagcccaggctgttggtttccaaggggtacctgaggcagaccccagtccctgtggaactgaggaatcatggaggggttaagggctccaaaagtttggaggtggaggttgcagtgagccgagatcacgccactgcactccagccctggcaacaagagcgaaactccacctcaaaaaaaaaaaaaacttttgaaaaagttttaaagatgatggttatacttagttacctgattatttggcctgattatttggggaaataaacctaaaatctgccaacccagaagacctcttcacaaaagtagaaaataaagaaaaataattttattattgaataaaaattaaacgaggccagacacaatggctcacacctgtagtcccagcactttggaaggccaaggccagtggatcacttgagcccaggagttcaaggccaacctgggcaataaggcaaaaccccgtctctacaaaaaatacaaaaattagctggggatggtggcgtacacctatagtcccagctactcaggaggctgttgtgggagaattcacctgagcccaggaaggttgaggctacggtgagccaagatcatgccactgcactccagcctgggtgacagagcaagaccctgtctcaaagaaaaaaatgtggccgggcgtggtggctcacacctgtaatcccagcactttgggaggctgaggtgggcggatcacctgaggtcaggagttcgagactagcctggccaatatggtgaaaccccgactctactaaaaatacaaaaaaattggccaggcgtgatggtgggcacttgtaatcccagctacttgggagtctgaggcagaagaatcgcttgaacccaggaggcggaggttgcagtaagccgagatcatgccattgcactccagcctgggctacaacagcgaaactctgcctcaaaaaaaaaaccaaaaaaaaacaagggggtgaatctctttctgtattttgcatgagggaaaattagggattttttcctccttttaaatctatatttgcccttccaggcctgtgagcacacattcccctcggggtgtcagctgctcccccacgtggtctggagatgcgcgtgagggaagggctgaaggccaggctttagtctctgaagcttctgatgagttgaagcagaggggcgctcaggggcccaggacagagggtagacctgggaattgtgccccctcttccagctgtgagctgcccccactctgggcagcttgtgagttgccactcccgcaactcccagccctgggatgctggaggcaggaggtcagaaaatacccaaagaacagcagcagcctttacccctccatgattcctcagttccacagggactggggtctgcctcaggtaccccttggaaaccggcagctgggctgttactgctgatttctgaaggaaagtgcaggcagtatctgttccggtgtgaactggggaagaggcaacataagacattccctgccttgtgtcttgctgcgccctctggctcccatctgctgtaggctgcagccaggccctgctcagcctcagacccacgcctcagctccaccccagcctgcgtctgcccaggggtgtctgtttttctttttttactcttacattagttcctctgatctatgttttccttttgttcctgggctgatccatctccgtctaaagtccattttctgtttaccaccctgcctagaagtaagttggtgttttactctgtagcacttaacacaagtaatttgatttaggtgcctccaggaagtattgctgccaaatggataagtcctcatggcatttccagagcttcatgatgtctgtgctgagcagtctagggtagtggtgctcctctggaggtgtctgcttgaaccagccaggggagtggtttccatctggcatttatgggtggagccggggctgttcagttccgtgcgtactgcagacctggcctagatgcaggtcagacccgacggagacgtgctagtagctcacattccaccctgcttcccgcccgctagccctggtgtgagcctacccaacatctagttcgagactttaaataatctgagctcccagcaagagaacaccaagatttaggttcccaaattaattagatcatctaaaataaaatgtccactgcatccacaggcaatagccctctggaacaagacaattcatgtgagataagaaagaagagcccacaagaccaaggatgtattctcagtttacagaccactgaccagaggccactccagggtgtcaggactaagagaagtcacaaaacagcagatttcccaagagcagcggaaaatgatccagtcacaggtgggttatcggtttatcctctgtttcatgaaaatgatccagtcacaggtgggttatcggtttatcctctgtttcatgaaaatgatccagtcacaggtgggttatcggtttatcctctgtttcatgaaaatgatccagtcacaggtgggttatcggtttatcctctgtttcatgaaaatgatccagtcacaggtgggttatcggtttatcctctgttttgtgggtgttatgaggcttacagaaatctctgcaacacacagaagggtctaaatacatttaaataagagaaaatataaacttgggaaagaagatgtccaaagaagcacaaagtagattatagaaacatacaaaagtctcagctgggcatggtggctcatgcctgtaatcccagccctttgggaggccgaggagggcagatcatttgaggtcaggagtttgagaccagcctggccaacatggcaaaaccccgtctctactgaaaatacaaaaattagcctcccagctactcgggaggctgaggcatgagaatcacttgaacccaggagatggaggttgcagtgagctgagatcgcatcagtgcactccagccagggtgacagagtgagaaaaagaatcatacaaaagtcttaaagttggaagagatcaataagaaatgggatccttccctgttacagagttgaactgcaagcttttctgttatttccagaagccataacagaaagggaagtaggaatagttaacgtgggttcctcttgtcaaaaggaaaaagcagacaaattactctggagaagcaaatacttccgataattacacataaagaaaatgttttgataattattcatatacatggcatagtggtaagatcctaaatagcagccttgtaataaacaaacaggtttcctaggactatttcttggagctcctcaatgtcagctaagggcatgaatcgaaagaattcagaacacagtttcttcgaggactgagatggggtcttggttgcacatcctacctagattccagttttaggaaagaaacttaaatcacctggcagaattgatcattacgaaaccttcaaatggtccccataagtatgctctccactggaatgttgatgtgttttggatggaaatgccgctcctgttggcagaggcttgacatgcagggatctgcgttcagctctgtttccatactttgttgactcaagaaacagactgtggtgtcccctcacctttcggaggaattcttaccacctagtcagcctctcccctctcaccctttccctgcctttcctttcttcctgatattttctttttttgatgttcagtcctacgccaggagtggcaccactgcactccagcctgggtgacggagcaagacgccgtctcaaaaaaaaaaaagtaaaggaataaaggatagctactccataggcagagcagggcattccggaaagcaggaggaggaaggcgcccaccctaggtacaaggcttgttgacatgtaggacaacaacaatgacagtcacagggagatgtgctcagccacaagggtttgtgataaaggattgattttcttaatatattttataagaatcaatattattatctttaaagcaaaattagaaacggttttgttctcaagacatggggacatcaggacgttcctgggcatgggcctgtttagtaaacattattaatctgttcccttaaccgtaaacatctagaggccaggaatacctcacctcccggcaatgctgtccagcaagctccagcctcattttccctcgccctcactcaagatggagtcgctttggttctaatgcttctgacaaagagccagttgcatcagtgcagatgtggggattgtctctttgccctcagccgagggagccctgaacaaaaaactccagcaatttttttggaccctggggtagggagggaggggctgggagtagaaaagtaccaggtactgagtcaaagtggggaaaagtgtcttcagggttctcccccaccccaacgaggaggtcttgcattagcacctgagaaaggcctcaggagactggagtgcaggtgcctgggtaagaagggcaaatgtgtgagatcacgacccctgactgcagctcccctcaaagaccagagtgtgctggccgtgcaccaagtctcttgggagggcagttttcccctgaggcctgctgggtaaagccttggtaattgcctgtgcttacacctgaacatgcactacaggttttttttgttttttttttttttgagatggagtctcgctctgtcgcctagactggagtgcagtggcacaatctctgctcactgcaagctccgcctcccgggttcacaccattctcctgcctcagcctcccgagtagctgggactacaggcggtaccacacccagctaatttttttgtatttttagtagagacgaggtttcactgtgttagccaggatggtctcaatttcctgaccttgggatccacccacctcagtctcccaaagtgcggggattacagacgtgagccaccgtgcccggccgcactacaggtatttaaccaggagctgaactccttgactccactccttgattttttaggacctaagtgtgaaacaggctacctcatcatggaccccaataggtcagactttgacgggccgtgacaataaccaggtaaatcgtctgaggcaacagcagaccatggctatgacgccactccaagcaggatggtcgggcccggaggactgaacatggcctcagcagtcacctcggcagttgccatgccaggaaagacgccccacagcccactggagagacagaagaatctgtgtgaatcttctttacctggcctgaggcatcaattcaggcacagcagaacactggccaggaaactgaacgtgacctgaatgtcttccaggctgagacaggtcctgagtgcaatcccagagggcacacgtggtcccctagaaacaacgaattcacaaggtcaggtgccccagccgggcacgcacgcctcaggttgtgaggttaacagggatccaaggtggcttcccatcgtcgggcctctgtccagtctggatcattgggtttaggccttgacttcagagggcctgcctgggactgagttccaaaccattctgtttatccatgacatgagtttgttagtcccaccttatcaagtgtggacagtctctggaggagttctgcacagagcccaggagccaaggcagtcctctgcctctcctcgtcagcaccgtgaggaagccgaggtgtgggctcagcagacggtccaagtccacagccgccacagtccatggaaaggcagcaagaggacctcttgtgtttggttttttaggaggaggagaaagcttttaggagcaggtctgaaaaataaagatcattattattttttccctttccctgagcctcccagatgccagttttgttttgtttttctgttacctgtgtgtcccatgtagtaatcaaaacttaagaacaaaatgtctcctgttttcattcatacgtgctgtctggaaaggttgtatacaagagggacaaaatatttttacataaccaaaaagataaatcatgtttaagaattgttgagcacaaaatcctgaacttttaaaaggtttaaaaataggtttacatatctcccgtctatttgaggcttcagaaaggggatgaaagggccttgcaccgtgccccgtggagtctgaggtgtctgtaactggagaagaagagtgcgtgatggagggcagcctggagaagaaggacgcgtgatggagggcagcctcgagaaggagcgtgacagagggcagcctggaaaagggcgcgtgacggagggcagcccggagaagagggacgcgtgacggagggcagcctggaggtacccgtgggaagtgccctgcggggaacggctgcgtgaggcctgaggtcgcttgcctgagctgcgtagtccaggctgcggttatctcgtcccctcccagcagccaccgaagctgtccgttacaacagtcagttaccctgttgctcgtgagcgatacggttcctcagacgccccatgattgggcctattgatgtgtagtttggactggggctgttctcagaagcactgcgctcaggaaacctgaacgggaagcagatctggtcatgtcgggcctggatagtgtggcccaagtcagtggaatgtgtggggttggctgggccaaaccacaaggaaacagcgaaacattgatctacctgccgagaatgtcatggccgattgacctggcaatctacctttgggcgctgctagccttgaccagagtctggaaagcaggacagctgtttcccgtggttcaccgtcttctgagagcagaagcagcacacgcggaggctcggtctaggccatgtctgcatctctgtgggacgtttctcatggctccatgaggcggtcagtcacatatctgcttgctccggagtggaagacatcttagtctgcatttagcaagcgcagttgggtggttgtgtttcctgggtcagcactggagtctttttggtgagcacccgtatgggtaacaaaatgcttcttaggagcagaactgatttttatctaaatgtctcatcctcaggaacagaaaaccaaatgttctctgttcttatttataagtgggagcaaaacactgggtacacgtggacacgaagatggggccagtagacacaggggacctcaaacgtggggagggagggagggaagagggaagcctgttgggttctgtgctcaccacctgggcgacaggatcagtcgtaccccaaacctcagcattacgcagtaaacccacaaaacaaacctgcacatggacttgtggatctaaagaaaaagttgaaattattttttttttaaaaagtcctgtctccaccaggaaccttgttttacctgccagtctgaggctggccggcggcctgatccaatggccagggaactagccatagcctgagtcgggtggattcagtcttcctatgctgctctgtaacggccctaactgcagcagttcccatcagggactggggcaaaggctagcaggggtgtacatagatgggacatcagcatcaacaatacactcaggaccggggaccacatcatagtcctgtagcatccacagtacgttggctgtacaccacgtccgttgtggggagggcagttttcctccatgaggcccacagggtaaagccttggtgattgtttatgtttgtgcctgaaatttcgcacagacctttttaaccaggagccagcttcctcagaggagttttaaaacacgtccaagttcatgtcatcaacatcacagtcgggacagagcggctccgtcaccacacaggaagtctgtgaggcccctctgtggctgtgcatcccttatccctggccgccactatctgttctctgtcactacagctttgccttttccagaatgtcctataaatggaatcatgtcggctaggcacagtggctcacacctgtaatcccagtgtgtccagaatgggtgggttcttggtctcactgacttcaagaatgaagccgcggaccctcgcggtgagtgttacagctcttcgggtggcgcgtctggagtctgtcccttctgatgttcagctgtgttcggagtttcttccttctggtgggttcgtggtctcgctggctcaggagtgaagctgcagaccttcgcggtgagtgttacagctcttaaggtagtgcgtctggagtgttcgttcctcccggtgggctcgtggtctcgctggctcaggagtgaagctgcagatcttcgcggtgagtgttacagctcataaaagcagcgtggacccaaagagtgagcagtagcaagatttattgcaaagagcgaaagaacaaagcctgcacagtgtggaagaggacccgagcgggttgccactgctggctcgggcagcctgcttttattctcctatctggccccacccacatcctgctgattggtagagccgagtggcctgttttgtcagggcgctgattggtgcgtttacaatccctgagctagatacaaaggttctccacgtccccatcagattagttagatacagagtttccacacacaggttctccaaggccccaccagagcagctagatacagagtgtcaattggtgcattcacaaaccttgagcaaaacacagggtgctgattggtgtgtttacaaaccttgagctagatacagagtgccgattggtgtatttacaatccttgagctagacataaaggttctccatgtcctcaccagcagctagatacagagtgttgattggtgcactcacaaaccttgagctaaacacagggtgctgattggtgtatttacaatccctgagctagatataaagactctccacgtccccaccagactcaggagcccagctggcttcacctagtggatcccgcaccggggctgcaggtggagctgcctgccagtcctgcgctgtgcgctcgcattcctcagcccttgggtggtcgatgggactgggcgccgtggagcagggggtggtgctcgtcagggaggctggggccgcatgggagcccatggagtgggtgggaggctcaggcatggtgggctgcaggtgcccagccctgccccgcggggaggcagctaaggctcggtgagaaatcgagcgcagcgccggtgggccagcactgctgggggacccagtacaccctccgcagccactggcccgggtgctaagtcccccattgcccggggccagcagggctggctggctgctccgagtgcggcgcccaccaagcccacgcccacccggaactccagctggcccgcaagcgccgcacacagccccggttcccgctcgtgcctctccctccacacctccctgcaagctgagggagtgggctccagccttggccagcccagaaaggggctcccacagtgcagtgggggactgaagggctcctcaaatgccaccaaagtgggagcccaggcaggggaggtgccgagaacaagcgagggctctgaggactgccagcacgctgtcacctctcaccagcacttcgggaggctgaggcgggcaaatcacctgaggtcgggagttcgagaccagcctgaccaacatgtagaaaccccgtcactactaaaaatacaaaaattagcagggtgtggtggcgtgtgcctgtaatcccagctactcgggaggctgaggcaggagaatcgctagaacccaggaggcagaggttgcagtgagtcgagatcgtgccacttcaccccagcctgggcaacagagtgagattctgtctcaaaaaaataaaaaataaaaataaaaaaataaatgggatcggcctggcacagtggctcttgcctgtaatcccagcactttgggaggccgaggcaggtggatcacaaggtcaggagattgagatcatccaggctaacagggtgaaaccccgtctctactaaaaatacaaaaagttagccgggcgtagtggcaggcgcctgtagtcccagctacttgggaggctgaggcaggagaatggcgtgaacccaggaggcggggcttgccatgagccgagatcgcgccactgcactccagcctgggcgacagagcgagactccctctcaaataaataataaataaataaataaatgggatcacatatgtgaccttttgacagtggcttttctcacttagcatacctttgagattcattcatatcttatcggtagtttcttcctttttcttggcgtgtgattcccttgaatatgatcccatgtatggatgggccacagtctctatccattcacttattgaaggacatcttaattgttccactttttagcagttttgaataaagcattcatctgcatataggtttgaatataaattttcaggtgaatgtaagttttcagttcactacttgagtaaacacctaggagtggaattgctgcgttgtgtggtaagtctgtgttcaactttataagaaactgccaaaatgttttcaaaagctgctgtacattttacattcccaccacaatgaatgacagttgctcttgctctgagtcctcacagatatttgtcaggggtgtgtgtgtgtgtgtgtgtctgtgtgtgtgtgtgtttagttttagccttctaataagtacatagtagtttttcattatagttttaatttgcattcaccttttgacagatatattgaacatcttttcatatatttactttccatccatacattttctttttttttttttttttttttgagacagagtttcattcttgtcgcccaggctggagtgcaatggcaccatctcggctcactgcaacctctgcctcctgggttcaagcaattatcctcccttagccttcccagtaggtaggattacaggtgcgtgtcaccatgcctggctaatttttgtatttttagtagaaatggggtttcaccatgttggccaggctggtcttgaactcctgacctcaggtgatccgcctgcctcggcctcccaaaatgctgggattacaggcgtgagccaccgcgcccagccaccttccatatattttctttggtgaaatgtcaagatatcttgttaatttttaaaatgaggttattttcttagtaagagttctttatatcctggatatgagtgctttagcaagtatgtaatttgcaaataattttctcttagtctgtgccgtgccttctctttctcttaacattgtctttcacagagcaaaagttcttaattttgaaaaagtccaatttatcaaatttttttcttaaattgatcaggcttttggtgttgtatctaactcattgccaaacccaaagtcacacaggttttctttggttttcttctaaaagttttatagttttttatgtttaggtctgtgatccattttgagttagttttgatataaggtgtgaggtatgtgttgagatcccttttgcttatgagtataaaattgttgagacattatttgtcacaaagactgtagaattgctttttgtacttttgtgaaacaattgagtatatttgtaggggcttatttttgagttctgtgttctgttccattaacttgtgtttttatcctttcacaaatgccatcctgccttaattactgtggttgcataggaagtcttgaaatcaagtaatgtgagtccttttatgtttaaactattttgaatataaatgtgcctctttcgtaggcagcatgtagctggggttgctttatattttccatttctgagcttttgctttattatttcttctggtctatcttccaattcacttattctctctttatcttttcctaatctactcttaagcccttccattgacttcttaactttacttattatgcattttatctctagaagttatatttcatttttttcaaatctgcttattcatttttatagtcttctgattatttttcgtactttcattaacctctcatttctttgaatatattaaatatatttattttatattctgtgctgacagttcaaatatcctaagtcttttataccactcctgtttgtttttttttggttttttttgagatggagtcttgctctgtcgcccaggctggagtgcagtagcgccatctcggctcactgcaagctccacctcctgggttcacgccattctcctgcctcagcctcccgagtagctgggactacaggcacccaccaccacgcccggctaatttttttttttttttttttaagacagagtctcactctgtcacccaggctggagtccagtggtacgatctctgctcattgcaacctccgcctcccgggttcacgccattctcctgcctcagcctcccgagtagctgggactacaggcgcccaccaccatgcccggctaatttttttgtatttttagtagagatggggtttcaccatgttagccaggatggtctcgatctccttacctcgtgatccacctgcctcggcctcccaaagtgctggggttacaggcgtgagccaccgcacctggatgattttttttttatgtgtgcattccggtttctcttttactctgtactcatttttcttgaatctttatttgtgagaattattttgatctctttctctaaatagaatttgcatttgattctgccggatgcctgaatgcatggccccctcaaaaacactttagaactctctgtgcttaaggtttttgcaaaacacatctatactggagttgagcccacacacccatataaatccagcttgttataattctcagggacaatttttgacctctttgtgtaacactaacatttgaggcaagaaattgattttctttgatttttttttcattgacccacacacggagtactccttgtgttccagctttatgagggaaaataacctattagtcccctatgcttgggcttattctaagctttcctcctttttcctgtgtcccttgtagctgctgggactggaatgctcaaatttacttgagtccagctgaaggctggcctctgcttacctctctaggtttccacgttcccttttaaagaggccaggaccattcccaccgctcccactccctctcttatattcctgaactttcatccctcagaaaacacactttatttccatgtctttgctcatgctgctgccttgagagtgtccttttcctcatccccctctgtaaccaggactttctaaagaccctttctaagccttactgtctttacagcacctaacccagtgttgttaaatccagtgtttttatccccgttttgtctctatattctgtaaatgctagcttcatagccctgtaaccttattcactctggcctgaaaggtacttgagaatgtgatttttttctactcatttttaaatttctagtacctgttatggttcctggaatctttttttttttttttttttagacggaatcttgctctgtcaccaggctggagtgcagcggcacaatctcagctcactgcaacctctaccttctgggttcaagctattctcctgtctcagcctcccgagtagctgggattacaggcacacaccaccacacttggctaatttttgtatttttggtagagatggggttttacagtgctggccaggctggtctccaactcctgacctcaggtgatccacctgccttggcctcccaaagtgctgagatttcaggtgtgagccaccacacccagatggttcctggaatcttaattgctcaatatgtgtgttttggaagatacctaaaatagctggccagttcttacttgggagcagaatcactcccagaggaaagagagtgtttttgtttttgttgttgtttatttatttatttatttatttgagacagagtcttgctctgttgcccaggctgcatgcaggtgcacgatcttggctcactgcaacctccacctcccaggttcaagtgattctcctgcctcagcctccctggtagctgggattgcaggtgcccaccaccacccccagctaatttgtgtgtgtgtgcatgtgtgtgtgtgtgtgtttaatagagttggggtttcaccatgttggccaggctggtcttgaattcctgacctcaggtgatccgcccacctcagcctcccaaagtgctgggattacaggcataagccaccgtgcccagccagtgactgagagatattactgtcattagcagacagaggccaggcatgctgaagggctcaactgcatggaacagtattccttacctaagaatggttctcaaatactagtggcaccttctttgagaaccactgtattgtttaaagacaacctattctggtttcttgttcagtggataggtacatggatgaatgaattcacaatgataaatatttttaaaacattccttcctcaaggcataatgcaagattattatatttattatattagattatattggttattcattattgtgtcacaaattaccccaaacctcaagggctgaaaacaacaaacattgatctgtttctgggttttggaatctgccaggtacttgcccagttggttctggttgagggtctcacatgatgcagtgatgaaggtgttgagaagggctgcagcgaggaaggagctggctcctccaggctcactcagtggctgttgggaagcctcagttccacggcacatgagcttccacatggcggccttacaacacagcagccagactcctccagagagagagagtgcccaggatagaagttgcatttctttctaacctagtcttggaagtggcatctcatcatgtttccctgttctgttcaggacaatgagtcagtgagtccagcccacggtcaagaggggaggattatgcaaaagcatgaataccggagtcagaggtcactggggccatcttagaggccacctaccacaaatacagaagaaagtattttacaagaccaaatgagaaccacttcaggtttaacagggattatgcttttccagatatcatttgaggatgtggctgtggatttcacgctggaggaatggcagctacttaatcctactcagaagaacttgtacagagatgtgatgttggagaactatagcaatctggttttcttgggtaagaacattcttatgtaacttagtgtatggccagtaactggcctgtgaggtgtttgtttattttggatgtaagttttacatgtcaaagattatttgacttttatactgaattgaaagattttcattcacttgctttattttgcagcctttataataaaacattctacatatttaagactcttagcccaggcagttaggtccaagtcctctgtgtttccaatcgacaggttttcaaattctcaaacctgatgcaatgttcaaactggaacaacaagatccatggataataggtcaagaaatcctaaatcagaacttttcaggtgaggaataatcaggtttatgagatacagtgaacattttatctcaggtttttgatgacaggtgggcacttttaaagtgttgtttataaaactgtgtttaaagttcctgaatctttagagttgactcaagattggtgacatgagttttaatggatgtgctccataacctggtctccacatcgggatgtgtcttttctccatggagtttatgatgaaatgtatccctcttattcagtggcatagattggtggccatttacaaccccactttcttagttaaggctctctttatgaattcataatttttttcttcttttagataacactgattgcctttgagtttatttaaacttcaaacttttaatttattatttttcttctcttcctctaatttgatatatttctattttaaaaccacagagagtagaagatgaacccactgatacagagtgaaaatctaggctgggcgcagtagctcatactgtaatcctcatgctgtggaggttggggagagggcagggcacgacagtcacttaaggccaggagtttgagaccaacctgggcaacaaagcaagaccccatatctactactactaataatacctaacaataataataataattcagccaaatatggtggtgtgcacctctagtgccagctacctgggaggctgaggtgggaggattgcttgacccaaggagctggaagctgcagtgtgccatggatgtgctaggcaacagagtgagaccctgtctctaaaaacaaaaacacacacacacaaaaccctaataccttaaacatagtaaggagattttgcttcttaccttcctctgtacaaactaaggattttcaagtcagttcccagtgcatctttctggtacatttgatgtttaacttctctaaagcttctctctcataccatcacatagtcaggtgggtttaagtctccattacctgctgtgtgatatttaatctccgtttttgttgaagaatctcatggtatgggaacatcttatctctccacttatttttctatgctcaagagtcattattaactccatttgagctagatttgtgctcaagagtcattattaactccatctgagctagattcttcctcacacgctcttctgaaatttttctctgcatctgtacctctgattatggtacattttccccaggtagacttcactttgagctcttttcttcaacttcagtgaatgttccttgactcacagctttctctgaaatctctatccacgtagcatctatagtatagtaactcaggcctgatggacattatctgaaattcctaaaacaactagtcctaagatttttttccccataaagagagattgccagtaacgtagtctgtgttctctgtggaatttgtggtatgcacttacttgatttttaaaaattggttattatggacccagataaggaaaggtcttgtttatcagatgtcccttcagtagaaaagtttccatctaagcctctaccctgggaaatatttatttaaaaaatttttttgagacaaggtctcactttgtcacgcaggttggagtacagtggcgcagtcacagcttactgcagccttaacctatctggactcatgagctcctcccactttagcctccccagtagctgagactaccaccacaccaagctaatttttaaaaatttggtttttctggagagacaggatctcactatgttgcccaggctggtctcaaactctgggttcaagtgatcctcccgccttggcctccccaagtgctgggattacaggaagagccataatgcacagcagggaaactgagattacaggggtgaggcataatgcacagcagggaaatatttcgggttacagatgtctgggcaccattcccattgttgtttaggtctgagtgtgtgcagtttggaaaagctgtaaagatagttgttatattcccctattaatttagaaccacttctcatgtggaatgagaggaattgaaatgagtcatgaaataactttataggattttaatttagaagacaatataaaaccataaaatatttagtgatgcagtatttgaacatgaagcatttgtgttaaagtgcaaaattaattgccaagattaatgataccaaaaggaactatattagaagctcaatgacaagtgaataatatttatcctacctatattgagggcttgttatgtgctatgcagtgggggtacattagtgaaaaagacaaacctgttccctacactcatacagtttacattctactgggagagacacgagtaagaggattacctatttgataagtactatgaaggaaagaaataaagagggtatttgttggtgtgccatcagaatgacattttggtgggcgtgacatggtggctcatgcctgtaatcccagtgctttgggaggccaagacaggagtattgcttgaggctgggagttgcaggcccgcctgggcaacatagcaagaccccatctctacaagaaggatattaaaaattagccaggtatgctggcacacacctacagtctcagctacttgtgtgattgaggcagaaggatcacttgagcctgggagtttgcagctgcagtgaggtatgaccctacctcgtcactccttgggcgacacagtgatatcctgtctctaaaaaatcaccaaatactacttttaagcctgtacataaactactttattattgtttatcatttaatccattaatttggatagacatatttatttatttatttattttgagacggagtctcgctctgttggcacgctggagtgcagtggcacgatctcagctcactacaacctccgactcccgggttcaagcgattctcctgcctcagcctcccaagtatctgggattacaggcgcacaccaccacgcccagctatttgttgtatttttagtagaaatggggtttcaccatgttggccaggctggtctcgatcccttgacctcgtgatctgcctgcctcggcctcccaaagtgctgggattacagacgtgagccaccgcacccggcctggatagacatatttttaatctcatcttgatttgattttaatttaaaagtattgtttttcttttttcccacatcttataaaacaattttctgtaaactcttcaagtggatctcacacttgtctacatatgactcttgcttttgatcttcaaacttctttgcatagtctttttcatctcaatgaatagtattatcatctttgtttatgcccgaaacactgagtctttctttaattttccatatcagcagttgtgcttcctctgaaattctattttctttttgagatggggtctcactcagtcacgcaggctgacgtgtagtgggctcactctcatctcacacaacctcctcccacctcagcctcccaagtagctgggactacaggtgtgcaccaccacacctggctaatttttgtatttgggtagagatggggtttcaccatgttggccaggctggtcttgaactcctggggtcaagtgatccacccacctcagccccctgaagtgctgggattccaggcatcagtcaccgcagccagcctgcttcatctgaaattctgatatctgagaattagatgaggctttttcccccctagaaaagagtagtttttggggtttttttgttttgttttgttttgttttgttttgtttttgagcctgtgtctcactctgtctcctaggctggagtgcagtgatagttatgggtcactgcaacctcaacctctcaggctctagtgatccaccccctctgcctcacaagtagctgggacttcacgtgtgcaccaccacacatggctaattttagaaaaaaaaaatttgaagagacagtttctccatatgttgcccaggctagtctcaaactcctgggctcaagcagtcctcccacctcagcctcccaaagtgctgggattgttgttgtgagctgccaccaggcccagcctcgttttatatttgagaccatgccagatcttttcatctcgcagagtacttcctgagaatattaccccacaattgctagtaaataatatcatcaaaaagtcaagtaaataaacctttaaaatatgcaataaatggtcttgtagaaatcacaaacaattgtacttattggatgaaaatatctgttctactattataaaaaaattattgtggttaggagtaatttccagtgatagcattacatatacataaaatatatactttacagatccaattaaaggaggatgaatgtgaagaagttgaataaaagtgttgatactgagctctggagaactcttggataattccaagaggaagttttactgatgatggtgaagttattgatatcagtgatttaagtaatgatcccgaataagaatattttataaatgcaataatagtacaaaaaaatgtttcttatctttcaggtgtaaagttgatattgtacatttattctgcattatatcccttactttttctattataccattcaacaatatatactaatgttgcatttttatgtttttattattcacattcttaactatattacctcacttcttctctgatcttctgatactaagttctggacacatagtagataatcatagattattgtcaaaaaagtaaactaatcacttcagtatttgattggaaattgctccaggctctttcatctcatgatcactgttctttgagtatatttaatatttccttatttaaaagttcatgtatttagccaggcgtggtggctcacgcctgtaatcccagcactttgggaggccgaggcaggtggatcatgaggtcaggagatcaagaccatcctggctaacgtggtgaaaccccatctctactaaaaatacaaaaattagccaagtgtgatggcgcacacctgtagtctcagctactcaggaggctgaggcaggagaatcgcttgaacccgggaggtggaggttgtggtgagctgagatcgcaccactgcactccagcgtggtgacagagtgagactccctctaaaaaaaaaataaggctgggcgcagtggctcacacctgtaatcccagcactttgggaggctgaggcgggtggatcacgaggtcaagagatcgagaccatcctggctaacacggtgaaaccccgtctctattaaaaatacaaaaagtagccgggtgtggtggcacatgcctgtaatcccagctactcaggaggctgaggcaggagaattgcttgaacctgggaggcagaggttgcactgagccaagatcatgccactgcactccagcctggtgacagcacgagactccatctcaaaaaaatatatataaacagtaaaaataaaagttcatgtatttaaacatttgtaatttaaaagttcattttcatttctgttaaaattgtcaatgcccaataagtacacattatttgagggaattttaaaaactgggattatggcgccatttcagaagctttatgcaataagcataataattgaaggaattacacagtatggttcatttttttctctttttagaagtctggctagataatcccaaaatgtggctccgagataatcaagacaaccttaaaagtatggagagaggccataaatatgatgtttttggaaaaatatttaattcaagcataaacattgttcatgtaggactgcgatcccataaatgtggcacaggagaaaaaagtttgaaatgtccttttgatttgcttattccaaaaaataattgtgaaagaaagaaaattgatgaactcaataagaaattattgttctgtatcaaacctggcagaacccatggtgggataaaatactgtgattgcagtacatgtagaaaatccagcaacgaagagccatggctcactgctaatcacataacacacacaggagtctatttatgcatggaatgtggcagattttttaacaagaagtcacaacttgttatacaccagagaactcatacaggagagaagccctatcaatgcagtgagtgtggaaaagccttttcacagaagtcactgctcacggttcatcaaagaactcactcaggagaaaaaccgcatgggtgcagcgaatgtcagaaagcttttagtaggaagtcactcctcattttacatcagagaattcatactggagagaagccgtatggatgcagtgaatgtggaaaagccttcagtaggaagtcgcagcttaaaagacatcagataacgcacacaatagagaaaccctacagttgcagtgagtgtgggaaagcattctcccagaaattaaaactcatcacacatcagagagcgcacacaggagagaaaccctatccatgtagtcactgtggaaaagccttcttttggaagtcgcagctgattactcatcagaggacccacacagggaagaaaccttacggatgtggtgagtgtcaaaaagccttcagcaggaactcacttctcattaggcatcagaggattcatacaggagagaagccctacgaatgcaacgaatgtggtgaagccttcatcagaaaaccacagctgattaaacatcagataactcacacaggagagaagaactatcgatgcagtgattgtgaggaggccttctttaagaagtcagagttaataagacatcaaaaaattcacttaggagagaaaccatatggatgcattcaatgtgggaaaaccttctttgggaagtcccagctcctaacgcatcacagaacacacactggggagaagccttatgaatgcagtgagtgtgggaaggccttcacccagaagtcaagcctgatatcacatcagagaacacatacaggtgagaaaccctatgaatgcagtgaatgcaggaaaaccttcagtgagaagtcaagtctcattcatcatcagagaacccatactggagaaaagccctttgaatgtagtgaatgtaggaaagcttttgcctggaagccacagcttcttaggcatcagagaattcatacaggggagaaaccctatgaatgcagtgaatgtgggaaagcatttgttcagaaagtgcagctcattaagcatcaaagaaatcacacaggagagaaaacctatggatgcagcgattgtgcaaaagctttctttgagaaggcacagctgattatacatcagagaattcatacaggagagagaccatataaatgtggtgaatgtgggaaatctttcacaagaaagtcacaccttatgaggcatcagaggattcatacaggagataaatactatggatgcaatgagtgtgggaccaccttcaacaggaagtcgcagcttatgatacatcagagaaatcatataatataaaaatcatgactttggcgaatgcagaaaggttgctatcaagtgtcatactttctgacacttttgaggatgcatgtgggagagaaaccctattgaggcagtgactgttgaaaaagcttgaattgaggagtcaagagtcactaagcagaatttagaaagagaagtttttaaaaagcaaacagtgtaaaaaaagtcatctcccagaagacactactcgttacatattggatgactcattgaggtgaaaaccttattagtgttgtgatagtagagaagcttttagtcaaaagtcagtttattaaatgtttagaatacctaaacaggaagaaaattctattgttttttataacaaagtggaagatttcaagaaaggacaactcactgtacacttgagaataatacctacagaggttcatactgaagagtagtctcaataatgtaaagaatttgacaagcatgatgctattgaaatagttctgtaaggaagtggtgttctttatacatcaattattacaaaaagcagtgaattgtaagtgtgaggtgtgtttacttagatgtgaagagttctccttactgctgtgatggaataacaagggtcagatttcctctcctgccttaaacaactggaagctatacaatacgtataataggtaatggtttttagacataggacaagcacaggtttgtgatcctcaggagactgcagacagagtgaggtgagcaccatggtttctcagcctgcccccgcatggcagttcctaggttgcagttcagggaagggaaacaataaatctcgctgaattgaagagacaggactggcagttggggaggccacagcagctagaatttccaggggaaagtactggagagatgggatccttctagatacagggctcaagaagtctgctgggagtcccctgagtcctttgacttagtactgacttgcactgaggccaggaaaagaagcactggaaagcagcaggctgaacaattcctggaactcatgcagggctgggaatagtttatgttctcagcagccagagtggaaacagagtggaaacacatggagcatcaggtagaattctcagaaaggttttgttttagtagtgcagctaattaactctagattaaaagctactctggacctacagtgtccggcatccaaaaaaactaatgtgttatgcaaagaagcaataaaatatgacttataaccaggagaaaaatcagtagaaacccagaaaagacagaggtgatggaattagtagacaaggatattaaaagagctattgtaaatataaagtagaggaaaacataagattgatgaaacctgaggtataagagatatttttactggccaaaatggaacttctagggatgaaatcaacttctgattttgttaaaatcccgagtggagagattagatacagaaaaagaagaaaaaatcaatgaacttgaagagtaagaataaaaactaccaaagtgatatacagagagaaaaaaagacttagagaagaggaagagaataggaaaaccattacagtagtgtaatatatgtttaactggagtcccagaaggagaggagaaaatgaagaggcatgaagaagtatttgaataaataatggctaaagattttccaaatctggtgaaaacaatacccccacatattcaagaagctcaaatgacctgaagtagaataaacataatttacatcacagcagtgcacctcagagtcacattcatgaaaagcactgataaacagaatacttttaaaacaccttgagaaaaaaagataatacatacacatgaacaaagaatggcagcatatttctggtgagaactatgcaagctataagacaatggagtattatctctaaattccttaatgaaataaacaacaaaccctgcaacctagaattctgttactgtcaaaaacgttttcaaaaatgaaggcaaaataaagactgtttctgagaaactaaatcaaaggtaattttattacctgtagacctgtctttgggaaacattaaaggatgtttgagggcagcaggaaaataatacaaaacttaagtttgggtctgtacaaaggaatgaagttctgaaaatggtgaatatgtgggtaaatataaaagatatttctctctttttaaaatctttttaaaagggaattggctgcttaaagccaaagtaatgataacgtatttggagtttatttagaagtaaagtgtgatgacgataacacttaagtgtgaatttttaaatatagttgagtagactgcatcatctgagttagaagcctattccttcagggctcggggtagcttgaatttgtagcaggcacatgacagaaattgtatgtattgtggatctgcatgtgtgctgagtattccctatttctttgatcccttttcccccattttctgctctgctcccccctgaggctgtcttctagagactggggtttcttcataggtttgaacagtgggagataccagaggtgggaggagaaaaagttatttattaccgttcccttcctcctgcctggaccatggtagcttctgtgttcccgtaaggatacagcttcctttgggaagccccatctatggctgtagatctctcggtttcagttgacaccattccctctccatgatcttcagacttaactactactgggtgcttccccaacccactggttgggtgtctttaattgtgaacacatatttgtaaatagtgcctttattaattgttcttgagttaatattctgagtgtgccatttattttctgtgccatctgttaaatgatgagcatttaataaaattgtgataatcagttatcagtacaagtgccgcatagtgcataggctgaaatgtctcaagattccccacactacatatcagtattttctatctgtatctggacaatgcagtagaaattataacaaatacaaagttctttgtgcttttctgctgcatatgtcagtggctctggagattgttaccatctgctacatatataaatagacttgcagttattactaagctcctcttcagtaatagaaagacttatgaagtcttttactacctctgggttagccaaacaaccttcaaaaagcattgttatttaggttaaatatctgtggacaagaaacaagataatcagttactgagtgaagaaagacgggaatgatgtcccatacttcccagctctctaaagtgttatgctgtacaattaaaatacccctgacccatcatctgctaccattcgttgtggataattcatgtaatctctaacctgtgggcaagtctttacccttcagtagtcaagattacgttagagacttcgtccacgaatccacaccacctttcccatcagttctcaccggaaatatgctgccaaaaagaaaatcagcttttctaagatcaagccagagttgcttctcttacaaccttacggcgctaatgcattaagttgaagtcgactgccaaagaggcccagcagagggcagcacccccatcatttttttgaatttctcccttaggaattttgccttcctttgtcttctgtccaccaggccttctctccagctggacacaaacctcctttgaagggaaataattgccgttaggcttcacagtagtgctttttcctttcacttggatttgcattttaacctgcatttcgaagatttttatacatgttttctatttccgacaatgccaggaggcttcattgacgttgtagtctgtgttaataaacttgtgtatcactctgctctgatcttttaggaattaacttgcaaatgaaatgaatatgttgggactttggcataatttgaatatagcattgtgtgagttgtgattgtctcttcctaattgtgctgtaataacctgtgtatgagaataaaatgatttccaccatcaggattctcccatgcccccctttattttgccatagactaaaggggaaaggccattctcactctccttaccttagaaaattttatttgcctcatgatgactgtctgccgcttagaagtagacaatataaaatctcatcactatttcacaagaataaaattcaaatcagttatatccaaagtaacttttcaactgggggtggtgtctcacacctgtaatcccagtgcttggggaggccaaattgggaggaccgcttgagcccaggcgtttgagaccagctggacaacatagcaagactcatctctacaaaaaaaaaatttaattagccatgagaggctgggtgcagtgacgcaagcctgtaatcccagcactttgggaggccgaggtgggtggatcacctgagttcaggagttcgcgaccagcctgaataacatggtgaaaccccgtctctactaaatacaaaaaaattagccgggcatggtggcacatgcctgtaatccgagctacttgggaggctgagacaagagaatcacttgtacctgggaggaggaggttgcagtgagccgagatcacggcattgcactccagtctgggcaacaagaacaaaactccatctcaaaaaaaaagttagccatgatggtgcatgtctgtaatcccagctacttgggaagctgaggcagaagggtcacttgagcccaggagttcaaggctgcagtgagccatgatggggccactgcattccagcctgagtgacagagtgaaaccttgcctcttaaatgaataaaaataaagtaagctttcttcaacaagttttcttccaacgccacacactccatcaccatattaatttaaattatttagtatgtagcagatttactttgagaccaaatctgtgaagttggtgatgatatttaataattctttatttcccttatgggatctttgcaacttagaacacaattattactcattgtatccgggtcatttaacatcttgtcagaatgctaacattaaataaaccaggccaggcgcggtggctcacgcctgtaatcccagcactttgggaggccaaggcgggtggatcacgaggtcaggagatcgagaccatcctggctaacacggtgaaaccccgtctctactaaaaatacaaaaaattagccaggtgaggtggccagcgcctgtagtcccagctactcaggaggctgaggcaggagaatggcgtgaacctgggaggtggagcttgcagtgagccaagatcacaccactgcactccagcctgggtgatagagcgaggctctgtctcaaaaaaataaataaatcaggcgctgggcgcggtggctcacacctgtaatcataacactttgggaggctaaggcaggcagatcacaaggtcaggagttcgagaccagcctggccaatatggtgaaaccccatctctactaaaaatgcaaaaattagccgggcttggtggcacgtgtgtagtcccagctactccggaggctgaggcaggagaatcgcttgaacccaggaagccgatgttgcagtgagctgagatcacaccactgcactccagcctgggtgacagagcaagactccatcacacacacacacaaaaaaacagggaacaccaaacttatttagtgatacctaaatctcgaaatgtgcacagcaaaaagaatgtagctatcgaggcattcactgttaagatgaaaagaaatgtaagtgaagggacatttataacttgaagttctcatttaagaattactggccagggccgggcatggtggctcatgcctgtaatctcagcactttgggaggccaagatgggtggatcacgaggtcaggagattgagaccatcctggctaacaaggtgaaaccccgtctctactaaaaatacaaaaaattagccgcgcgtggtggcgggcgcctgtagtcccagctactcgggaggctgaggcaggagaatggcgtgaacccgggaggcggagcttgcagtgagctgagatcgcgccactgcactcactctggcctgagcgacaaagcgagactccatctcaaaaaaaaaaaaaaaaaaaaaaaaggcattactggccagatgtggtggctcatgcctgcaatcccaggactttgggaggcccagctgggaggagaggagagcttgagcccaagagtttgaggccagcctgggcaacatagtggcactttgttctccacaaaaataattaataaagcaagtaagcattcctatcactaaaagtacttaaaaaaacaaatcaagcttaaacttacaatagggggtgggagaagtgaattaactttttattttcattagtgcgtgctcatgtgaaaggagcagttaggcaatggagtgttaccactgcagccaggcaggtctagtgtagattcgtccccaaaccatggtatttgccaggcagctctgagggtatgaacaaggcatgtgcattgtgtcctgttgtgtgtaatgcgtttgtatgaagcagattctgtaagaagatgatgttggctgagatgtgggccagctgtacttcactgcttcattacaagggtaaggctggccaggtgcgatggctcacgcctgtcatcccagcactttgggaggccaaggtgggtggatcacttgagttcaggagctcaagagcagcctggccaacatggcaaaaccctatctctactaaacatacaaaacaaaaaaaatagccgggtgtggtggagcacctgtaaacccagctgctcgggaggctgaggtgggcaaatcacatgaacccaggagttggaggttgcagtgagccaagatggcaccaccactgcactccagcctgagcaacagagtgagactccgtctcaaaaaaagagaaaacaagggtggggctaaaaggctaatagctaactgaaaatgagcagctgtttttcattctgtgaggagcatcttgtataagccgtagtgtttgatccactcatcattgcatgggcagctgtgcgaggtcagacctgttactgacacttccttctgtgctctgtttgaaaagaaaatctctgtatgcaaatgttaactgagtaaactgtttcatgaattcatatgtgtgagtgtgatcactgggagcaatttgcaaataaactctggtttccattccaaccaggtatccccaaattaaatctgaattatcatcagttttcaatttgttgtcatccataagcatccagatacacccccacacccaaagaagcagctgttccctttcagtttcttgtctgttccttttatcctcagtgagagtgagctgaaacgtctccagcctgatcctgtctacttaacccccttccttgcaggaccacccacttctgttaattttttacacccctttaactttcctgctttaggacaatgaacaattagctgtcatttggtccatcccataggcaattatgtgggtttgttttctaaagcactggtaactataattagatggttcaaataatattaaaaactagtgttttctatggcacaattatgcatttgtcaaaatatacacaacttgcccgctgcagtggcttattcctgtaatgccaactactagggtggcagaggcggaaggatcactgagctcaggagttcccgaccagtgtaggcaacatagcaagaccccatctctctttttttttttttttttgagatggagtctcactctgtcacccaggctggagtacagtggtgcgatctcagctcactacaacctccgcctcccaggttcaaggaattatcctgcctcagcttcccaagtagctgggattacaggtgtgcaccaccatgcccaactaattttttgtatttttagtagagacagggtttcaccatgttgaccagcctagtctcgaactcctgacctcaggtgatacacctgcctcagcctcccaaattgctgggattacaggtgtgagtcaccacgcccagccaagaccccatctctaaaaaaaaattttttttaggctggacctggtggctcaagcctgtaatgccggcactttgggaggccaaggcgggcagatcacgaggtcaggagttcgagactagcctggccaatatggtgaaactccatctctactaaaaatacaaaaattagctgggcgcagttgtgggcttctgtaaccccagctcctctggaggctgaggcaggagaatcacttgaacctgggaggcagaggttgcaatgagctgagatcgtaccactgcacttcagcctgggtgacagagcaagactgtcttggaaaaaaaaaaaaaatttagcctgatgtgggaagctgaggtaggaggattcctggagcccagtctgaggctacagtgagttatcacaccattgcactctagcctgagcaacagagtgacggagtgagtgagaccccatctctaaaacaaaacaaaagcaaacacacacaacttgatataaaaaagtaggccaggcacggtggctcacacctgtaatcccagcactttgggaggccgaggcgggcggatcccaaggtcaggagatcaagaccatcctggctaacacggtgaaactccatctctactaaaatataaaaaaaaaaaattagctgggcgtggtggcaggcccctgtagtcccagctactcgggaggctgggtcaggagaatggcgtgaacctggaagatggaggttgcagtgagccgagatagcgccactgcactccagactgggggacagagcaagactctgtctcaaaaacacacacacacacacacacacacacaaaagtagattttacccttctaacgtgtacatgagaaataaggaaagatttttaaatcagtaatttaagtttctacctcaggaaactagaaaaacaagtgcaaaataaatccaaaacaagtgcaaggaagaaaatgataaagaactgaagtcagtgattgaaaataggacaactaaagctcattcttaaaaaaattaacaaaaatgattaacttatagcaacattgacagaaataaaaagatacaaatcaccagtattaaaaatgaaatactttattacagaccttgccaacatcaaaaataaaaaaggatctctactaacaacttcacacttataaattcaacagcttggaagaaatggattaatttcttaaaaaccacaaactaccaaaactcacccatgatgaagttgagtatcgaaaagccctatatccagtaaagaaattgaactactaatgatctacccaaacagaaatctctaggcccagatggagaactgtaccagtcatttaaagaataatttatatcagctttacatgatattccagaaaaatagaagagggggaatatatctctcaactcattttatgaggccagtattacactaccctgataacaaaccgaagacagcatgactgcatgcacacgtgtgcacacacacacaactacaggccaatatctgtcatgaacttacatgtgaaaatcctcaacaaaatatttgaaaacaaaattcaaaatatataagaagtatgcaccatgaccaagtgggatttattccacgtatgtaagggtaagttgaatatttcaaaatacatcaatgtaattcatctttaaaactgtacagcaggccaggcgcagtagctcacacctgtaatcccagcactttgggaggccgaggtgggcagatcacgaggtcaagagattgagaccatcctggccaacatggtgaaaccccgtctatactaaaaatataaaaattagctaggtgtggtggcatgcacctgtaattccagctactcgggaggctgaggcaggagaatcgtttgaatccaggagttggagattgcagtgagccgagactgtgccattgcactccagcctgggtgacagagcaaaactccatcccaaaaaaaagaaaaaaaaaacattataaaatgggcagtagacattaacagatatttcactgagaaaaacatacagatgacaagcacatgaaaaaacattcactatcattagtgatttgggaaacgcaaattcaaatcacaatgaagtgctactacacacctatcaagatatcaagatggcttaagtaaaaaatagtctgaggcaggaggttggtgtgaacctgggaggtggagcttacagtgaaccgagattgtgtccctgcaccccagcctgggcgacagagcgtgactccgtctcaaaaaagaaaagaaatagtgacagcggctgggtgcagtggctcatgcttgtaagcccagcactttgggaggctgaggcgggtggatcacgcggtcaggagttcgagaccagcctggccaagatggtgaaactccatctctactaaaaatacaaaaattagccaggcatggtggtgcgcacctgtaatcccagctactcgggaggctgaggcagagaactgcttgtacctggaggcggaggttgcagtgagccaagacacgccattgcactccagcctgggcaacagagcaagactctgtctaaaaaaaaaaaaaaaaaaaatagtgacaccatcaaatgttgagggtacatagaagctgtatcactaatacattaccagtgggagtggaaaatggtacagcaattctagaaaacagtttggcagtttcttatgaattaaacatcaaattaccatataacctagcaattgcacttttggggatttatcccagataaatatattttctcaccaaaacctgtacacagattaatatcagtttatttgaacagccaaaaactgagaataaggtaaatggttaaacaaattgtggcacacacatatggaatgctattcaggaaaataaatggactactgatacacacaaaaacttggattaatctctagagaagtacaccaaatgcaagaaatcagtcccataaggttgcatattgtattattccatttatataacatttctgaaatcataacatttttaatggaggacagattcttgtgttgccaaggtttaggaatgggggtagaatggtgggaagtgggtaagtgttgttataaaagatctgtatgttgaaaacgtcaaaacgcttatgagagaaataagggaaatccaaatcctaaataaatggaaatatgtatcatatttgtggtttggaacaataaatagtagaatgtcagttctctctagatttacctataaatttattgcgatcccaatggaaattccagcaggagtttttgtagacattaacaagttaatcaaatttatttggaaaagcagaagaaactagaatagccaaaacatcttttgtcaaagaggaacagagctggaagactcgcactccctgacttcgaaacttactgtaaagatacagcaatctaaacattgtgtcagagaaaggataaacacatagatcatggaccataattgagaatacataaatagaccttcgtgtatatggtcaattgatttttgacaaagttgcaagggcaaatcaatgaaaatagtggtttaaaaaaatggtgctgcaacaattgaaagtcaatatacaaaacaaatgaacctcaatccataactcatcccatattcaaacttaatagatgaagatttaaatgtaaaaccttcacttaacaaaaattctagacactgcaccacagcaaagataaagagtttaccactaataaaccctcaatgaaggaacttccaaagattgccatcagagaaaagtagtgggtgaagccaagaggtaatacatgtgaacctaaactagtattggctatgtaaactaacaataataatgttatgttactggttatgcaacaaaaataacgcagaactaaaacagtgagtaacatggtatgtgttcaggatgatcagagataaaaatgttgggacgctgggtgcagtggctcacgcctgtaatcccagcactttgggaggccaaggcagacagatcacctgaggtcaggaattccagaccagccagaccaacatggtgaaaccctctctctactaaatacaaaaaattagccagctgtggtggtgggtgtgtgtaattccagctacttgggaggctgaggcaggagaatcgcttgaacctgggaggtggaagttgtagtgagccaagactgtgccactgcattccagcctgggcaacaagagtgaaaactctgtctcaaaaaaaaaaaaaaaaaaattggagccaggcgtggtggctcacacctgtaatcccagcactttgggaggccgaggctggtggatcacctgaggtcaggagttcgagaccagcccgaccaacatggagaaaccccagtctctactaaaaatacaaaaattagctgggcgtggtgtcaggcacctgtcatcccagctactcaggaggctgaggcaggagaaatgcttgaacctgggaggaagaggttgcagtgagttgagatcgcgccatcgcactccagcctgggcaagaagagcaaaactctgcctcaaaaaaaaaaaaaaaattgggatgcctctctgttggttatggagagagcagattaagtgattacctttagactttgttaagtcttgtatacatagcaaacaccttaacattaacacttaaagaatagatattgaaaatggaagtgagaaagcttgattaaatccaaaagaagatagaaaataataagggacaaaaaacacaaggccaatggaaagcaaaaagtaaaatgatagaaataaacataactgtatcaataatcttttttttttttttttttttttttgagacggagtctcgctctgtcgcccaggctggagtgcagtggtgccatcttggctcactgcaagctctgcctcacgggttcacgccattctcctgcctcagcctcctgagtagctgggattacaggcacccaccaccacacccggctaattttttgtatttttagtagagatgggggttcaccatgttagccaggatggtctcgatctcctgacctagtaatctgcccacctcggcttcccaaaatgctgggattacaggcgtgagccaccgcacccagccaactgtatcaataatcacaaatcatataaactcatcggtttaaaagcagaatgtcgcattatgctttaaaatattccatgtatatgtttataaaataaatgcataaaaatgttataaaaagtgagtatgagtggaaaaatatatacctggcaaacattaattgggtaacataagctttagggaaaccatcgttaggaataaaaagggtcattatataaggataaaagtacaattttctatgaagatataatgattctatgttcaaaatttcaaattaacatagaccaaagaatgtattatacaaaataggacaattagaggaataaactacaaatccacattaccatttggaaatttttgcacacttttcttaggaattgatagagcaggacagcacataattggtaagtgatctggtttggctgtgtccccacccaaatctcttcttgaattgcagctcccttaattcccacatgtgggagggacctggtgggagataacttgttttggctatgtccccacccaaatctcatcttgaattgcagctcccacaattcccacatattgtgggagggacccagtgggagataactgaatcttgggagtggtttccctgatactgttctcatggtagtgaataagtctcatgagatctggtgatttgacaaggggtttcctttttgcttggtgctctgattctctcttgccaccagcatgtcagaagtgcctttcacccaccatgattatgaggcctccccagccacatggaactgtgagtccattaaacctcttttactttataaattactcagtcttgggtatgtctttatcagcagcgtgaaaatggactaatacagtaagtatatgaaaaatttgatttatacaatgaatacggtgggtttaactgatataggacaccacacaaaatgggatataatctaaagtggcacttactggaaaatgcattaccccaaatgcctctattaggaaaacaggatcaatggaaatgtaagtgttaagcatccaacccaagagattaggaagaatcctagaaaatatccaaataaaagtagcaaaaaggaaataatgaagatgaaaatgagaattaacagataataaatccacatctaaaagcttctttcttgaaaagactagtgaggcagggcgcggtggctaacgcctgtaatcccagtactttgggaggccaaggcagatggatcacgaggtcaggagatcaagaccagcctggccaacatggtgaaaccccgtctctaccaaagatgcaaaaaattagccaggtgtggtggtgtgtgcctgtaatcccagctacttgggaagctgaggcaggggaattgcttgaaccctggaggtggaggttgcagtgagccgagattgtgccgttgcactccagcctgggcgacagggtgagacgctgtctgaaataaataaataaataaagactaatgaaatgcaaaacttccattgctagattagaaatagacccagaatagtcaacacagtattgaaggagaagagcaatgttggggagctgacactacccaacttcaaaatttcctataaagcgatagtaatggagacactctgatactggcagaagaatggacaaagaggtcagtggggcagaataaagagcccagaagcagcgccacacaaatatagtcaactgatgtttgacaaaggagcaagggcaatgcaatggagaaaggatagtctttttagcaaatggtgctggaaaaactggacatccacaggcaaaaatgtgaatctagacaaagaccttatacctttcacagaaactaactcaaaatggatcaaagacctgaatgtgaaatgcaaaactatacaactcctggaagacagcacagaagaaaatctaggtgatcctgggtttagtgatattttctcagataccataccaaaagtacaatctgtgaaacaaaaaactgataagttgaacttcattaaaatttaaaacttgtggccaggcgtggtggcacatgcctgtaatcccagctacttgggaggctgaggcagaagaatcacttgaacgcgggaggtggaggttgcatggggccgagatcgcgccattgcactccagcctgggcaacaagagcaagactccgtcaggaaaaaaaaaaaaaagggccaggcgtggtggctcacgcctgtaatcccagcactttgggaggctgagacgggtggatcacaaggtcaggagttcaagaccagccgggccaagagaccagcctggccaatatggtgaaaccccgtctctactaaaaatacaaaaattagccgggcgtgatggcgggcacctatcatcccagctacttgggaggctgaggcaagagaattgcttcaacccgggaggcagaggtttcagtgagccgagatcgtgccattgcactccagcctgggcaacagagcgggactccgactcaaaaaaaaaaaaaaagtaaactataaacttcagttaataataatatattaatattggtgtatcagttgtaacaaatgtaccagagtaatatgaaacgtaaatataggggaaacactatggtagaacataaggggaacactaaggtagaaagggatggggggaactccttgttctttccagttgatttttctgtaaacccaacacgctctaaacaaaaataaaatatattaatttttttttagtgcaactaaacaaggtccatgaaaaagagaatattgggtgggcgcggtggctcatgcctgtaatcccagcactttgggaggctaaggcaggaggctcgcttgagaccagtctgggcaatagagtgagacctcgtctctataaaaaatttaaaaattagctgagtgtggtgacacacacttgtagtcccagctactcgggaggctgaagtgggaggattgcctgagcccaggaggcagaggttgcaatgagattgtggcactgcactccagcctgggtgacagaaagagaccctgtctccaaaaaagaaaaaaatattacaggttggtcttaggatatatatttttaaatcctggtgaaggataagtgagcttttctcagggaagcaggtgggacagaggggaatcactttgggagtggcctcccactagtgacctcacagaccccctcactgacccggcagaccccacatcactgacacgtaagaccccagatgacgaggcctgcacatctcctgtgacggacagctgagaccccgtaccactgcccggacccagccctggcccaatggggctcgcacctccaaagcccacgtccacacgttccgagcccgccgtcccatcgcaaacatccgggggccgccactgcgcctaacgaccgcccatctctgacgcctcgggtcggcgtttgatttttaacccaagaaaagagtaaaagtcaagcggaaatcaacgcagaagcggtgctgcagcctctgagcttcctgacggccgtgtccagagccgggctcctcctccggcggcagccgccgggctcacttcagtgcgctcagcttctcgcggggacaagcgtctgggcggggacggcccgaggcgggggtgtggcgaggctggagaacgctgaaagctggtgggcttgggaagacaaacgacgctctgaaatttggctcccaggtaatacgttccggcacttcgcggcggctcagtcagcgctgctgggttccacccctcctatgcgttgctcagggacaggtttcttagtgacaggcccctcactattcccattggccaggacgcccaaggcccacgcagccgttggctaaaattgttgtctgtttcagacacgttggcgaattccccgcctctacgttgccgggagacagcatgttgcctagcagcgtgcggctcccattgcctttgggcgcggctctccgccccgacccgcccctctgggacccatccgggtctgcgcctcagctagacagggcgggctgcggcgcgcagtcttaggcgtgcgcttcggggaaggggccctcgcgtgggaggagcgcgtctgcgagggatgcgccggcgcaggcgagacccggagccgcgtggtctctgcgcagtgcgtcgtgtggggcggccgaccccggcccgggtttccctgctcgttttcgtccgggcgggcgtcttggttcccgttccaggccagccccatcctaggtcgctgcttcatccagcgcttggggcatttgtgtcgttggcgttgttttcctcttaactacaaactttaaatgtgttcatctactcgtgacggcgagtttagcagactttcattcccagaagacgtgtcacacgatctgtatatttttcatacagaaattgacggacgtcgttacttctaaatttccacaggggctggttcatcccgcggctttacctagagaaaaacgtctgaggccgggcgcggcggctcccgcctgtaatcccaacactttgggaggccgaggcgggcgaatcacgaggtcaggagttcgagaccagactggccaacatggtgaaacctcgtctctactaaaaatacaaaaaaaaaaaaaaaaaaaaaaaaaaaaaaaaatagccgggcgtggcggcgcatgcctgtaatcccagctactcaggaggctgaggcaggagaatcgcttgaacccgagatggtgccactgcactccagcatgggcgatagagcgagactccgtctcaaaaaataataataaaataaaaaccatggacaatgggaggagaacatcacacaccggggcctgtcgggggtggggggccaggggagggatagcatcaggagaaatacgtaatgtagataactggttgatgggtgcagcaaaccaccatggcacgtgtatacctatgtaacaaacctgcaggttctgcacatgtaccccagaacttaaagtataattttaaaaagagagagagaagcgtctgagcgtttctcagggacggcgggtggcagccaggacgggctggggcggtgaagtgcggggcgggaagcgacgcgtgcgcctcctgcgctggcttctgtgaaaggagggactgattggagatcactgctgaaaagtggactacgcatcagtgaatagttagtgaaatatgagcttctacattcaaaaccatttgtgctttaaagattttgtttcaccatggtatcgtatttatctgaatcctatgttgcttttgctttgtaatctgaattgtctgtcactcccccagtctcagttttttgttaactgttcaatattcatagaaatgtctctacatgggaccctttaacagagagagtaatctgtcatagcaagtatttcctgagtagtttcactgattctatgtttttagcaggtcaatgttttcctggttagttttatgattttatctcaatttttaccagtttgtaaccagaactggagtattaatgagaagatatataattgtaagtaaatattctatttattagaagaataaatcaccctgacagtcaacaaataatctttttaaaatttttcattgatgtattgatttatttattagagggagagtctctgtcgcctcatctggagtgcagtggtgccatcatagctcacttcagcctcgaactcctgggctcaagtggtcctcccgccttagcctcccaagtagctgagactacaggcacgtgccactgcgtcaggctgatttttgtatttttattggagatgaggtctgcctaggttgcccaggctggtctcaaacgcctgggctcaagccatcctcccgcctcagcctcgcagagtgctgggattagaggcacgagccaccacactcggcaataataacaatctttttaatggatccactcaaacaaaatagaacctgctcaactaaaatttcctgtctatcctcaaataatattaaaaaccatcctatcttaatatgaattaccctaaaatctattattggcaaatataagttttcagtacatcagtgaatgctgaagttagttatattggggaaactggcttttgaaatatattttttaatcgattgtagatagcattgtgtgttcagaagctgtgatggaagtggcattctacaccggacatctgctgatacaatacacatctctatagaatctacttattataaggaccacttcatgtattatcattatgaaaatcatgatctgcgaaaataggaagaaaattaaagctagaaatgtatgtgatttaatctctctgttttggctggcctcaattctgcagcttcctaacacgtttgaagcaagggtccttgcctgtgattgtattattaatacattctatgtaagcttagtttaaatgatattgttccagccaggcgtggtggcacctatagtaacagctactcaggaggctgaggtgggaggatcccttgatcctaggaattcgaggcttcagtgagctataatggtgccagtgcactccagcctgggtgacagcaacaccctgaaaaaaaattaaaaataagataaaatgatattgttcatgtgaaagaatgcccattcttttgcaaagatagtgctcttttggtagcttttagaagttttggatttggaagttgagttcttcaagttcattattattcagggttgtatttacaattctaggtttacaaacagtttgtcaacatctacgaaattaattgcggggatttttgtcggagcggcaccaactctacagttgggaagaattgacatcttagcaatattgtgactacaataatgaaaaaggagtatgctccggttatgttttccttttttttctctctttctctctctttcttttccgtccctcctttccttccttccttccctccctccctcccttaagatagagtctccctctgttcccccggctggagtgcagtggccccatcatggctcactgcaacctccctctccagggctcaagccatccttccatctcagcctcccgagtagccgggactacagccgcacaccaccaagccagtctaatttttgtatttttagtaacgacagggcttggccatatttcccaggctcctctggactcctgacctcaggcgagccctctgtgctccggaccttccggagtgctgggattacaggtgtgagccactgcgccggcctacgttttcttttaatagtgtttcatagttttctggatacagatggtttcatattttgttagagcaaggatttcttggatttgttgtatccaaggatttctttttgttgttttattgcaaacggtaggcctttaaagttttccagtttcagttgactttaatatattggctttgtacttttgcttcttgttacctcccccactcctatcaagccacagaagaggaggctccaccgcacttttgatctccaaaattatagtttaggagatacggttcagaaaagagcggggaggcgcgcttctttcgctgatggggtgcgctcagctcctgcgctgcccctggtggccggcagggcgcgcccaaccctacgattgtggctcgtggcgcgcatgcgcattccgcccgcggcgtcgccacagggtgagggagcttggcttcctgagaagccacccaggagccccggcttggggatgacttgaggccgcgtcttcggtgaggaaaagcttcccagaggaactctgccggggaatctctagagtcattgtccttttttaaaaatgtttttataggccgggcgcggtggctctcgcctgtaatcccagcactttgggaggccgaggcgggtagatcatgaggtcaggatatccagaccagcctggccaacaaggtgaaatccagtctctactaaaaatacaaaaattagccgggcgtggtgccgcgcgcctgtaatcccagctactcaggaggctgaggcaggggaattgcttgaacctgggtggccgaggttgcagtgagccgagatcgtgccattgcactccagcctgggcaacttgagcaagactccgtctctaaataaataaataaataaataacgttttttcgctttttttttttttttctctgagacagagtctgtttctgtcgcccaggctggaggtggtttcggctcactgcaaccgccgcctcccgggttcaagcgattctcctgcctcagcctccagggtagctgggattacaggctcccgccaccacgcccagctaatttttgtatttgtagtagagatggggtttcaccatcttggccaggctggtcttgaactcctgaccttgtgatccatccgcctcggcctcccaaagtgctgagattacaggcatgagccgctgtgccccgccatgcgccgcattttctttctttctttctttttttttttttttttttgagacggagtctcgctctgttgcccaggctggagtgcagtggcgcgatctcagctcattgcaacctccacctcccgggttcacgccattctcctgtctcagcctctccagtagctgggactgcaggcgcccgccaccacgcccggctaattttttgtatttttagtagagacgggggtttcaccgtgtcagccaggatggtctcgatctcctgacctcatgatccgcccgcctgggcctcccaaagtactgggattacaggcgccgcattttcttatccattcatctgttgatggacatttaggttgcttccaaatcttggctgttgtgaacagtgctgcagcaaacatggcagtgcagacatctcttagacatgctgattccctttccggtatctagccatcagggattgctggagcttgtggtagctcaatttttagttttctgaggtacctccaaacagttctcggtagtggttgtactaatttacattccttccaaccgtgtatgagggttcccttttctccacgtccaccagagacactttccttaaattcataagcagagattccctcatgttctggaatgttcccatgcgttattctttactttctctggaaagtaaagatctcggagtgagatctgttttaggcatttcccttcacagaggggttggcagcgggaaacagagagcacctggtgtttccttaatcaggattgttctgggaggaaatccatgcaagtccagagaagtgcgtggcccaggtgagacttgcagagaacagtgttcgtgcctacagcttggggagtctgggagaaggaaaatgagcactcctgtggatgtgctttattcatttcttcctgtcttattttccctacagggttaaagtagttgtaaagaagaaagttttgcaaagtacatgtattaaaactcaaaacattaggccaggtgcagtggctcatgcctgtaatcccagcattttgggaggctgaggtgggcagatcacacggtcattagatcgagaccatcctggctaacacggtgaaaccccgtccctactaaaaatacaaaaattagccgggcgtggtggcacgcgcctgtagtcccagctactcgggaggctgaggcaggagaattgcttaaacccagaaggcagaggttgcagtcagccgagattgcgccattgcactccagcctgggcaacagagcaagactctgtctcaaaataaaaaataataaaatagaataaaaatcattatttccacttaaaatagttcatagcggctgggcacagtggctcacaccagtaatcccagcactttgggaggccaaggcaggcagatcacctgaggtcaggagttcaagaccagcctggccaacatggtgaaaccctgtctctactaaaaatacaaaaaaaagcagctgggtatggtggtgcatgccagtagtcccagctactagggaggctgaggcaggagaatcgcttgaacccgggaggcagaggttgcagtgatcccagatcccgccactgcactccagcctgggcaatagaatgagactccatctcaaaaaaaaaaaaaaagttcatatcaaaaggaaaatataggctgctctgcctgtggagtagctattcttttgtttctttacatctctaataaacttgctttcacttacaaaaaaaaaaaaaaaaaaaaaaggaaaatcctagcactctgggaagctgaggcaggcagatcacctaaggtcaggagttcgagaccagaatacaaaaattagccgggtgtggtggtgcatgcctgtaatcccagctactcaggaggctgagacaggagagttgcttgaaactgggaagcggaagaggttgcagtgagccgagatcatgccactgcactccagcctgggcaacagagcaagactccatctcaaaaaaaaaaaaaaaagggctgggcacggtggctcatgcctgtaatcccagcagtttgggaggccaaggcaggcagatcacctgaggtcaggagttcgagcccagcctggccaacatggagaaaccctgtctctactaaaaatataaaattaactgggtgtggtggcacatgcctgtaatccgagctactggggatgctaaggcaggagaatcgcttgaaccagggaggtggaggttgtggtgagccgagattgcgccactgcactccagcctgggcaacagtagcgaaactctgtctcaaaaaaaaaaaaaaagaaaatgtaaaaggtaattttacttttctggttttaatagaagcaaattcctcagtaatctttttttttttttttttgagacagagtctctcgctctgtacccaggctggagtgcagtggccgatctcggctcactgcagcctgcgcctcccgggttcaagcaattctcctgcctcagcctcccgagtagctaggactacaggagtgcgctgccacatctggctaatttttgtattttttagtagagacaaggtttcatcaggtcgggcaggatggtcttgatctcctgaccttgtgatctgcccatcccagcctcccaaagtgctgggattacaggcatgagccaccgcacccagcccatcagtaatcttttaaaaatgtacttattagctcacttcattttcacttaagagaatttccatgtttgataattttttatgactcactgactatctcaaaaggttttctgtggccaggtgtggtggctcacgcctgtaatcccagcactttgggaggccgagactagcggatcacctgaggtcaggagttggagaccagccgggccaagatggcaaaaccccatctctactaaatatacaaaaattagttgggcctggtggtgggcacctgtaatctcaggtactcaggaggctgaggcgggggagaattgcttgaaccctggagacagaggttgcagtgagccgagattgtgccactgcactccatcctaggtgacagagtgagactctgtctcaaaaacaaataaataaataaataaatgggttttttttgtttgttttttgagacagggtctcactctgttgcccaggctggagtccagtggtgctatcatggctcattgcagcctccacctcccgggctcaagcaatcctcccaccttagcctcctacattagcctccctagtacaggtgtgcatcaccacatccggctaattttttgtatttttggtggagacggggtttcaccatgttggccaggctggtctcgaactcctgagctcaggcaatccacccaccttggcttcccaaagtgatgggatgacaggcttgagctcccagccagctgctagttttgagtggggcccagaacaagtgaaggctctgcaacagatgcaggctgttgtgcaaggtgctctaccacttggtcacatgacccagcagatccaatggtgcttgacatgtcagtggcagagagcgatgctgggtggagccttggcaggcccgcataggagaatcacaatgtagacttttaggattttggtgcaaagccctgacattgtctgcagataattactcttctttttttttttttttttttttttgacttcaacgttttataacaatagagagtagctgaaaatactacatgctaacacagacaatatgatacacaacctcgggggacaagttggcagggagcacgtggcagaggccacaggtttagactaagagccttttgatggactgctgaatggattggatctgctgtttcagctgtgagccttctttgatggtgacagaacaggtgatgacaggcctggagaccccacaggctcttcccagggcctgcttggagcgcacaaatatgaagggcacgttcttgtcttcacacagcagtggaggtgcggaatgatctcctgtggctcggtgtctgcagccatcacgatgaactcagagatgcccctgttaagggttttggtggcctcgttggctcttttctgaagctgcttgtagttacacgactactgaatgaactccagtggtttcttggtgaggtgggcatcggcgaggggctaggccttcagattcacattggcctcagtcatggctgtggttccgtgagctcggcactcctagggccgcgcagccgaggtctgagaagcgctctcttccacccgtactcttcttttgacaaccagcttttggcttgctacaggacggtattagggactgaataattaagcatggcccaccaaattactgcatgacctgagctgctcatcacgaactcagtgttatctgaccccccaagccataaagtgaggcatacagagtagtactccatcatcacgcaatgacagtgcaaaactcacagaataccttacccaccgttgtggtgttagagaaacctgtttaccaggcctctggtttcataaaacatgaccagagtgactctatcttaaggtaagtagctaggcactcacaagacacctgtaaggttgctatggtctgaaaatagccacattctaagctgaccaccaattataattgcagaaatatttatggtcatacgggacatctcccaccaagcctgcagaatgtccagatgtcctaagagtgcagcccactttactcagagagaaccttaatgagcaggcttaggttgaaggattaatggtcactgatagcaccaatagccctaccttcagtgagcacatctgcacattccaggtttaattgtagctccttaagagtttcctgtacagcattcctcttcctgctttctgaggatgccttactctgtaacagagtagattctgataaacttgcttctttcacggtgctcagtgactcacctcaaattctttcctgtgtaagatctaagagccctttcttggagcctggactggaactcctctttttcctgtaacaatgacatcgcttctgatcgaagaacccacttcacagtaaatgaggtgcaccgtgggcccatgctcatggaattcatgggtcttgctgtgttctccatcatcctaccgattttggttctgtttttctggtggaactgactgagagaaacatatagtgaaaggtaagtcttcattaccccttgactttaagtccgtgtttcagaggaagccaccgccatttccttgtgtatccttctagagagattttcattttcataaacatatttgtatgtacacattattaattaaaagagtcaagctctacaaaatttgaagaggtttattctgagccaaaagtgagtgatcacggcccacggcacagtcccaagaggtcctaagaccctgtgcccatggtggtggggctacagcttggttttatactttttttttttttaaagacagagtctcactctgtcacccaggctggagtgcagtgacgcaatctcggctcactgcaacctctgcctcccgggttcaagcaattctctgcctcagcctcctgagtagctgagattacaggcacctgccaacaagcccgactaatttttttttgtatttttagtagacaaggggtttcaccatcttggccaggttggtcttgaactcctgacctcgtgatctttcactcgcgtccgtgtgaagagaccaccaaacaggctttgtgtgagcaataaagctttttaatcacctgggtgcaggcgggctgagtctgaaaagagggtcagcaaaggggagatggggtggggccgttttataagatttaagtaggtaaaggaaaattacagtcaaagggggttgttctctggcgggcaggggtaggggtcacaaggtgctcagtgagggagctttttgagccaggatgagccaggagaaggaatttcacaaggtaattgtcatcagttaaggcaaggaccggccattttcacttcttttgtagtggaatgtcatcagttaaggcaggaacaggccattttcacttcttttgtgattcttcagttacttcaggtcatctgggcatatacatgcaggtcacaggggatgtgatggcttagcttgggcccagaggcctgacattcctgccttcttatattaataagaaaaataacataaaatagtgttgaagtgttggggcagcgaaaaaaatttttttggggggctggcatggagagataatgggcgatgtttctcagggctgcttccagcgggattaggggtggcgtgggaacctagaatgggagaggtcaagttgaaggaggattttgtggtaaggggtgatattgtgggattgttagaaggagcatttgtcatatagaatgattggtgatggcctggatacggttttggatgaattgagaaactaaacggaagatacaatgtctgaataaaagaaggagaaaaatgggtattaaaggactaagaattgggaggacctaggacatccaattagagagtgcccaagggagttcagcgtaattacttgcttggttggcaagtttttgggccctatccttgagtttttttatgttgtcatacaccaggccagattaatttaggtaaaaacaacactcttcatttaaaaatatacagagtcctcctttttcagcattgagtaagtcaaggcctcagcgattttggaggacagctaaagagtcaacttgggcctggaggactgataaagtttgtgatatgtctgtgatgctagcagagaagtcattagagaggctacagaaggttgtgacagaggttgaaatgcctgctatcccagtactgagagcaatagtagaggcagaaagtcttaaaccgacaagcaagggaattagtggaataactcttttttgtcatgttggtgtcatgaggggaacaaggagctttttgctcctattggcaaattgaattttgggagtaaggaaaactaatgtgcatgtgcctgtccaattagcaggtagacacatgtaggtagaggatccacagaggaagaagggaccttgtgccaggcaaaattggagatgcaaagtaaaaagatgagaaggagtgctgaaaggggtgtcttgtacctacactcctagggatccagctagggcagcagccatcagaggttgtaatggggactggtggggtgactgcatagagggggacgttcgattttcatggtgtatgagaaaacgtctagtgtctatgagcaacctttcatgatggggtaactgcatagaggggaggatcgattttcatggtgtgtgagaaaacattgagtgtctacgagcaacctttcatgatggggtaactgcatagaggggaggatcgattttcatggtgtgtgagaaaacgttgagtgtctacgagcaacctttcatgatggggtaactgcgtagagggggaggttagactttcatggtgtatgagaaaacgtcgagtgtctacgagcaacctttcatgatggggtaactgcgtagagagggaggttcgattttcatggtgtatgaggaaacgctgagtgtctacaagcaacctttcatgatggggtaactgcgtagagggggaggttccattttcatggtgtgtgagaaaatgtcgagtgtctacgagcaacctttcatgatggggtaactgcgtagaggagaggatcgattttcatggtgtgtgagaaaacgtcaagtgtctacgagcaacctttcatgatggggtaactgcatagagggggaggttagactttcatgatgtatgagaaaatgtcgagtgtctatgagcaacctttcatgatgaggtaactgcgtagagagggaggttcgattttcatggtgtgcgagaaaacgtcgagtgtctacgagcaacctttcatgatgaggtaactgcgtcgaggggagggtcgattttcatggtgtgtgagaaaacgtcaagtgtctacgagcaacctttcatgatggggtaactgcatagagggggaggttagactttcatggtgtatgagaaaatgttgagtgtctatgggcaacctttcatgatggggtaactgcgtagagagggaggttcgattttcatggtgtatgaggaaatgctgagtgtctacgagcaacctttcatgatggggtaactgcgtagaggaggaggtttgattttcatggtgtatgaggaaacgctgagtgtctacaagcaacttttcatgatggggtaactgcgtagagggggaggttcgattttcatggtgtgcgagaaagcgttgcgtgtctacgagcaacctttcatgatgaggtaactgcgtagaggggagggtcgattttcatggtgtgtgagaagacatcaagtgtctacgagcaacctttcatgatggggtaactgcatagagggggaggttagactttcatggtatatgagaaaatgtcgagtgtctatgggcaacctttcatgatggggtaactgcgtagagagggaggttcgattttcatggtgtatgaggaaacgctgagtgtctacgagcaacctttcatgatggggtaactgcgtagagggggaggttcgattttcatggtgtgcgagaaaacgtcgcgtttctacgagcaacctttcatcatgaggtaactgcgtagaggggagggtcgattttcatggtgtgtgagcaaatgtcaagtgtctacgagcaacctttcatgatggggtaactgcatagagggggaggttagactttcatggtgtatgagaaaatgtcgagtgtctatgagcaacctttcatgatggggtaactgcgtagagggggaggttcgattttcatggtgtatgaggaaacgctgagtgtctacgagcaacctttcatgatggggtaactgcgtagagggggaggttcgattttcatggtgtatgaggaaacgctgagtgtctacgagcaacctttcatgatggggtaactgcgtagagggggaggttcgattttcatggtgtgcgagaaaacgtcgcgtttctacgagcaacctttcatcatgaggtaactgcgtagaggggagggtcgattttcatggtgtgtgagcaaatgtcaagtgtctacgagcaacctttcatgatggggtaactgcatagagggggaggttcgattttcatggtgtatgagaaaacgtcaagtatctacgagcaacctttcactattatttatgggtctgggtataagtaaacaagaagagggcctgggaggagagcctgatgagcaaggggaaggtagccaaggatggagtgaaatgcagggtaagtgtcttcttaagcaataattactactaatatttttaagtttgtcagtattgatagagggcttatctgtaatatggagctggaaggcttcaattgtttcagtgatgtgtgtagttgggctttggagatgaagaataaaggaacatcgagaaggtgaaaggttacctaggggaattccagtgggtctttgctgagagatacataaaggagcggccttgagcagagtttttattaaagaggcattaatgatggaggaactttgcgtagtgaggaaacctctttcagcctatataacagcatggtggtgcagaatatggaaggcatatttagagtcagtataaatattgacatgtagtccttttgcaagagtgagggcgccgggtgtggtggctcacacctgtaatcccagcactttgggaggctgagacgggcagatcacctgagtttgggagttcaagaccagcctgaccaacatggagaaaccctgtctctactacaaatacaaaattagccgggcgtggtggtgcatgcctgtcatcccagctacttgggaggctgaggcaaaagaattgcttgaacccaggaggcagaggttgcagtgagccgagattgcgccattgcactccagcctgggcaataagagcgaaactccatctcaaaaaaaaaaaaaaaaaaaaaaaaaaaagagtgagggactgagttaaggcaactagttcagcttcctgagaggtagtggagggaggcagagtggtagcctcaatgatagatgtggaagatactatagcatagcctgcctttgctagtgagtggcaattaggcctggtggaactgccatcaataaaccaaatgtgatcagggtgaggaacaggaaagaaggaaatatggggtgaatgtcaggtggatcagagagatacagtcatgagggtcaggtgtggtatccggaataatgtgggaggccgaattgaagtctgggccaggagcaatggtaattgtgggagactaaaggaagagtgagtatagctgaaggagccagggagcagaaattatatgtatcaggtgtgaggaagaaaatagattttggaagttatgagagctgcagagagtgagtggagcatagtttgtgatttttgagggcctctgaaagtattagggcggcagcagccactgcatggagacatgatggccagcctaaaacagtaaagtcaagttgtttggccaaaaggctacaggatgcaatcctggtccttgtgtaacaattctgactgcacagctctgcacttcggctgtgtgtaatgaaaagggttgggatgaatcagggagagctagtgggggcagtctctaaaactgtctttaaggaaaggaaagaggagtggggaaaggatttaggatctatggggtcagctaggtttccttttgtgagtttatatgatggttttgttaggatggcaaaaccatgtatccaaagttgaacgtatctaaccatgcctaggaaggaaaggagttgttttgtagacggtgttggggtttgagatatcagttggacatgatcagcagggagagcacgtgtgtctttatgaagaattatcatgaggtaggtaacagatgaagaaatttgagctttggagggggatacctgatatcctttggagaataaatgttgaaggagcaggagggtgtcttgttgagaatattcaaaggaggggctacaaagaagaaggtcatcaacatattgaataaggtgagaagcggaggggtggaaagaaagtaaatcatgagaaagagcttggctgaagtaatgagggctgtccccgaaaccttgcggcagcacagcccaggtaagctgctgggaccgatgggtgtcagggtcagtccaggtaaaagcaaagagaggctgggacgaggggtgcagcggaatagtgaaaaaagcatctttaagatcaagaacggaatagtgagttgtggaggaaggtattgaggacaaaagagtgtacggtggggcaccacgtggtgactaggcaaaacaatttggttgataaggcgcagatcctgaactaacctgtaagacttgtctggtttttggacggtaaaatgggggaattgtaaggagagtttataggttttagaagcccatgctgtagcaggcgagtggtaacaggctttaatccttttaaagcatgccacgggatgggatattggcattgagcggggtaaggttgattaggttttaaggggatagtaatgggcatgtgatcggttgccagggagggagtagaggtgtcctatatttgtgggttaaggtggggggatacgagaggaagacgcaaagcaggccttgggttgggaagaagggcggcaatgagatatggctgtagtccaggaatagtcagggaagcagataatttggttaaaatgtctcggcctaataagggaactgggcaagtggggataactaaaaaagagtgcataaaagaatgttgtccaagttggcaccagagtgggggagttttgaggggttttgaagcttggccgtcaacacccacaacagttataggggcaagggaaacaggcccttgaaaagaaggtaacgtggagtgggtagcccccgtatcgattaaacaggggatggacttacccgccactgtgagagttacccgaagctcagcatccatgatggtccagggggcttccagggtgatcaggcagcgtcagtcttcagccgctaagccaagcagatcttggaaggagtcagtcagagagtcttgggctagagctttaggggctctaggggtggctgccaggcgagctgggcagtctgatttccagtgggtccctgcacagatgggacacggcttgggaggaatcccaggctatgggcattccttggctcagtggccagatttctggcacttgaagcaagatcctgatggaggaagtcttgtaagaatgcttgactgctgtggcttaggtgtgtgcggcttaggcattttgaatttcttgtgtgctggaggtgtggctgggttttgtcttacagcagaggcaagtaattgtaactcagaaatgcgttgccgtctggctgcctcctctctattattgtacaccttgaaggcaaggttgattcattcctattgtggggtttgagggccagattctaatttttgaagttttttcctaatgtcaggagtggattggatgataaaatgcatattaagaataaggcggccttctggcccttctgggtctagggcggtaaagtgtctgagtgttgctgctaagcaggccatgaactgggcttggttttcgtctttaccttgggtagtttctttaagcttgtcataattaacaggtttgtaagctgcctttttaagcccttcaactaggcaggaaatcatgtaatcttgcctagctgtacctggggaatctgcctgatagttccattggggatcctctcggggaactgctctgatgccttcctggaggtatggctcgtgaagccggtggttatcagcgtgagattgggctagagaaaaaactctttcccgttcatctggggagagggtagaagtcaggatgacatttaggtcactccaggttaacttgtaggacaaagttagatatcggaattcctgtatatgtttagtggggtctgatgagaaagagcctaaatgttgactgatctgagagaggtctgatagagaaaaaggcacatgtaccctgactatgccttcagctccagccacctctctaagaggaaattgttgggcaggtggggaagagctagtcaaggaactaaactgtaagccggaccgggtgtgaggaggggaggtgacagaaagattatagggtggaggagcggaggctgaggaagaattgggacttagcttggcctggcgacgagcagcctggggaggaggggagaggtcagatgggtctgtagaaaaggaagactggaaagactcagcgacgcttggggttgggactgagggaacaggcaggagggagagaaggaggatttgggaggaatcgcattgggaacagagactagggagggaacgaagtgtgaaaaatgcctggatgtaaagcacctcagatcatttgcctattttttgacaaaaattatttaggtcttgtagaatggagaagttgaaagtgccgttttctggctatttagagccattgtcaagtttgtattggggccaagcggtgttgcagaagaaaacaaggcgtttaggttttaggtcaggtgtgagttgaagaggttttaagtttttgagaacacaggctaatggagaagagggaggaatggagggtggaagtttgcccatagtgaaggaggcaagcccagagaaaagagagggtagagacatggagagaagggggtggggggtgcttgccacccaggaaagtgaagaaggggtagagacacggagagaaggggttggggggttcttgccccccaaaaaagcattacttgccactaagggtgaaggaccaaggcaggcgtccctgcatggtcagacacctctgaaacgtgggtgaataatcaggcaggcgtccctgcgcgattaaacaccaagggaagactgtcttcccgagtccatgaccggcgccggaattttgggttcatggataaaacgcgtctcctttgtctctaccagaaaaggaaaggaactgaaattaagagtagggagagattaaagtgtggcaccaagattgaaaggagaaagaggttgaaggatagtgagagaggtgggagaagagagtgaaaagaggccattacccgatttaaaattggtgagatgttccttgggctggttggtctgaggacctgaggtcgtaggtggatctttctcacggagcaaagagtaggacaggggattgatctcccaagggaggtctcccgatccgagtcacggcaccaaatttcactcgcgtccatgtgaagagacgatcaaacaggctttgtgtgagcaataaagttttttactcacctgggtgtaggcgggctgagtccgaaaagagagtcagcaaagggcagataggggtagtggggccgttttataagatttaagtaggtaaacgaaaattacagtcaaaggggggttgttctctggtgggcaggggtgggggtcacaaggtgctcaatgagggagctttttgagccaggatgagccaggagaaggaatttcacaaggtaatgtcatcagttaaggcaaggaccggccattttcacttcttttgtagtggaatgtcatcagctaaggcaggaacaggccattttcacttcttttgtgattcttcagttacttcaggccatctaggcatatatatacatgcaggtcacaggggatgcgatggcttagcttaggttcagaggcctgacatgatccacctgcctcagcctcccaaactgctgggattacagacgtgagccactgcgcccagccggttttacaccttttagggagaaagttcatagatggattcaaagattttctgattggcacttggttgaaagagttgttattatctaaagacctggaatcaatagaaaggattgtctgggttaagctaagggagacaaagtttctattttgttattttttttttgacagggtctctgttgcccaggctggattgcagtggcacagactgtggtttaccgcagccttgtcctcccgggctcaaggaatctgcccacctcagcctcctgaatagctgggactataggcatgtgctgtcatcatgtccagctaagacggggtctccccatgttgcccaggatggtctgaattcctgggctcaagcgatccacccacctcggcctcccaaagtgctaggattacaggcttgagcaccaccactctggccattctaatgcagatgccgctccaggcagcaggcttcagagagaatagatggtaaacttttcttatcagagttaaaaaggtgccagagtcttacattctctcctggatcaggaaaagatgtggaaaaggaaggagattctctacaaagtagatttcccccaggagacagttttgcagggctacgtaaaactatgttaaataaatacatgtcagggtaaaatacttcgttttcttccagggcctgctatttgtcatgtgatgtatcttaatgctacagaccgtttggtcagccttaagttgtctgttttaacgtcgacgctggtcagttatacctgaattccaaagggaggacagtataatgggacatatccaaaccctgcttcccatcagggactgaactggtttttcagattaactttggcgttgagagactcagttcattcagttggttggggaggcttacaattttatttttggtttacaaggtatagataactatgcctatacctatatatacaaatgtttatatatgtatatatgtgtgtatatatggtttgttttacacaaatggatgcctactttatttattttggtagcgatgaggtctcaggctaatctcgaactcctgggctcgagatcctcctgcctaggccttccaaagcacttagattacaggcgtaagtcactgcgcccggtcctgcttcaccctcttaaaaccgcccttgggggctcctcatgagtgcagacattggcgcgttcctccaaaccgcacagactccccctgcgtggacgcgtctcgccgtctttactcctctttcgccgacctttcactttcagggaataccctctggcgcccttctctggagcacacacgtgaacgccgccggattccaagaagtgagatactgaggcaaaagttacgcgcgttcagaacaggaagaccccgcaaaacgccggccaagacgtggccccgcgtccaccctgcccacaagcagccgctcccactcgcggaccgcgccctgtgcctcagacttcggatctgtgtgatccactgtgtgcaactgtacccgaaagggtccccacgtgcactacctcgtgacaactaagatggaccgtcttctactcctaggagtcatccccagattagcggggctctcagaatccttggggcttccaatccggaagttccccgtcccttctgccccaacataacatggcgccgaccgcagccacttccgtgatccgcaggcgacgaagtcgcctggtcaggatcaaagatggccgagcgccctccacgcgcctactctcgcgggccactcccggctccgctttagctgccgctcttggtgagcgccgccgccagccaatcgcggggcgcagaggcctctggccccgccccgcggatcagctgagggagccgcaatgtctcttgacagcggcggcggcgcagccggttccgggttcggcgcggggcgggggtaagcgcggctggcgagggggctgcggcgggcggcgaagggggacctggttgcggccgtgggagggggcgcccgccggcgtccaggccgggctgcggggctgcgtgggcgcgggcggccgggccggggcccgcggggtggggcgggcgccgagtctcggcctctggggtcgggagtctccatgggcgtttccggggtctccgcagatgtgaatcccgatggagcggcccgaggaaggcaagcagtcgccgccgccgcagccctggggacggctcctgcgtctgggcgcggaggagggcgagccgcacgtcctcctgaggaagcgggagtggaccatcgggcggagacgaggtgcggggctgaggccggggccgggggccggggccgggcagagccaccgggttgcgggcaggccacacgggcggcggtgcagtgtgcgctccagatttttccgtggagtgaaatgtcatgtaagaactggtatttattcggtgttctgcccaccgattcttgcgcatgattcacgcacatcatttagccttcgttacaactgtataagttagttgtgttcatatactctccagaatgcaatattgtcacgttcgttgccgtacagagtatcttttctgactgtaatggaacgaaattaaaaataatagaaggaaaagtggaaaattcacagatatgtggacatgaaacaccacactcttaaagcaaccggtgggtcaaataagtctttacaacggggaccttgttttgagacaaatgaaacaaaaatagaatacaccaaaaggtatttaggatgcagccaaggcagtactcagagggaaatttatagctgtagtgcttatattaaaaaagatctcaagtcccagcccctagaatatttatttatttaataaacctggaaagctaaaaacttgaacaaagtcatacaacgggtgagagaaagttccctcagcctccacattcactgcctccagtctcccaagtgaccatctggttgtttgatttcctctgaagcctttgtatggggagagaaatgcgctggtcctgtcaacaaaaatgtttagtttgtctgaaaattaatgaattagctccgacattatactctaaaaaggagcgaggatgggaaatatttgctgtttggaagcaattttttttttttttttggttaatttcaccccttataatgtgcttgcacctggttttttttgtttttttgtttgtttttttgagataagagtcttgctctgtggcccagactggggtgcagtggtgtgatctcagctcactgcaccctctgcctcccggttcaagtgattctcccgcctcagcctcggagtagctgggactacaggcgtgcgccaccatgcctggctaatttttgtatttttagtagagatgagctttcgccatattgcccaggctggtcttgaacaactgaactaaagtgattcacctgcttcggcctccgaaagtgctgggattacaggtgtgaaccactgtgtctgacctggttttgttttttggggtgttttggtagtcttacattccagtatcaagtcaaagtttattttacaactttgaaagtatttagatatcatcataacatatcaaaattatccctttaagacaagaggaagtatttgaagatttttccctttgtctttacttgatagactaggaggtttggtgaagagcagaggccctagagacaaattatgtgggtttccaatctgtcaacacattactctgggctaacgacatctttctgcgcctatgtacctacttcatagatttgctctgaggagttaatgagatcatacacggactgcttagaaggaactttagcgttagcacttagcattagccattgttattgtaacatgttatacatgttattacatggtaggacattacatgttaagacaaggagagaaaatatgtcgttgagtttatcttttaataggaacgattttagtgaatttataaataatgttgccagcaaaaactttaagattattgtattagtttgttcatactaccatagcaaaatactacattctgggtggcttaagcaacagaaatttatttatttatttatttatttatttatttatttatatattttttgagacagagtctcactctatcacccaggctggagtgcagtggcgcgatctcggcccactgcaagctccacctcccgggttcttgccattcttctgcctcagcctcccgagtagctgggactacaggcgcccaccaccacgcctggcagtggtattttgtatttttagtagagacggggtttcaccatgttagccaggatggtctcaatctcctgacctcgtgatctgcctgcctcagcctcccaaagtgctgggattacaggcgtgagctatcgcgcccggccagaaatttattttttattttattttatttttttaatttttgagatagagtcctgctctgtcacccaggctggagtgcagtggcatgatctcggctcactgcaacttccctcttccaggttcaagcgattctcctgcctcagcctcccgagtagctgggactacaggcacgtaccaccacacctggcttatttttttctattttagtagagatggggtttcactgtgttgcccaggctggtctcgaactcctgagctccagcaatctgtctgcctcggcctctcaaagtgctaggattacaggtgtgagccactgtgcctggccagaaatttattttcatggttcaggaggctgggaagtccaagatcaaggtgttggcagattgggttcctggtgagggctctcttggcttgcaggtggccactttcttgctgtgtcctcacatggcagagagggggactctgcttgctctctctgcctcctcttaagagggcaccagccctgtgacatctgattcccacctagtgacctcatttaacatttatcagctcacaggccccatttccaaatacagtcacattggggattaggacttaaatatatgaattttaggggggtacagacactcagttacaaacattcagttcctaacagttgtagaacttgattattttatttatttattttatatatatatatgtatttttttttttgagacggagttttgctcttattgcccaggctgtagtgcagtggtgccttcttggctcaacctccaacctcccgggttcaagcaattctcctgcctcagcctcccgagtagctgggattacaagtatgtgctaccacgctcagctactttttgtatttttagtagagacggggtttctccatgttcgtcaggctggtcttgaactcctgacctcaggtgatccacccgcctcggcttcccaaagtgctgggattacaggcgtgagccactgtgcccggcctgatatatttattttttgagacggagtcttactctgtcacccaggctggagtgcagtggtgcgatcttcactcactacaacctgcatcttccaggttaaagtgattctcctgcctgagcctccagactagctgagatttcaggcgtgtgccaccacacctggctagttttttggtatttttagtagagatgaggttttaccatgttggtcaggctggtcttgaactcctggcctcaaatcaaatgatccacctgccttggcctcccaaagcgttgggattacagccatgagccacctcgcccagacagaacttgattattttaaagcaatgatgtgcctgccatttataaggcattatttgggggaaaagggaaagcctaggtaacgtgtaggaaggggtgcaacaaccttgttttcccaaagagctctttatccagtctggagtgcagtggcacgatctcggctcactgcaagctctgcctcttgggttcacaccattctcctgcctcaacctcccaagtagctgggactacaggcacccgccaccatgcccggctaattttttttgtatttttagtagagacagggtttcaccatgttagccaggatggtcttgatctcctgacctcatgatccacccgcctcggcctcccaaagtgctgggattagaggcgtgagccactgcgcccagtctttttttttttttttttgagacggagtttcactcctatttctcaggctggagtgcaatgatgtgatctcggctcactgcaacctccgcctcccaggttcaagtgattctccttcctcagcatccagagtagctgggattacaggcactcaccaccatgcttggctaatttttgtattttgtagagacagggtttcatcatgttggctaggctagtctctaagtcctgacctcaggtgatcctcccgcctcggcctcccaatgtgctgggattacaggtgtgatccaccgcgcccagccaagagctctttattctaagagagtggcagaaatgtacatcaactgcttgaaagatttaacccaccaagcgtcaagcgcagcaaatgctgtgaatagaactttagcacaaagcatctcggttccagattagaatgctgatattcaggccaggcacggtggctcatgcctgtaatcccagcagtttgggaggccaaaacaggaggatctcttgaccctatgagtttgagaccagctagggcaacatagaccctgtatctacaaaaacttaaaaaattagctgagcgtggtggtgcatattggtagtctcagctactcaggaggctgaagtgggaggatcacatgagcctgggagttcaaggctgcagtgagctgtgattgctccactgcaccacagctggggtaacagcgcaaggccttgtctcaaagaaaaaaaaaaaaacctgatgttctggcatggagacgcctctgttacaaactggctctggcgacaccgtgacttgcactggttttggggcttgaaggagactgtcctggcagttaacgctcaatggaatgggaagagcttgaccacaggtgatacttgccttggatacagtacttccaatagtacagaatgtttgcacaaataagatttttaatatccggtttcatggcagtatcatttacttgtagtaaaattcaccttttttggggttcagttccatgagttttgggaaatgtactcaccagtgcagtcaagatgtagaacatgttcgtcaccctgaaaggtccccctgagtcccggctcctggcagccactgatctggtttctttgccttctgctgcttccagcgtgtcgtgacacagggtcacagggtgtctgccatcatcttctgcgcctggcttctttccctggcacgcaccttgttgcatggatgagcagtttgctcctttctgttaccgggtagtgttctgtggtttggatgcaccatggcttgttagtttacaaccagtggatggacatttatactgcttcctgtttttgtaagaaataaagctaatataaacataagtgtgcagtctttgtagggacatacatttttctcttagctaagtaactatgaatggaattgctgggccacgtggccagtgtctgtttaacttgctgagaaactgccgcattgtttcccatgtgcttgtccattttgcagtcccacagcacagtacgagagttccaggttttccacttcccttttggccacttgtaggtggtcagtctttttttttttttttttttttgagacagcgtcttgccctgtcgccaggctggatttgcagtggcgcaatctcagctcactgcaacctccgcctcccgggttcaagccattctcttgcctcagcctcctgagtagctgggactacaggcacgtgccaccatgcccggctaatttttttgtatctttagtagagacggggtttcaccatgttggccaggatggtctcaatctcttgaccatgtgatccgcccgcctcggcctcccaaagtgctgggattacaggcgtgagccaccgtgcccggcccgtggtcagtattttcagccaattcttatttggtgtgtagtggtatttcatggttttaatttgcatttctctgaagattaatgatgttgagcattttgtcatgtgcttaatttgccatccatatctcttctttgataaagtgtttaaattgttttaagttgcattatttactttctatttattgagttatcagagttctctatacattctggatacaagatctttgtcagatatgtgttttacaaatatttccaccagtccatagcttgtcttttcatctttttaaacaatatctttgaagaacagatttttacttttttttttttttgagatggagtctcgctctgttgccaggctggagtgcagtggcacgatctcagctcactgcaacctccacctcccatgttctcccacctcagcctctcaagtagctgggattacaggtgcatgctaccatgcccggctaattttttgtatttttagtcgagatggggtctcatcctgttggccaggctggtctcgaagtcctggtctgaagtgatccgcccgccttggccacccaaagtgatgggattataggcgtgaaccaccgcccccagccttactttttttgttgttgttgagccagagtctcgctctgtcgcccaggctggagtgcagtggcgtgatctcggctcactgtaacctccgcttcctgggttcccaccattctcctgccttagcctcccgtgtagctgggattataggcgcccgccaccatgcctggctaagttttgtatttttagtagagactgggtttcaccatgttggtcaggctggtcttgaactcctgaccttgtgatccgcccgcctcggcctcccaacgtgctgagattacaggtgtgagccaccacgcctggcccagaattgactttttttttctttttttgagtcggagtcttgctctgttgcccaggctggagtgcagtggcaccatcttggctcactgcaagctccacctcctgggttcacgccattcttctgcctcagcctcctgagtagctgggactacaggcgcccgccatcacgcccagctaattttttgtagttttggtagagacgtggtttcaccatgttagccaggatggtctcgatctcctgaccttgtgatccgccccccccttggcctcccaaagtgctgggattacaggtgtgagccacggcacctggcccacattttacttttgacaaacctcagcttattattattattttttcctggtttgtgctttttatatcctatctgcgaagtccatgcaagacccaacggcactaagatttttgcctgtcttttccactggaagtttcatagttttagattttacatttgtctctgtctggccatccttacacagccacaatactgtattgtttactatagcatgatggtaagtcagttaagtaatatgagtcttccagcttcattctttttcaaaattgctttggtttttctacacgttttttctgtgaactttagaatcagcttgtcagtgtctacaagccctctgggattttgactggaattgcattgaatgtatgaaacaatctggaggacagctgacattttaacaatactgagtcttctgattcacacacccataggtcagtgatgggagcaaggctcaggctaaagcagattcagggtgtctttctgtgtggaacgtttaggaaaagtatgtttgcatgccactgtctcctgaccaaacccttcgcttttttgtcttctagtatctttatgtatccttatagattattataggcagtaatgattaatgatgagatattaaaacgcctttgttcttttgatttaaggagagggcaagtattgaggattttccctcttgcttttgtattcagggccgggcgctggtggctcacgcctgtaatcccagcactttgagaagccgaggcgggcatatcacgaggtcaagagatcgagaccatcctggccaacattgtgaaacctcatctctactaaaaatacaaaaattaactggccctggtggtgtgcgcctgtaatcccagctactcaggaggctgaggcaggagaatcgcttgaacccgggaggcagaggttgcagtgagctgagatcgtgccactgcactccagcctgggccacagaaagagactccgtctcaaaaaaaaaaaaagaaaaaaaaaatcccaaagtgtcagaattactgtattcagctatagatgcatccctgtatataagatgcagtttcttatacgtgtacaaatgcctatcgcaggccaggtgcggtggctcaagcctgtaatcccaacactttgggaggctgaggcgggtggatcaagaggtcaggagttcaagaccagcatggtgaaaccccgtctctactaaaaatacaaaaaattagctgggtatggtggcgcatgcctgtagtcccagctgctcaggaggctgaggcaggagaatggcttgaacctgggaggtggaggttgtggtgagccgagatggtgccactgcactccagcctgggcgacagtgcgagactccatctcaaaaaaaaaaaaacaaacaaaaacaaaaaaaaaaacaaatgcctatcacagttggctcagtcactttttctgtgactgtcattgcttcaattttatgttgatttatgaaacctaagtttacacagaaaagaaattaaggactaaattaagatactgaagaattacttaagcccctgagtttttttttttctttttttttttttgagacagagtcttgctctgtcacccaggctggagtgcagtggcgccatatcggctcactgcaagctcctcctcccgggttctcgccattctcctgcctcatcctcctgagtagctgggattacaaggcgcccgccaccacgcccggctaattttttgtatttttagtagagatggggtttcactgtgttagccaggatggtctcgatctcctgaccttgtgatctgcccgcctcggtgtgagccaccggacctagccaaccccctgagtttttttaaagttctaataatactcatcaggttagctgtgtatgcaagcatattgtaaaattgcttttttttttttttatttccagttggagtctagctctgtcgccaaggctggagtgcagtggcgcgatctcagctcactgcaacctctgcctcctgggttcatgcgattctcctgcctcagcctcccaagtagctgggattataggcaaccgccaccatgcccagctaatttttgtatttttagtagatatggggtttcactgtgttggccaggctggtctcgaactcctgacctcgtgatccattcacctcagcttctcaaagtgctgggtttacaagtatgagccactgcgcctggctgtaaaattgccatttaagaggctgtgtgtaactggaggtattgatgggtgtctttgagagggtggggattcagaaaggttcaggatgggccgggcgcggtggctcacgcctgtaatctcagcactttgggaggccaaggtgggcagatcatgaggtcaaaagatcgagaccatcctggctaacatggtgaaaccccgtctctactaaaaacacaaaaaattagccaggcgtgatggcgggcgcctgcagtcccagctactctggaggctgaggcaggagaatggtgtgaacctgggaggcggagcttgcagtgagccgagatggtgccactgcactccagcctgggcgacagagcgagactccgtctcaagaaaaaaaaaaaaatttctttatgtctttcttggtcaagtgtttttttttacatatgtacaatggggatcctgagttggaaccacatactttggtaaacaaagtgcagtagtgttcacagttaccacgatcatatcccgtgttgacccaccctctcttttttaggttgcgacctttccttccccagcaataaactggtctctggagatcactgtagaattgtagtggatgaaaaatcaggtcaggtgacactggaagataccaggtgagtatgttctgagcttcttttggtgtttcttcttgtagcttaagaagcctgacttcgtgctctgtgctgtgtgccacggctgaggaggagaagaaatgctgtctttagtgtgataacagcggctcatttttataacagcacagtcatgtgtcccttagcaacagggatccagtctgagaaatgtgtcagacaatttgatcatcttgcaaacatcatggagtatacttaaacaaacctagatggtgtagcctactacatacctaggctatatggtatagccgattgctcctaggctatcaacctatacagcgtgctactgtactgaatgctataggcagttgtaacacaatggtaagagtatttatctaaacacagaacaggtgcagtaaaaatatgatattttaatcttgtgggactcctatcgtatatgcgtctgttgaaaaaaacattattatcagcccgggcgcggtggctcacacctgtaatcccagcactttgggaggctgaggcagttggatcacctgaggtcaggagctcaagcccagcctggccaacatggagaaaccctgtctctcttaaaaatataaaaattagccgggcgttgtggcatgcgcctgtaatcccagctactcgggaggctgagacaggagaatcacttgaacccgggagtcggagattgtggtgagctgagatggcaccactgcactccagcctgggaaacgagtgaaactccatctcaaaacaaaacgaaacaaaagtttattatctggggcatgactgtagttaattaggctcccaaggtattagaagatgtatttcctggtttccaggatgggacacttagtgacactttggtgtctatgacccttcttgaatgtattcaaattaagtatgtctcagaaataagacttaaaagatgctggtaatttttggttcttgcaagcctattcaagtttgatttctttccctcaaatcaaaaaatcattttttaaaactaataaattctcgttcttgtacaactgaagtacagattgagtatctgaaatgattgaaactagactgtttagattttggattgtttcagattttagaatattttcattatacttaccagttgagcatgtctgaatcaaaattctgaaatgttccagtgagtatttttttgagtgtcttgttggtgctcaaaaagttttggatttcacatttctgattagggacattcagcttagggatattcaacttggaaagtggaaagctttccaaaatcctattcatacgttaaaaatgcatatgttggtatatatattttgcataaatgcaatcacactacacatactgttgtagcgtcagcttttttctttctttcttttttttttttgagatggagtttcactgtgttgcaggctgaagtgcagtggtacgatctcggctcactgcgacctccgactcccaggttccagccattctcctgccccagcctcccgagtagctggcattgtaggcacacactaccaagcccggctatttttttgtgtttttagtagagacgggatttcaccatgctggccaggctggtctcgaactcctgatctcaggtgatctgcctgcctcagcctcccaaagtgctgggattacaggcgtgagccatcgcgcccggccagcttttttcacttacggtgttttatggagcgcttcacatgtcactgcatctacatccagctcatcttttcattatcttaggatagtttctttgtcacttcccttattggtggacatttattgttttgactttttcttactataaataacactgcagtgactctttcccaaactctgccttcatgtctgttttcttgggatgatttctcggaagggaagtctgtgtcagtgttactcagaatgtgcctattcctttttttctcttttttgagacggagtctcgctctgtggctcaggctgaagtgctgttggtgcgatctcggctcactgcaacctccgccacccgggttcaagcgattctcctgcctcagcctcccgagtagctgggattacaggtgcccgccgccacgcctagctcagatggggtttcacaatgctagccaggctggacttgaactcctggcctcaggtgatccacctgcctcagcctccccaagtgctgggattgcaagtgtgagcccccacacccggccagaatgtgcgtcttttaaatctgctgcaagtggcaggtggtcttctagcagtatgttgagagtgtgctgttctcactgcaggattttttttgtttggtaaagatcaggctctgtgagattctttggtaactgatagtttcagggatagaagactaggaagtaggttttaataggaagaactgatgctccgtttcctagtctaatagatatcagattaagttctctatttcttggcacaatgggaaaggcagggtgctggtccctagctgtcccgcctgcttcagggcctggcttccccatgctgggtgctggtcctgggctttcctgcctacatcagggcctggcttctccacgctgggtgctggtcctgggctttcccgcctacatcagggcctggcttccccgtgctgggtgctggtcctgggctttcccgcctacatcagggcctggcttccccgcgctgggtgctggtcctgggcagtcccgcctgttccagggcctgggttccctgcactgggtgctggtcctgggcagtcccgcctgttccagggcctggcttccccacgctgggtgctggtcctgggtagtcccgcctgttccagggcctggcttccccgcgctgggtgctggtcccgggccttcctgcctgttccggggcctggcttcctcgcgctgggtgctggtcccgggcagtcccgcctgttccggggcctggcttccccgcgctgggtgctggtcctgggcagtcccgcctgttctggggcctggctttcccacgctgggtgctggtcctgggcagtcccgcctgttccggggcctggcttccccgcgctgggtgctggtcctgggccttcccacctgttccagggcctggtttccctgtgctgggtgctggtcctgggccttcccgcctacatcaggacctggcttccccgcgctgggtgctggtcctgggcctttctacctgttccagggcctggcttccttgcgctgaatgctggtcctgggcctccctgcctgttccagggcctggcttccccacgctgggtgctggtcctgggccgtcccgcctgcttcagggcatggcatccctgtgctgactgcatggtggtggtactttcttatggctattgtaatttaccacaagcttaatggatttaaaaaacacaaatttgctgtcttactatagttatggaggtccagagtccgatatgggtctgatggggctaaaatccaggtctgaacagggctggtttcttctggaggctccaggggagaatttgttctctgccttttccaggttccagaggtgccacgttccttggcagaggtgggctggaggggaggggtgctcaggcagaaggaaccacgtgtgtaggggcccctgagcataagcagggctgtgtggtcggagcgtgtggtgagcggcaaagtcacacaagggagcttgggctttagcctgagagcagtgaggagtcatcaaaggggtgtaagcggaggagtgaaataatcagatttttgtttggaaagaacaggaggatgagtgatggctgcagtcgcccctcggcatctggggggattggctccagccccctgcatgcacccaagtccgtgcacactctagccccgtagccagccctgtggagcaggaggacacagaaagtcagtccagctccagcgcccctgcatgcacccaagtccgtgtgcactccagccccgtagccagccctgtggagcaggaggacacagaaagtcagtccagctccagcgcccctgcatgcacccaagtccgtgtgcactccagccccgtagccagccctgtggagcaggaggacacagaaagtcagtccagcatatgtgtgggattcattccctctcattgaaaaaaacccgtgtataagtgcatctgcacagctcaaaaccgcatcttccagggtcagctttgtgttgtaacagcagaactcagacacacacagccactgcctggtttcggaggttttacggggagacggctgtggcagttcatttgcttactgtctgcatttgctttcctgctacagacggcagagctgagtagtggcaatggtgaccacaaaacctacactgtttaccctctgtttatggaaatcgtttgccactcccatccctcagcaaaccgtggtggtcactcggatgtgagttctgtccactgctggggcctcgggagtgaagctgcagagctgaggcctgtgtggtttcagtcgttttgcccggttgccgttttgtgtgtcgggtatgctgtgctcttggatcttggtcacctgaccaacacctgatttgctgtcaggtctctgctcagaagtccccaggaggcacttcctgccccatcaacttagcctcctcctgtctgtccctgggtcagcagcatctgcattggcctctccctgggcagagtacctcaaggggcttggcagccagaccacaagctctgagtgcagggccatgtcctgcagctgacggcccagcatttagtccgcttctgcccagagccagtctcttgggagggatcagtactcattggaggcatgagttcaccggggttgtgatggctgcaaggaacagaactgtggatagcacaagtccagctcaggggaggctggaggtggaagcaccacactgtagacgaggcctccgggtccactaggaggcaaacggggagagaacccagccctgcagcagcagagctgccaagcacgtgaggaggtgtagtggctggttaggctgtcagtcagggagaagtgggcgagccatttcttgagagaatggtgaggggtgcgtggatgtgtgcatcgttacgtatttacactgttcctatgagtatttccagagtggtcatatcgagctgcttgctaatggtgctagaaaaaaaatcttgtaactccaagttattttaagtagaataaattgtgtttttgtttttttacagcaccagtggaacagtgattaacaagctgaaggttgttaagaagcagacatgccctttacagactggggatgtcatctacttggtgtacaggaagaatgaaccggaacacagtaagagagaggaaggcttgccggggtcagacccgcacgggggtgcacgtgagggcgctctctgaacgttcctcctggctacatcccttcccataggaacgttcctcctggctacaccccatttcttgctcacatgggttcctgccgtgaatagtgtctgttgagtgggagtgtcgactttgcagcctgagcccagccattcctcaggaataccactgtggccatgagcagccaatcccaaaatggcagccaaggagaaactgatggggatggtttgggttctacaggagaagaacttgagttatggggaataaaacctaggaccaggggtctggaggccattgatggttctgcttttggagaccttacaagaaacatcaaaggttagactggattccagtaagttttttcagctccagaagtcccgtttttgttttgtggaagaacagtataggacaaggaaagttatgggagtccttcgaaggtcacccctgaaatacttttttttttttgagatagagtttcgctcttgttgcccaggctgaagtgtaatggcgcaatctcagctcaccgcaatctccacctgccgggttcaagcaattctcctgcctcagcctcctgagtagctgggattataggtgcccaccaccacgcccggctcatttttgtatttttagtagagacggggttttgccatgctggacaggctggtctcaaactcccgacctcaggtgatccacccacctcaacctcccaaagtgctgggattacaggcatgagccactgcacctggccaatacttatttatttaattttttaaataaataagagacagagtctcgctctgctctgttgcggaggctggagtgcaatggcgtgatctcagctcactgcaacctccacctcctggtttcaagcgattctcctgcctcagccttccaggtagctgggattacaggtgcacaccaccacacccggctaatttttgtatttttagtacagacagggtttcgccgtgttggccaggctggtctcgaacttgggacctcaggtaatccgcccgcctcggcctcccagagtgctgggattacaggcaagagccactgcacctggccacccctgaaatacctaaagaccacagtggtgagggagaatggggcaaatatgtcttaggcatcttcagcataaacttaaccagcccctggccacacggaaggatcttgtatctgctcctttgtgtagtttgaaattataagtgaggcatagattcttcaccttcttctgcctcctgatgccattttttcccgaggcttatttcttttgtgttggtagagatgttttagattacttgttttgaaatctcttaaactgatgaatttgttattagctgatgagtcaaaataatcaacaaaaacaaatggactggagaacagaagagaaaaatgagttctcagtttgcacaggggccaccacttttctgatttgattgattttcttttagacgtggcatacctctatgaatctttaagtgaaaagcaaggcatgacacaagaatcctttggtaagtaagagtgtagcaaagaagtgggtgcatgttaggagctatagcattccttttgtgttttgagatggagtctcgctctgttacccaggctggagtgcggtggcgcgatctcagctcactgcagcctccgcctcctgggttcaagcaattcccctgcttcagtctcccattttttttttttttttttttgagacggagttttgctcttgttgctcagcctggagtgcagtggcgcgatctcggctcactgcagcctcctcctgccgggttcgagagattctcctgcctcagcctcccgagtagctgggattacaggttgcaccgtcacgcctggctaattttgtttgtttgtttgtttgtttgttttttgagatggagtcgcgctttgtcgcccaggctggagtgcagtggcgcgatctcggctcactgcaacctccacctcccgggttcatgccattctcctgcctcagcctcccgagtagctgggactacaggcagtcgctaccatgcccagctaattttttgtatttttagtagagatggggtttcaccgtgttagccaggttggcctcgatctcctgacctcgtgatctacccgcctcagcctcccaaagtgctgggattacaggtatgagccaccgcgcccggcacgcctggctaatttttatatttttagtagagacggggtttcaccatgttggtcaggctggtctcgaactcctgacctcaggagatacacctgcctcgacttcccaaagtgctgggattacaggcctgcaccaccgtgcctggccttggggctgttgcattcttaagagcatttcaatccctagagtgtctgcttgagccctggttgtgtgctgcttctgctccttttgggttacagaagctaacaaggaaaatgtgttccatgggaccaaagatacctcaggtgcaggtgcagggcgaggggccgatccccgggtccctccgtcgtcgcccgccactcaggtgtgct

SEQ ID NO: 15520 - DNA, 39529 bp, Homo sapiens
tccaaagcccacgtccacacgttccgagcccgccgtcccatcgcaaacatccgggggccgccactgcgcctaacgaccgcccatctctgacgcctcgggtcggcgtttgatttttaacccaagaaaagagtaaaagtcaagcggaaatcaacgcagaagcggtgctgcagcctctgagcttcctgacggccgtgtccagagccgggctcctcctccggcggcagccgccgggctcacttcagtgcgctcagcttctcgcggggacaagcgtctgggcggggacggcccgaggcgggggtgtggcgaggctggagaacgctgaaagctggtgggcttgggaagacaaacgacgctctgaaatttggctcccaggtaatacgttccggcacttcgcggcggctcagtcagcgctgctgggttccacccctcctatgcgttgctcagggacaggtttcttagtgacaggcccctcactattcccattggccaggacgcccaaggcccacgcagccgttggctaaaattgttgtctgtttcagacacgttggcgaattccccgcctctacgttgccgggagacagcatgttgcctagcagcgtgcggctcccattgcctttgggcgcggctctccgccccgacccgcccctctgggacccatccgggtctgcgcctcagctagacagggcgggctgcggcgcgcagtcttaggcgtgcgcttcggggaaggggccctcgcgtgggaggagcgcgtctgcgagggatgcgccggcgcaggcgagacccggagccgcgtggtctctgcgcagtgcgtcgtgtggggcggccgaccccggcccgggtttccctgctcgttttcgtccgggcgggcgtcttggttcccgttccaggccagccccatcctaggtcgctgcttcatccagcgcttggggcatttgtgtcgttggcgttgttttcctcttaactacaaactttaaatgtgttcatctactcgtgacggcgagtttagcagactttcattcccagaagacgtgtcacacgatctgtatatttttcatacagaaattgacggacgtcgttacttctaaatttccacaggggctggttcatcccgcggctttacctagagaaaaacgtctgaggccgggcgcggcggctcccgcctgtaatcccaacactttgggaggccgaggcgggcgaatcacgaggtcaggagttcgagaccagactggccaacatggtgaaacctcgtctctactaaaaatacaaaaaaaaaaaaaaaaaaaaaaaaaaaaaaaaatagccgggcgtggcggcgcatgcctgtaatcccagctactcaggaggctgaggcaggagaatcgcttgaacccgagatggtgccactgcactccagcatgggcgatagagcgagactccgtctcaaaaaataataataaaataaaaaccatggacaatgggaggagaacatcacacaccggggcctgtcgggggtggggggccaggggagggatagcatcaggagaaatacgtaatgtagataactggttgatgggtgcagcaaaccaccatggcacgtgtatacctatgtaacaaacctgcaggttctgcacatgtaccccagaacttaaagtataattttaaaaagagagagagaagcgtctgagcgtttctcagggacggcgggtggcagccaggacgggctggggcggtgaagtgcggggcgggaagcgacgcgtgcgcctcctgcgctggcttctgtgaaaggagggactgattggagatcactgctgaaaagtggactacgcatcagtgaatagttagtgaaatatgagcttctacattcaaaaccatttgtgctttaaagattttgtttcaccatggtatcgtatttatctgaatcctatgttgcttttgctttgtaatctgaattgtctgtcactcccccagtctcagttttttgttaactgttcaatattcatagaaatgtctctacatgggaccctttaacagagagagtaatctgtcatagcaagtatttcctgagtagtttcactgattctatgtttttagcaggtcaatgttttcctggttagttttatgattttatctcaatttttaccagtttgtaaccagaactggagtattaatgagaagatatataattgtaagtaaatattctatttattagaagaataaatcaccctgacagtcaacaaataatctttttaaaatttttcattgatgtattgatttatttattagagggagagtctctgtcgcctcatctggagtgcagtggtgccatcatagctcacttcagcctcgaactcctgggctcaagtggtcctcccgccttagcctcccaagtagctgagactacaggcacgtgccactgcgtcaggctgatttttgtatttttattggagatgaggtctgcctaggttgcccaggctggtctcaaacgcctgggctcaagccatcctcccgcctcagcctcgcagagtgctgggattagaggcacgagccaccacactcggcaataataacaatctttttaatggatccactcaaacaaaatagaacctgctcaactaaaatttcctgtctatcctcaaataatattaaaaaccatcctatcttaatatgaattaccctaaaatctattattggcaaatataagttttcagtacatcagtgaatgctgaagttagttatattggggaaactggcttttgaaatatattttttaatcgattgtagatagcattgtgtgttcagaagctgtgatggaagtggcattctacaccggacatctgctgatacaatacacatctctatagaatctacttattataaggaccacttcatgtattatcattatgaaaatcatgatctgcgaaaataggaagaaaattaaagctagaaatgtatgtgatttaatctctctgttttggctggcctcaattctgcagcttcctaacacgtttgaagcaagggtccttgcctgtgattgtattattaatacattctatgtaagcttagtttaaatgatattgttccagccaggcgtggtggcacctatagtaacagctactcaggaggctgaggtgggaggatcccttgatcctaggaattcgaggcttcagtgagctataatggtgccagtgcactccagcctgggtgacagcaacaccctgaaaaaaaattaaaaataagataaaatgatattgttcatgtgaaagaatgcccattcttttgcaaagatagtgctcttttggtagcttttagaagttttggatttggaagttgagttcttcaagttcattattattcagggttgtatttacaattctaggtttacaaacagtttgtcaacatctacgaaattaattgcggggatttttgtcggagcggcaccaactctacagttgggaagaattgacatcttagcaatattgtgactacaataatgaaaaaggagtatgctccggttatgttttccttttttttctctctttctctctctttcttttccgtccctcctttccttccttccttccctccctccctcccttaagatagagtctccctctgttcccccggctggagtgcagtggccccatcatggctcactgcaacctccctctccagggctcaagccatccttccatctcagcctcccgagtagccgggactacagccgcacaccaccaagccagtctaatttttgtatttttagtaacgacagggcttggccatatttcccaggctcctctggactcctgacctcaggcgagccctctgtgctccggaccttccggagtgctgggattacaggtgtgagccactgcgccggcctacgttttcttttaatagtgtttcatagttttctggatacagatggtttcatattttgttagagcaaggatttcttggatttgttgtatccaaggatttctttttgttgttttattgcaaacggtaggcctttaaagttttccagtttcagttgactttaatatattggctttgtacttttgcttcttgttacctcccccactcctatcaagccacagaagaggaggctccaccgcacttttgatctccaaaattatagtttaggagatacggttcagaaaagagcggggaggcgcgcttctttcgctgatggggtgcgctcagctcctgcgctgcccctggtggccggcagggcgcgcccaaccctacgattgtggctcgtggcgcgcatgcgcattccgcccgcggcgtcgccacagggtgagggagcttggcttcctgagaagccacccaggagccccggcttggggatgacttgaggccgcgtcttcggtgaggaaaagcttcccagaggaactctgccggggaatctctagagtcattgtccttttttaaaaatgtttttataggccgggcgcggtggctctcgcctgtaatcccagcactttgggaggccgaggcgggtagatcatgaggtcaggatatccagaccagcctggccaacaaggtgaaatccagtctctactaaaaatacaaaaattagccgggcgtggtgccgcgcgcctgtaatcccagctactcaggaggctgaggcaggggaattgcttgaacctgggtggccgaggttgcagtgagccgagatcgtgccattgcactccagcctgggcaacttgagcaagactccgtctctaaataaataaataaataaataacgttttttcgctttttttttttttttctctgagacagagtctgtttctgtcgcccaggctggaggtggtttcggctcactgcaaccgccgcctcccgggttcaagcgattctcctgcctcagcctccagggtagctgggattacaggctcccgccaccacgcccagctaatttttgtatttgtagtagagatggggtttcaccatcttggccaggctggtcttgaactcctgaccttgtgatccatccgcctcggcctcccaaagtgctgagattacaggcatgagccgctgtgccccgccatgcgccgcattttctttctttctttctttttttttttttttttttgagacggagtctcgctctgttgcccaggctggagtgcagtggcgcgatctcagctcattgcaacctccacctcccgggttcacgccattctcctgtctcagcctctccagtagctgggactgcaggcgcccgccaccacgcccggctaattttttgtatttttagtagagacgggggtttcaccgtgtcagccaggatggtctcgatctcctgacctcatgatccgcccgcctgggcctcccaaagtactgggattacaggcgccgcattttcttatccattcatctgttgatggacatttaggttgcttccaaatcttggctgttgtgaacagtgctgcagcaaacatggcagtgcagacatctcttagacatgctgattccctttccggtatctagccatcagggattgctggagcttgtggtagctcaatttttagttttctgaggtacctccaaacagttctcggtagtggttgtactaatttacattccttccaaccgtgtatgagggttcccttttctccacgtccaccagagacactttccttaaattcataagcagagattccctcatgttctggaatgttcccatgcgttattctttactttctctggaaagtaaagatctcggagtgagatctgttttaggcatttcccttcacagaggggttggcagcgggaaacagagagcacctggtgtttccttaatcaggattgttctgggaggaaatccatgcaagtccagagaagtgcgtggcccaggtgagacttgcagagaacagtgttcgtgcctacagcttggggagtctgggagaaggaaaatgagcactcctgtggatgtgctttattcatttcttcctgtcttattttccctacagggttaaagtagttgtaaagaagaaagttttgcaaagtacatgtattaaaactcaaaacattaggccaggtgcagtggctcatgcctgtaatcccagcattttgggaggctgaggtgggcagatcacacggtcattagatcgagaccatcctggctaacacggtgaaaccccgtccctactaaaaatacaaaaattagccgggcgtggtggcacgcgcctgtagtcccagctactcgggaggctgaggcaggagaattgcttaaacccagaaggcagaggttgcagtcagccgagattgcgccattgcactccagcctgggcaacagagcaagactctgtctcaaaataaaaaataataaaatagaataaaaatcattatttccacttaaaatagttcatagcggctgggcacagtggctcacaccagtaatcccagcactttgggaggccaaggcaggcagatcacctgaggtcaggagttcaagaccagcctggccaacatggtgaaaccctgtctctactaaaaatacaaaaaaaagcagctgggtatggtggtgcatgccagtagtcccagctactagggaggctgaggcaggagaatcgcttgaacccgggaggcagaggttgcagtgatcccagatcccgccactgcactccagcctgggcaatagaatgagactccatctcaaaaaaaaaaaaaaagttcatatcaaaaggaaaatataggctgctctgcctgtggagtagctattcttttgtttctttacatctctaataaacttgctttcacttacaaaaaaaaaaaaaaaaaaaaaaggaaaatcctagcactctgggaagctgaggcaggcagatcacctaaggtcaggagttcgagaccagaatacaaaaattagccgggtgtggtggtgcatgcctgtaatcccagctactcaggaggctgagacaggagagttgcttgaaactgggaagcggaagaggttgcagtgagccgagatcatgccactgcactccagcctgggcaacagagcaagactccatctcaaaaaaaaaaaaaaaagggctgggcacggtggctcatgcctgtaatcccagcagtttgggaggccaaggcaggcagatcacctgaggtcaggagttcgagcccagcctggccaacatggagaaaccctgtctctactaaaaatataaaattaactgggtgtggtggcacatgcctgtaatccgagctactggggatgctaaggcaggagaatcgcttgaaccagggaggtggaggttgtggtgagccgagattgcgccactgcactccagcctgggcaacagtagcgaaactctgtctcaaaaaaaaaaaaaaagaaaatgtaaaaggtaattttacttttctggttttaatagaagcaaattcctcagtaatctttttttttttttttttgagacagagtctctcgctctgtacccaggctggagtgcagtggccgatctcggctcactgcagcctgcgcctcccgggttcaagcaattctcctgcctcagcctcccgagtagctaggactacaggagtgcgctgccacatctggctaatttttgtattttttagtagagacaaggtttcatcaggtcgggcaggatggtcttgatctcctgaccttgtgatctgcccatcccagcctcccaaagtgctgggattacaggcatgagccaccgcacccagcccatcagtaatcttttaaaaatgtacttattagctcacttcattttcacttaagagaatttccatgtttgataattttttatgactcactgactatctcaaaaggttttctgtggccaggtgtggtggctcacgcctgtaatcccagcactttgggaggccgagactagcggatcacctgaggtcaggagttggagaccagccgggccaagatggcaaaaccccatctctactaaatatacaaaaattagttgggcctggtggtgggcacctgtaatctcaggtactcaggaggctgaggcgggggagaattgcttgaaccctggagacagaggttgcagtgagccgagattgtgccactgcactccatcctaggtgacagagtgagactctgtctcaaaaacaaataaataaataaataaatgggttttttttgtttgttttttgagacagggtctcactctgttgcccaggctggagtccagtggtgctatcatggctcattgcagcctccacctcccgggctcaagcaatcctcccaccttagcctcctacattagcctccctagtacaggtgtgcatcaccacatccggctaattttttgtatttttggtggagacggggtttcaccatgttggccaggctggtctcgaactcctgagctcaggcaatccacccaccttggcttcccaaagtgatgggatgacaggcttgagctcccagccagctgctagttttgagtggggcccagaacaagtgaaggctctgcaacagatgcaggctgttgtgcaaggtgctctaccacttggtcacatgacccagcagatccaatggtgcttgacatgtcagtggcagagagcgatgctgggtggagccttggcaggcccgcataggagaatcacaatgtagacttttaggattttggtgcaaagccctgacattgtctgcagataattactcttctttttttttttttttttttttttgacttcaacgttttataacaatagagagtagctgaaaatactacatgctaacacagacaatatgatacacaacctcgggggacaagttggcagggagcacgtggcagaggccacaggtttagactaagagccttttgatggactgctgaatggattggatctgctgtttcagctgtgagccttctttgatggtgacagaacaggtgatgacaggcctggagaccccacaggctcttcccagggcctgcttggagcgcacaaatatgaagggcacgttcttgtcttcacacagcagtggaggtgcggaatgatctcctgtggctcggtgtctgcagccatcacgatgaactcagagatgcccctgttaagggttttggtggcctcgttggctcttttctgaagctgcttgtagttacacgactactgaatgaactccagtggtttcttggtgaggtgggcatcggcgaggggctaggccttcagattcacattggcctcagtcatggctgtggttccgtgagctcggcactcctagggccgcgcagccgaggtctgagaagcgctctcttccacccgtactcttcttttgacaaccagcttttggcttgctacaggacggtattagggactgaataattaagcatggcccaccaaattactgcatgacctgagctgctcatcacgaactcagtgttatctgaccccccaagccataaagtgaggcatacagagtagtactccatcatcacgcaatgacagtgcaaaactcacagaataccttacccaccgttgtggtgttagagaaacctgtttaccaggcctctggtttcataaaacatgaccagagtgactctatcttaaggtaagtagctaggcactcacaagacacctgtaaggttgctatggtctgaaaatagccacattctaagctgaccaccaattataattgcagaaatatttatggtcatacgggacatctcccaccaagcctgcagaatgtccagatgtcctaagagtgcagcccactttactcagagagaaccttaatgagcaggcttaggttgaaggattaatggtcactgatagcaccaatagccctaccttcagtgagcacatctgcacattccaggtttaattgtagctccttaagagtttcctgtacagcattcctcttcctgctttctgaggatgccttactctgtaacagagtagattctgataaacttgcttctttcacggtgctcagtgactcacctcaaattctttcctgtgtaagatctaagagccctttcttggagcctggactggaactcctctttttcctgtaacaatgacatcgcttctgatcgaagaacccacttcacagtaaatgaggtgcaccgtgggcccatgctcatggaattcatgggtcttgctgtgttctccatcatcctaccgattttggttctgtttttctggtggaactgactgagagaaacatatagtgaaaggtaagtcttcattaccccttgactttaagtccgtgtttcagaggaagccaccgccatttccttgtgtatccttctagagagattttcattttcataaacatatttgtatgtacacattattaattaaaagagtcaagctctacaaaatttgaagaggtttattctgagccaaaagtgagtgatcacggcccacggcacagtcccaagaggtcctaagaccctgtgcccatggtggtggggctacagcttggttttatactttttttttttttaaagacagagtctcactctgtcacccaggctggagtgcagtgacgcaatctcggctcactgcaacctctgcctcccgggttcaagcaattctctgcctcagcctcctgagtagctgagattacaggcacctgccaacaagcccgactaatttttttttgtatttttagtagacaaggggtttcaccatcttggccaggttggtcttgaactcctgacctcgtgatctttcactcgcgtccgtgtgaagagaccaccaaacaggctttgtgtgagcaataaagctttttaatcacctgggtgcaggcgggctgagtctgaaaagagggtcagcaaaggggagatggggtggggccgttttataagatttaagtaggtaaaggaaaattacagtcaaagggggttgttctctggcgggcaggggtaggggtcacaaggtgctcagtgagggagctttttgagccaggatgagccaggagaaggaatttcacaaggtaattgtcatcagttaaggcaaggaccggccattttcacttcttttgtagtggaatgtcatcagttaaggcaggaacaggccattttcacttcttttgtgattcttcagttacttcaggtcatctgggcatatacatgcaggtcacaggggatgtgatggcttagcttgggcccagaggcctgacattcctgccttcttatattaataagaaaaataacataaaatagtgttgaagtgttggggcagcgaaaaaaatttttttggggggctggcatggagagataatgggcgatgtttctcagggctgcttccagcgggattaggggtggcgtgggaacctagaatgggagaggtcaagttgaaggaggattttgtggtaaggggtgatattgtgggattgttagaaggagcatttgtcatatagaatgattggtgatggcctggatacggttttggatgaattgagaaactaaacggaagatacaatgtctgaataaaagaaggagaaaaatgggtattaaaggactaagaattgggaggacctaggacatccaattagagagtgcccaagggagttcagcgtaattacttgcttggttggcaagtttttgggccctatccttgagtttttttatgttgtcatacaccaggccagattaatttaggtaaaaacaacactcttcatttaaaaatatacagagtcctcctttttcagcattgagtaagtcaaggcctcagcgattttggaggacagctaaagagtcaacttgggcctggaggactgataaagtttgtgatatgtctgtgatgctagcagagaagtcattagagaggctacagaaggttgtgacagaggttgaaatgcctgctatcccagtactgagagcaatagtagaggcagaaagtcttaaaccgacaagcaagggaattagtggaataactcttttttgtcatgttggtgtcatgaggggaacaaggagctttttgctcctattggcaaattgaattttgggagtaaggaaaactaatgtgcatgtgcctgtccaattagcaggtagacacatgtaggtagaggatccacagaggaagaagggaccttgtgccaggcaaaattggagatgcaaagtaaaaagatgagaaggagtgctgaaaggggtgtcttgtacctacactcctagggatccagctagggcagcagccatcagaggttgtaatggggactggtggggtgactgcatagagggggacgttcgattttcatggtgtatgagaaaacgtctagtgtctatgagcaacctttcatgatggggtaactgcatagaggggaggatcgattttcatggtgtgtgagaaaacattgagtgtctacgagcaacctttcatgatggggtaactgcatagaggggaggatcgattttcatggtgtgtgagaaaacgttgagtgtctacgagcaacctttcatgatggggtaactgcgtagagggggaggttagactttcatggtgtatgagaaaacgtcgagtgtctacgagcaacctttcatgatggggtaactgcgtagagagggaggttcgattttcatggtgtatgaggaaacgctgagtgtctacaagcaacctttcatgatggggtaactgcgtagagggggaggttccattttcatggtgtgtgagaaaatgtcgagtgtctacgagcaacctttcatgatggggtaactgcgtagaggagaggatcgattttcatggtgtgtgagaaaacgtcaagtgtctacgagcaacctttcatgatggggtaactgcatagagggggaggttagactttcatgatgtatgagaaaatgtcgagtgtctatgagcaacctttcatgatgaggtaactgcgtagagagggaggttcgattttcatggtgtgcgagaaaacgtcgagtgtctacgagcaacctttcatgatgaggtaactgcgtcgaggggagggtcgattttcatggtgtgtgagaaaacgtcaagtgtctacgagcaacctttcatgatggggtaactgcatagagggggaggttagactttcatggtgtatgagaaaatgttgagtgtctatgggcaacctttcatgatggggtaactgcgtagagagggaggttcgattttcatggtgtatgaggaaatgctgagtgtctacgagcaacctttcatgatggggtaactgcgtagaggaggaggtttgattttcatggtgtatgaggaaacgctgagtgtctacaagcaacttttcatgatggggtaactgcgtagagggggaggttcgattttcatggtgtgcgagaaagcgttgcgtgtctacgagcaacctttcatgatgaggtaactgcgtagaggggagggtcgattttcatggtgtgtgagaagacatcaagtgtctacgagcaacctttcatgatggggtaactgcatagagggggaggttagactttcatggtatatgagaaaatgtcgagtgtctatgggcaacctttcatgatggggtaactgcgtagagagggaggttcgattttcatggtgtatgaggaaacgctgagtgtctacgagcaacctttcatgatggggtaactgcgtagagggggaggttcgattttcatggtgtgcgagaaaacgtcgcgtttctacgagcaacctttcatcatgaggtaactgcgtagaggggagggtcgattttcatggtgtgtgagcaaatgtcaagtgtctacgagcaacctttcatgatggggtaactgcatagagggggaggttagactttcatggtgtatgagaaaatgtcgagtgtctatgagcaacctttcatgatggggtaactgcgtagagggggaggttcgattttcatggtgtatgaggaaacgctgagtgtctacgagcaacctttcatgatggggtaactgcgtagagggggaggttcgattttcatggtgtatgaggaaacgctgagtgtctacgagcaacctttcatgatggggtaactgcgtagagggggaggttcgattttcatggtgtgcgagaaaacgtcgcgtttctacgagcaacctttcatcatgaggtaactgcgtagaggggagggtcgattttcatggtgtgtgagcaaatgtcaagtgtctacgagcaacctttcatgatggggtaactgcatagagggggaggttcgattttcatggtgtatgagaaaacgtcaagtatctacgagcaacctttcactattatttatgggtctgggtataagtaaacaagaagagggcctgggaggagagcctgatgagcaaggggaaggtagccaaggatggagtgaaatgcagggtaagtgtcttcttaagcaataattactactaatatttttaagtttgtcagtattgatagagggcttatctgtaatatggagctggaaggcttcaattgtttcagtgatgtgtgtagttgggctttggagatgaagaataaaggaacatcgagaaggtgaaaggttacctaggggaattccagtgggtctttgctgagagatacataaaggagcggccttgagcagagtttttattaaagaggcattaatgatggaggaactttgcgtagtgaggaaacctctttcagcctatataacagcatggtggtgcagaatatggaaggcatatttagagtcagtataaatattgacatgtagtccttttgcaagagtgagggcgccgggtgtggtggctcacacctgtaatcccagcactttgggaggctgagacgggcagatcacctgagtttgggagttcaagaccagcctgaccaacatggagaaaccctgtctctactacaaatacaaaattagccgggcgtggtggtgcatgcctgtcatcccagctacttgggaggctgaggcaaaagaattgcttgaacccaggaggcagaggttgcagtgagccgagattgcgccattgcactccagcctgggcaataagagcgaaactccatctcaaaaaaaaaaaaaaaaaaaaaaaaaaaagagtgagggactgagttaaggcaactagttcagcttcctgagaggtagtggagggaggcagagtggtagcctcaatgatagatgtggaagatactatagcatagcctgcctttgctagtgagtggcaattaggcctggtggaactgccatcaataaaccaaatgtgatcagggtgaggaacaggaaagaaggaaatatggggtgaatgtcaggtggatcagagagatacagtcatgagggtcaggtgtggtatccggaataatgtgggaggccgaattgaagtctgggccaggagcaatggtaattgtgggagactaaaggaagagtgagtatagctgaaggagccagggagcagaaattatatgtatcaggtgtgaggaagaaaatagattttggaagttatgagagctgcagagagtgagtggagcatagtttgtgatttttgagggcctctgaaagtattagggcggcagcagccactgcatggagacatgatggccagcctaaaacagtaaagtcaagttgtttggccaaaaggctacaggatgcaatcctggtccttgtgtaacaattctgactgcacagctctgcacttcggctgtgtgtaatgaaaagggttgggatgaatcagggagagctagtgggggcagtctctaaaactgtctttaaggaaaggaaagaggagtggggaaaggatttaggatctatggggtcagctaggtttccttttgtgagtttatatgatggttttgttaggatggcaaaaccatgtatccaaagttgaacgtatctaaccatgcctaggaaggaaaggagttgttttgtagacggtgttggggtttgagatatcagttggacatgatcagcagggagagcacgtgtgtctttatgaagaattatcatgaggtaggtaacagatgaagaaatttgagctttggagggggatacctgatatcctttggagaataaatgttgaaggagcaggagggtgtcttgttgagaatattcaaaggaggggctacaaagaagaaggtcatcaacatattgaataaggtgagaagcggaggggtggaaagaaagtaaatcatgagaaagagcttggctgaagtaatgagggctgtccccgaaaccttgcggcagcacagcccaggtaagctgctgggaccgatgggtgtcagggtcagtccaggtaaaagcaaagagaggctgggacgaggggtgcagcggaatagtgaaaaaagcatctttaagatcaagaacggaatagtgagttgtggaggaaggtattgaggacaaaagagtgtacggtggggcaccacgtggtgactaggcaaaacaatttggttgataaggcgcagatcctgaactaacctgtaagacttgtctggtttttggacggtaaaatgggggaattgtaaggagagtttataggttttagaagcccatgctgtagcaggcgagtggtaacaggctttaatccttttaaagcatgccacgggatgggatattggcattgagcggggtaaggttgattaggttttaaggggatagtaatgggcatgtgatcggttgccagggagggagtagaggtgtcctatatttgtgggttaaggtggggggatacgagaggaagacgcaaagcaggccttgggttgggaagaagggcggcaatgagatatggctgtagtccaggaatagtcagggaagcagataatttggttaaaatgtctcggcctaataagggaactgggcaagtggggataactaaaaaagagtgcataaaagaatgttgtccaagttggcaccagagtgggggagttttgaggggttttgaagcttggccgtcaacacccacaacagttataggggcaagggaaacaggcccttgaaaagaaggtaacgtggagtgggtagcccccgtatcgattaaacaggggatggacttacccgccactgtgagagttacccgaagctcagcatccatgatggtccagggggcttccagggtgatcaggcagcgtcagtcttcagccgctaagccaagcagatcttggaaggagtcagtcagagagtcttgggctagagctttaggggctctaggggtggctgccaggcgagctgggcagtctgatttccagtgggtccctgcacagatgggacacggcttgggaggaatcccaggctatgggcattccttggctcagtggccagatttctggcacttgaagcaagatcctgatggaggaagtcttgtaagaatgcttgactgctgtggcttaggtgtgtgcggcttaggcattttgaatttcttgtgtgctggaggtgtggctgggttttgtcttacagcagaggcaagtaattgtaactcagaaatgcgttgccgtctggctgcctcctctctattattgtacaccttgaaggcaaggttgattcattcctattgtggggtttgagggccagattctaatttttgaagttttttcctaatgtcaggagtggattggatgataaaatgcatattaagaataaggcggccttctggcccttctgggtctagggcggtaaagtgtctgagtgttgctgctaagcaggccatgaactgggcttggttttcgtctttaccttgggtagtttctttaagcttgtcataattaacaggtttgtaagctgcctttttaagcccttcaactaggcaggaaatcatgtaatcttgcctagctgtacctggggaatctgcctgatagttccattggggatcctctcggggaactgctctgatgccttcctggaggtatggctcgtgaagccggtggttatcagcgtgagattgggctagagaaaaaactctttcccgttcatctggggagagggtagaagtcaggatgacatttaggtcactccaggttaacttgtaggacaaagttagatatcggaattcctgtatatgtttagtggggtctgatgagaaagagcctaaatgttgactgatctgagagaggtctgatagagaaaaaggcacatgtaccctgactatgccttcagctccagccacctctctaagaggaaattgttgggcaggtggggaagagctagtcaaggaactaaactgtaagccggaccgggtgtgaggaggggaggtgacagaaagattatagggtggaggagcggaggctgaggaagaattgggacttagcttggcctggcgacgagcagcctggggaggaggggagaggtcagatgggtctgtagaaaaggaagactggaaagactcagcgacgcttggggttgggactgagggaacaggcaggagggagagaaggaggatttgggaggaatcgcattgggaacagagactagggagggaacgaagtgtgaaaaatgcctggatgtaaagcacctcagatcatttgcctattttttgacaaaaattatttaggtcttgtagaatggagaagttgaaagtgccgttttctggctatttagagccattgtcaagtttgtattggggccaagcggtgttgcagaagaaaacaaggcgtttaggttttaggtcaggtgtgagttgaagaggttttaagtttttgagaacacaggctaatggagaagagggaggaatggagggtggaagtttgcccatagtgaaggaggcaagcccagagaaaagagagggtagagacatggagagaagggggtggggggtgcttgccacccaggaaagtgaagaaggggtagagacacggagagaaggggttggggggttcttgccccccaaaaaagcattacttgccactaagggtgaaggaccaaggcaggcgtccctgcatggtcagacacctctgaaacgtgggtgaataatcaggcaggcgtccctgcgcgattaaacaccaagggaagactgtcttcccgagtccatgaccggcgccggaattttgggttcatggataaaacgcgtctcctttgtctctaccagaaaaggaaaggaactgaaattaagagtagggagagattaaagtgtggcaccaagattgaaaggagaaagaggttgaaggatagtgagagaggtgggagaagagagtgaaaagaggccattacccgatttaaaattggtgagatgttccttgggctggttggtctgaggacctgaggtcgtaggtggatctttctcacggagcaaagagtaggacaggggattgatctcccaagggaggtctcccgatccgagtcacggcaccaaatttcactcgcgtccatgtgaagagacgatcaaacaggctttgtgtgagcaataaagttttttactcacctgggtgtaggcgggctgagtccgaaaagagagtcagcaaagggcagataggggtagtggggccgttttataagatttaagtaggtaaacgaaaattacagtcaaaggggggttgttctctggtgggcaggggtgggggtcacaaggtgctcaatgagggagctttttgagccaggatgagccaggagaaggaatttcacaaggtaatgtcatcagttaaggcaaggaccggccattttcacttcttttgtagtggaatgtcatcagctaaggcaggaacaggccattttcacttcttttgtgattcttcagttacttcaggccatctaggcatatatatacatgcaggtcacaggggatgcgatggcttagcttaggttcagaggcctgacatgatccacctgcctcagcctcccaaactgctgggattacagacgtgagccactgcgcccagccggttttacaccttttagggagaaagttcatagatggattcaaagattttctgattggcacttggttgaaagagttgttattatctaaagacctggaatcaatagaaaggattgtctgggttaagctaagggagacaaagtttctattttgttattttttttttgacagggtctctgttgcccaggctggattgcagtggcacagactgtggtttaccgcagccttgtcctcccgggctcaaggaatctgcccacctcagcctcctgaatagctgggactataggcatgtgctgtcatcatgtccagctaagacggggtctccccatgttgcccaggatggtctgaattcctgggctcaagcgatccacccacctcggcctcccaaagtgctaggattacaggcttgagcaccaccactctggccattctaatgcagatgccgctccaggcagcaggcttcagagagaatagatggtaaacttttcttatcagagttaaaaaggtgccagagtcttacattctctcctggatcaggaaaagatgtggaaaaggaaggagattctctacaaagtagatttcccccaggagacagttttgcagggctacgtaaaactatgttaaataaatacatgtcagggtaaaatacttcgttttcttccagggcctgctatttgtcatgtgatgtatcttaatgctacagaccgtttggtcagccttaagttgtctgttttaacgtcgacgctggtcagttatacctgaattccaaagggaggacagtataatgggacatatccaaaccctgcttcccatcagggactgaactggtttttcagattaactttggcgttgagagactcagttcattcagttggttggggaggcttacaattttatttttggtttacaaggtatagataactatgcctatacctatatatacaaatgtttatatatgtatatatgtgtgtatatatggtttgttttacacaaatggatgcctactttatttattttggtagcgatgaggtctcaggctaatctcgaactcctgggctcgagatcctcctgcctaggccttccaaagcacttagattacaggcgtaagtcactgcgcccggtcctgcttcaccctcttaaaaccgcccttgggggctcctcatgagtgcagacattggcgcgttcctccaaaccgcacagactccccctgcgtggacgcgtctcgccgtctttactcctctttcgccgacctttcactttcagggaataccctctggcgcccttctctggagcacacacgtgaacgccgccggattccaagaagtgagatactgaggcaaaagttacgcgcgttcagaacaggaagaccccgcaaaacgccggccaagacgtggccccgcgtccaccctgcccacaagcagccgctcccactcgcggaccgcgccctgtgcctcagacttcggatctgtgtgatccactgtgtgcaactgtacccgaaagggtccccacgtgcactacctcgtgacaactaagatggaccgtcttctactcctaggagtcatccccagattagcggggctctcagaatccttggggcttccaatccggaagttccccgtcccttctgccccaacataacatggcgccgaccgcagccacttccgtgatccgcaggcgacgaagtcgcctggtcaggatcaaagatggccgagcgccctccacgcgcctactctcgcgggccactcccggctccgctttagctgccgctcttggtgagcgccgccgccagccaatcgcggggcgcagaggcctctggccccgccccgcggatcagctgagggagccgcaatgtctcttgacagcggcggcggcgcagccggttccgggttcggcgcggggcgggggtaagcgcggctggcgagggggctgcggcgggcggcgaagggggacctggttgcggccgtgggagggggcgcccgccggcgtccaggccgggctgcggggctgcgtgggcgcgggcggccgggccggggcccgcggggtggggcgggcgccgagtctcggcctctggggtcgggagtctccatgggcgtttccggggtctccgcagatgtgaatcccgatggagcggcccgaggaaggcaagcagtcgccgccgccgcagccctggggacggctcctgcgtctgggcgcggaggagggcgagccgcacgtcctcctgaggaagcgggagtggaccatcgggcggagacgaggtgcggggctgaggccggggccgggggccggggccgggcagagccaccgggttgcgggcaggccacacgggcggcggtgcagtgtgcgctccagatttttccgtggagtgaaatgtcatgtaagaactggtatttattcggtgttctgcccaccgattcttgcgcatgattcacgcacatcatttagccttcgttacaactgtataagttagttgtgttcatatactctccagaatgcaatattgtcacgttcgttgccgtacagagtatcttttctgactgtaatggaacgaaattaaaaataatagaaggaaaagtggaaaattcacagatatgtggacatgaaacaccacactcttaaagcaaccggtgggtcaaataagtctttacaacggggaccttgttttgagacaaatgaaacaaaaatagaatacaccaaaaggtatttaggatgcagccaaggcagtactcagagggaaatttatagctgtagtgcttatattaaaaaagatctcaagtcccagcccctagaatatttatttatttaataaacctggaaagctaaaaacttgaacaaagtcatacaacgggtgagagaaagttccctcagcctccacattcactgcctccagtctcccaagtgaccatctggttgtttgatttcctctgaagcctttgtatggggagagaaatgcgctggtcctgtcaacaaaaatgtttagtttgtctgaaaattaatgaattagctccgacattatactctaaaaaggagcgaggatgggaaatatttgctgtttggaagcaattttttttttttttttggttaatttcaccccttataatgtgcttgcacctggttttttttgtttttttgtttgtttttttgagataagagtcttgctctgtggcccagactggggtgcagtggtgtgatctcagctcactgcaccctctgcctcccggttcaagtgattctcccgcctcagcctcggagtagctgggactacaggcgtgcgccaccatgcctggctaatttttgtatttttagtagagatgagctttcgccatattgcccaggctggtcttgaacaactgaactaaagtgattcacctgcttcggcctccgaaagtgctgggattacaggtgtgaaccactgtgtctgacctggttttgttttttggggtgttttggtagtcttacattccagtatcaagtcaaagtttattttacaactttgaaagtatttagatatcatcataacatatcaaaattatccctttaagacaagaggaagtatttgaagatttttccctttgtctttacttgatagactaggaggtttggtgaagagcagaggccctagagacaaattatgtgggtttccaatctgtcaacacattactctgggctaacgacatctttctgcgcctatgtacctacttcatagatttgctctgaggagttaatgagatcatacacggactgcttagaaggaactttagcgttagcacttagcattagccattgttattgtaacatgttatacatgttattacatggtaggacattacatgttaagacaaggagagaaaatatgtcgttgagtttatcttttaataggaacgattttagtgaatttataaataatgttgccagcaaaaactttaagattattgtattagtttgttcatactaccatagcaaaatactacattctgggtggcttaagcaacagaaatttatttatttatttatttatttatttatttatttatatattttttgagacagagtctcactctatcacccaggctggagtgcagtggcgcgatctcggcccactgcaagctccacctcccgggttcttgccattcttctgcctcagcctcccgagtagctgggactacaggcgcccaccaccacgcctggcagtggtattttgtatttttagtagagacggggtttcaccatgttagccaggatggtctcaatctcctgacctcgtgatctgcctgcctcagcctcccaaagtgctgggattacaggcgtgagctatcgcgcccggccagaaatttattttttattttattttatttttttaatttttgagatagagtcctgctctgtcacccaggctggagtgcagtggcatgatctcggctcactgcaacttccctcttccaggttcaagcgattctcctgcctcagcctcccgagtagctgggactacaggcacgtaccaccacacctggcttatttttttctattttagtagagatggggtttcactgtgttgcccaggctggtctcgaactcctgagctccagcaatctgtctgcctcggcctctcaaagtgctaggattacaggtgtgagccactgtgcctggccagaaatttattttcatggttcaggaggctgggaagtccaagatcaaggtgttggcagattgggttcctggtgagggctctcttggcttgcaggtggccactttcttgctgtgtcctcacatggcagagagggggactctgcttgctctctctgcctcctcttaagagggcaccagccctgtgacatctgattcccacctagtgacctcatttaacatttatcagctcacaggccccatttccaaatacagtcacattggggattaggacttaaatatatgaattttaggggggtacagacactcagttacaaacattcagttcctaacagttgtagaacttgattattttatttatttattttatatatatatatgtatttttttttttgagacggagttttgctcttattgcccaggctgtagtgcagtggtgccttcttggctcaacctccaacctcccgggttcaagcaattctcctgcctcagcctcccgagtagctgggattacaagtatgtgctaccacgctcagctactttttgtatttttagtagagacggggtttctccatgttcgtcaggctggtcttgaactcctgacctcaggtgatccacccgcctcggcttcccaaagtgctgggattacaggcgtgagccactgtgcccggcctgatatatttattttttgagacggagtcttactctgtcacccaggctggagtgcagtggtgcgatcttcactcactacaacctgcatcttccaggttaaagtgattctcctgcctgagcctccagactagctgagatttcaggcgtgtgccaccacacctggctagttttttggtatttttagtagagatgaggttttaccatgttggtcaggctggtcttgaactcctggcctcaaatcaaatgatccacctgccttggcctcccaaagcgttgggattacagccatgagccacctcgcccagacagaacttgattattttaaagcaatgatgtgcctgccatttataaggcattatttgggggaaaagggaaagcctaggtaacgtgtaggaaggggtgcaacaaccttgttttcccaaagagctctttatccagtctggagtgcagtggcacgatctcggctcactgcaagctctgcctcttgggttcacaccattctcctgcctcaacctcccaagtagctgggactacaggcacccgccaccatgcccggctaattttttttgtatttttagtagagacagggtttcaccatgttagccaggatggtcttgatctcctgacctcatgatccacccgcctcggcctcccaaagtgctgggattagaggcgtgagccactgcgcccagtctttttttttttttttttgagacggagtttcactcctatttctcaggctggagtgcaatgatgtgatctcggctcactgcaacctccgcctcccaggttcaagtgattctccttcctcagcatccagagtagctgggattacaggcactcaccaccatgcttggctaatttttgtattttgtagagacagggtttcatcatgttggctaggctagtctctaagtcctgacctcaggtgatcctcccgcctcggcctcccaatgtgctgggattacaggtgtgatccaccgcgcccagccaagagctctttattctaagagagtggcagaaatgtacatcaactgcttgaaagatttaacccaccaagcgtcaagcgcagcaaatgctgtgaatagaactttagcacaaagcatctcggttccagattagaatgctgatattcaggccaggcacggtggctcatgcctgtaatcccagcagtttgggaggccaaaacaggaggatctcttgaccctatgagtttgagaccagctagggcaacatagaccctgtatctacaaaaacttaaaaaattagctgagcgtggtggtgcatattggtagtctcagctactcaggaggctgaagtgggaggatcacatgagcctgggagttcaaggctgcagtgagctgtgattgctccactgcaccacagctggggtaacagcgcaaggccttgtctcaaagaaaaaaaaaaaaacctgatgttctggcatggagacgcctctgttacaaactggctctggcgacaccgtgacttgcactggttttggggcttgaaggagactgtcctggcagttaacgctcaatggaatgggaagagcttgaccacaggtgatacttgccttggatacagtacttccaatagtacagaatgtttgcacaaataagatttttaatatccggtttcatggcagtatcatttacttgtagtaaaattcaccttttttggggttcagttccatgagttttgggaaatgtactcaccagtgcagtcaagatgtagaacatgttcgtcaccctgaaaggtccccctgagtcccggctcctggcagccactgatctggtttctttgccttctgctgcttccagcgtgtcgtgacacagggtcacagggtgtctgccatcatcttctgcgcctggcttctttccctggcacgcaccttgttgcatggatgagcagtttgctcctttctgttaccgggtagtgttctgtggtttggatgcaccatggcttgttagtttacaaccagtggatggacatttatactgcttcctgtttttgtaagaaataaagctaatataaacataagtgtgcagtctttgtagggacatacatttttctcttagctaagtaactatgaatggaattgctgggccacgtggccagtgtctgtttaacttgctgagaaactgccgcattgtttcccatgtgcttgtccattttgcagtcccacagcacagtacgagagttccaggttttccacttcccttttggccacttgtaggtggtcagtctttttttttttttttttttttgagacagcgtcttgccctgtcgccaggctggatttgcagtggcgcaatctcagctcactgcaacctccgcctcccgggttcaagccattctcttgcctcagcctcctgagtagctgggactacaggcacgtgccaccatgcccggctaatttttttgtatctttagtagagacggggtttcaccatgttggccaggatggtctcaatctcttgaccatgtgatccgcccgcctcggcctcccaaagtgctgggattacaggcgtgagccaccgtgcccggcccgtggtcagtattttcagccaattcttatttggtgtgtagtggtatttcatggttttaatttgcatttctctgaagattaatgatgttgagcattttgtcatgtgcttaatttgccatccatatctcttctttgataaagtgtttaaattgttttaagttgcattatttactttctatttattgagttatcagagttctctatacattctggatacaagatctttgtcagatatgtgttttacaaatatttccaccagtccatagcttgtcttttcatctttttaaacaatatctttgaagaacagatttttacttttttttttttttgagatggagtctcgctctgttgccaggctggagtgcagtggcacgatctcagctcactgcaacctccacctcccatgttctcccacctcagcctctcaagtagctgggattacaggtgcatgctaccatgcccggctaattttttgtatttttagtcgagatggggtctcatcctgttggccaggctggtctcgaagtcctggtctgaagtgatccgcccgccttggccacccaaagtgatgggattataggcgtgaaccaccgcccccagccttactttttttgttgttgttgagccagagtctcgctctgtcgcccaggctggagtgcagtggcgtgatctcggctcactgtaacctccgcttcctgggttcccaccattctcctgccttagcctcccgtgtagctgggattataggcgcccgccaccatgcctggctaagttttgtatttttagtagagactgggtttcaccatgttggtcaggctggtcttgaactcctgaccttgtgatccgcccgcctcggcctcccaacgtgctgagattacaggtgtgagccaccacgcctggcccagaattgactttttttttctttttttgagtcggagtcttgctctgttgcccaggctggagtgcagtggcaccatcttggctcactgcaagctccacctcctgggttcacgccattcttctgcctcagcctcctgagtagctgggactacaggcgcccgccatcacgcccagctaattttttgtagttttggtagagacgtggtttcaccatgttagccaggatggtctcgatctcctgaccttgtgatccgccccccccttggcctcccaaagtgctgggattacaggtgtgagccacggcacctggcccacattttacttttgacaaacctcagcttattattattattttttcctggtttgtgctttttatatcctatctgcgaagtccatgcaagacccaacggcactaagatttttgcctgtcttttccactggaagtttcatagttttagattttacatttgtctctgtctggccatccttacacagccacaatactgtattgtttactatagcatgatggtaagtcagttaagtaatatgagtcttccagcttcattctttttcaaaattgctttggtttttctacacgttttttctgtgaactttagaatcagcttgtcagtgtctacaagccctctgggattttgactggaattgcattgaatgtatgaaacaatctggaggacagctgacattttaacaatactgagtcttctgattcacacacccataggtcagtgatgggagcaaggctcaggctaaagcagattcagggtgtctttctgtgtggaacgtttaggaaaagtatgtttgcatgccactgtctcctgaccaaacccttcgcttttttgtcttctagtatctttatgtatccttatagattattataggcagtaatgattaatgatgagatattaaaacgcctttgttcttttgatttaaggagagggcaagtattgaggattttccctcttgcttttgtattcagggccgggcgctggtggctcacgcctgtaatcccagcactttgagaagccgaggcgggcatatcacgaggtcaagagatcgagaccatcctggccaacattgtgaaacctcatctctactaaaaatacaaaaattaactggccctggtggtgtgcgcctgtaatcccagctactcaggaggctgaggcaggagaatcgcttgaacccgggaggcagaggttgcagtgagctgagatcgtgccactgcactccagcctgggccacagaaagagactccgtctcaaaaaaaaaaaaagaaaaaaaaaatcccaaagtgtcagaattactgtattcagctatagatgcatccctgtatataagatgcagtttcttatacgtgtacaaatgcctatcgcaggccaggtgcggtggctcaagcctgtaatcccaacactttgggaggctgaggcgggtggatcaagaggtcaggagttcaagaccagcatggtgaaaccccgtctctactaaaaatacaaaaaattagctgggtatggtggcgcatgcctgtagtcccagctgctcaggaggctgaggcaggagaatggcttgaacctgggaggtggaggttgtggtgagccgagatggtgccactgcactccagcctgggcgacagtgcgagactccatctcaaaaaaaaaaaaacaaacaaaaacaaaaaaaaaaacaaatgcctatcacagttggctcagtcactttttctgtgactgtcattgcttcaattttatgttgatttatgaaacctaagtttacacagaaaagaaattaaggactaaattaagatactgaagaattacttaagcccctgagtttttttttttctttttttttttttgagacagagtcttgctctgtcacccaggctggagtgcagtggcgccatatcggctcactgcaagctcctcctcccgggttctcgccattctcctgcctcatcctcctgagtagctgggattacaaggcgcccgccaccacgcccggctaattttttgtatttttagtagagatggggtttcactgtgttagccaggatggtctcgatctcctgaccttgtgatctgcccgcctcggtgtgagccaccggacctagccaaccccctgagtttttttaaagttctaataatactcatcaggttagctgtgtatgcaagcatattgtaaaattgcttttttttttttttatttccagttggagtctagctctgtcgccaaggctggagtgcagtggcgcgatctcagctcactgcaacctctgcctcctgggttcatgcgattctcctgcctcagcctcccaagtagctgggattataggcaaccgccaccatgcccagctaatttttgtatttttagtagatatggggtttcactgtgttggccaggctggtctcgaactcctgacctcgtgatccattcacctcagcttctcaaagtgctgggtttacaagtatgagccactgcgcctggctgtaaaattgccatttaagaggctgtgtgtaactggaggtattgatgggtgtctttgagagggtggggattcagaaaggttcaggatgggccgggcgcggtggctcacgcctgtaatctcagcactttgggaggccaaggtgggcagatcatgaggtcaaaagatcgagaccatcctggctaacatggtgaaaccccgtctctactaaaaacacaaaaaattagccaggcgtgatggcgggcgcctgcagtcccagctactctggaggctgaggcaggagaatggtgtgaacctgggaggcggagcttgcagtgagccgagatggtgccactgcactccagcctgggcgacagagcgagactccgtctcaagaaaaaaaaaaaaatttctttatgtctttcttggtcaagtgtttttttttacatatgtacaatggggatcctgagttggaaccacatactttggtaaacaaagtgcagtagtgttcacagttaccacgatcatatcccgtgttgacccaccctctcttttttaggttgcgacctttccttccccagcaataaactggtctctggagatcactgtagaattgtagtggatgaaaaatcaggtcaggtgacactggaagataccaggtgagtatgttctgagcttcttttggtgtttcttcttgtagcttaagaagcctgacttcgtgctctgtgctgtgtgccacggctgaggaggagaagaaatgctgtctttagtgtgataacagcggctcatttttataacagcacagtcatgtgtcccttagcaacagggatccagtctgagaaatgtgtcagacaatttgatcatcttgcaaacatcatggagtatacttaaacaaacctagatggtgtagcctactacatacctaggctatatggtatagccgattgctcctaggctatcaacctatacagcgtgctactgtactgaatgctataggcagttgtaacacaatggtaagagtatttatctaaacacagaacaggtgcagtaaaaatatgatattttaatcttgtgggactcctatcgtatatgcgtctgttgaaaaaaacattattatcagcccgggcgcggtggctcacacctgtaatcccagcactttgggaggctgaggcagttggatcacctgaggtcaggagctcaagcccagcctggccaacatggagaaaccctgtctctcttaaaaatataaaaattagccgggcgttgtggcatgcgcctgtaatcccagctactcgggaggctgagacaggagaatcacttgaacccgggagtcggagattgtggtgagctgagatggcaccactgcactccagcctgggaaacgagtgaaactccatctcaaaacaaaacgaaacaaaagtttattatctggggcatgactgtagttaattaggctcccaaggtattagaagatgtatttcctggtttccaggatgggacacttagtgacactttggtgtctatgacccttcttgaatgtattcaaattaagtatgtctcagaaataagacttaaaagatgctggtaatttttggttcttgcaagcctattcaagtttgatttctttccctcaaatcaaaaaatcattttttaaaactaataaattctcgttcttgtacaactgaagtacagattgagtatctgaaatgattgaaactagactgtttagattttggattgtttcagattttagaatattttcattatacttaccagttgagcatgtctgaatcaaaattctgaaatgttccagtgagtatttttttgagtgtcttgttggtgctcaaaaagttttggatttcacatttctgattagggacattcagcttagggatattcaacttggaaagtggaaagctttccaaaatcctattcatacgttaaaaatgcatatgttggtatatatattttgcataaatgcaatcacactacacatactgttgtagcgtcagcttttttctttctttcttttttttttttgagatggagtttcactgtgttgcaggctgaagtgcagtggtacgatctcggctcactgcgacctccgactcccaggttccagccattctcctgccccagcctcccgagtagctggcattgtaggcacacactaccaagcccggctatttttttgtgtttttagtagagacgggatttcaccatgctggccaggctggtctcgaactcctgatctcaggtgatctgcctgcctcagcctcccaaagtgctgggattacaggcgtgagccatcgcgcccggccagcttttttcacttacggtgttttatggagcgcttcacatgtcactgcatctacatccagctcatcttttcattatcttaggatagtttctttgtcacttcccttattggtggacatttattgttttgactttttcttactataaataacactgcagtgactctttcccaaactctgccttcatgtctgttttcttgggatgatttctcggaagggaagtctgtgtcagtgttactcagaatgtgcctattcctttttttctcttttttgagacggagtctcgctctgtggctcaggctgaagtgctgttggtgcgatctcggctcactgcaacctccgccacccgggttcaagcgattctcctgcctcagcctcccgagtagctgggattacaggtgcccgccgccacgcctagctcagatggggtttcacaatgctagccaggctggacttgaactcctggcctcaggtgatccacctgcctcagcctccccaagtgctgggattgcaagtgtgagcccccacacccggccagaatgtgcgtcttttaaatctgctgcaagtggcaggtggtcttctagcagtatgttgagagtgtgctgttctcactgcaggattttttttgtttggtaaagatcaggctctgtgagattctttggtaactgatagtttcagggatagaagactaggaagtaggttttaataggaagaactgatgctccgtttcctagtctaatagatatcagattaagttctctatttcttggcacaatgggaaaggcagggtgctggtccctagctgtcccgcctgcttcagggcctggcttccccatgctgggtgctggtcctgggctttcctgcctacatcagggcctggcttctccacgctgggtgctggtcctgggctttcccgcctacatcagggcctggcttccccgtgctgggtgctggtcctgggctttcccgcctacatcagggcctggcttccccgcgctgggtgctggtcctgggcagtcccgcctgttccagggcctgggttccctgcactgggtgctggtcctgggcagtcccgcctgttccagggcctggcttccccacgctgggtgctggtcctgggtagtcccgcctgttccagggcctggcttccccgcgctgggtgctggtcccgggccttcctgcctgttccggggcctggcttcctcgcgctgggtgctggtcccgggcagtcccgcctgttccggggcctggcttccccgcgctgggtgctggtcctgggcagtcccgcctgttctggggcctggctttcccacgctgggtgctggtcctgggcagtcccgcctgttccggggcctggcttccccgcgctgggtgctggtcctgggccttcccacctgttccagggcctggtttccctgtgctgggtgctggtcctgggccttcccgcctacatcaggacctggcttccccgcgctgggtgctggtcctgggcctttctacctgttccagggcctggcttccttgcgctgaatgctggtcctgggcctccctgcctgttccagggcctggcttccccacgctgggtgctggtcctgggccgtcccgcctgcttcagggcatggcatccctgtgctgactgcatggtggtggtactttcttatggctattgtaatttaccacaagcttaatggatttaaaaaacacaaatttgctgtcttactatagttatggaggtccagagtccgatatgggtctgatggggctaaaatccaggtctgaacagggctggtttcttctggaggctccaggggagaatttgttctctgccttttccaggttccagaggtgccacgttccttggcagaggtgggctggaggggaggggtgctcaggcagaaggaaccacgtgtgtaggggcccctgagcataagcagggctgtgtggtcggagcgtgtggtgagcggcaaagtcacacaagggagcttgggctttagcctgagagcagtgaggagtcatcaaaggggtgtaagcggaggagtgaaataatcagatttttgtttggaaagaacaggaggatgagtgatggctgcagtcgcccctcggcatctggggggattggctccagccccctgcatgcacccaagtccgtgcacactctagccccgtagccagccctgtggagcaggaggacacagaaagtcagtccagctccagcgcccctgcatgcacccaagtccgtgtgcactccagccccgtagccagccctgtggagcaggaggacacagaaagtcagtccagctccagcgcccctgcatgcacccaagtccgtgtgcactccagccccgtagccagccctgtggagcaggaggacacagaaagtcagtccagcatatgtgtgggattcattccctctcattgaaaaaaacccgtgtataagtgcatctgcacagctcaaaaccgcatcttccagggtcagctttgtgttgtaacagcagaactcagacacacacagccactgcctggtttcggaggttttacggggagacggctgtggcagttcatttgcttactgtctgcatttgctttcctgctacagacggcagagctgagtagtggcaatggtgaccacaaaacctacactgtttaccctctgtttatggaaatcgtttgccactcccatccctcagcaaaccgtggtggtcactcggatgtgagttctgtccactgctggggcctcgggagtgaagctgcagagctgaggcctgtgtggtttcagtcgttttgcccggttgccgttttgtgtgtcgggtatgctgtgctcttggatcttggtcacctgaccaacacctgatttgctgtcaggtctctgctcagaagtccccaggaggcacttcctgccccatcaacttagcctcctcctgtctgtccctgggtcagcagcatctgcattggcctctccctgggcagagtacctcaaggggcttggcagccagaccacaagctctgagtgcagggccatgtcctgcagctgacggcccagcatttagtccgcttctgcccagagccagtctcttgggagggatcagtactcattggaggcatgagttcaccggggttgtgatggctgcaaggaacagaactgtggatagcacaagtccagctcaggggaggctggaggtggaagcaccacactgtagacgaggcctccgggtccactaggaggcaaacggggagagaacccagccctgcagcagcagagctgccaagcacgtgaggaggtgtagtggctggttaggctgtcagtcagggagaagtgggcgagccatttcttgagagaatggtgaggggtgcgtggatgtgtgcatcgttacgtatttacactgttcctatgagtatttccagagtggtcatatcgagctgcttgctaatggtgctagaaaaaaaatcttgtaactccaagttattttaagtagaataaattgtgtttttgtttttttacagcaccagtggaacagtgattaacaagctgaaggttgttaagaagcagacatgccctttacagactggggatgtcatctacttggtgtacaggaagaatgaaccggaacacagtaagagagaggaaggcttgccggggtcagacccgcacgggggtgcacgtgagggcgctctctgaacgttcctcctggctacatcccttcccataggaacgttcctcctggctacaccccatttcttgctcacatgggttcctgccgtgaatagtgtctgttgagtgggagtgtcgactttgcagcctgagcccagccattcctcaggaataccactgtggccatgagcagccaatcccaaaatggcagccaaggagaaactgatggggatggtttgggttctacaggagaagaacttgagttatggggaataaaacctaggaccaggggtctggaggccattgatggttctgcttttggagaccttacaagaaacatcaaaggttagactggattccagtaagttttttcagctccagaagtcccgtttttgttttgtggaagaacagtataggacaaggaaagttatgggagtccttcgaaggtcacccctgaaatacttttttttttttgagatagagtttcgctcttgttgcccaggctgaagtgtaatggcgcaatctcagctcaccgcaatctccacctgccgggttcaagcaattctcctgcctcagcctcctgagtagctgggattataggtgcccaccaccacgcccggctcatttttgtatttttagtagagacggggttttgccatgctggacaggctggtctcaaactcccgacctcaggtgatccacccacctcaacctcccaaagtgctgggattacaggcatgagccactgcacctggccaatacttatttatttaattttttaaataaataagagacagagtctcgctctgctctgttgcggaggctggagtgcaatggcgtgatctcagctcactgcaacctccacctcctggtttcaagcgattctcctgcctcagccttccaggtagctgggattacaggtgcacaccaccacacccggctaatttttgtatttttagtacagacagggtttcgccgtgttggccaggctggtctcgaacttgggacctcaggtaatccgcccgcctcggcctcccagagtgctgggattacaggcaagagccactgcacctggccacccctgaaatacctaaagaccacagtggtgagggagaatggggcaaatatgtcttaggcatcttcagcataaacttaaccagcccctggccacacggaaggatcttgtatctgctcctttgtgtagtttgaaattataagtgaggcatagattcttcaccttcttctgcctcctgatgccattttttcccgaggcttatttcttttgtgttggtagagatgttttagattacttgttttgaaatctcttaaactgatgaatttgttattagctgatgagtcaaaataatcaacaaaaacaaatggactggagaacagaagagaaaaatgagttctcagtttgcacaggggccaccacttttctgatttgattgattttcttttagacgtggcatacctctatgaatctttaagtgaaaagcaaggcatgacacaagaatcctttggtaagtaagagtgtagcaaagaagtgggtgcatgttaggagctatagcattccttttgtgttttgagatggagtctcgctctgttacccaggctggagtgcggtggcgcgatctcagctcactgcagcctccgcctcctgggttcaagcaattcccctgcttcagtctcccattttttttttttttttttttgagacggagttttgctcttgttgctcagcctggagtgcagtggcgcgatctcggctcactgcagcctcctcctgccgggttcgagagattctcctgcctcagcctcccgagtagctgggattacaggttgcaccgtcacgcctggctaattttgtttgtttgtttgtttgtttgttttttgagatggagtcgcgctttgtcgcccaggctggagtgcagtggcgcgatctcggctcactgcaacctccacctcccgggttcatgccattctcctgcctcagcctcccgagtagctgggactacaggcagtcgctaccatgcccagctaattttttgtatttttagtagagatggggtttcaccgtgttagccaggttggcctcgatctcctgacctcgtgatctacccgcctcagcctcccaaagtgctgggattacaggtatgagccaccgcgcccggcacgcctggctaatttttatatttttagtagagacggggtttcaccatgttggtcaggctggtctcgaactcctgacctcaggagatacacctgcctcgacttcccaaagtgctgggattacaggcctgcaccaccgtgcctggccttggggctgttgcattcttaagagcatttcaatccctagagtgtctgcttgagccctggttgtgtgctgcttctgctccttttgggttacagaagctaacaaggaaaatgtgttccatgggaccaaagatacctcaggtgcaggtgcagggcgaggggccgatccccgggtccctccgtcgtcgcccgccactcaggtgtgctttgaggaaccacagccatcaacatcgacgtcagacctcttccccacagcctcggcctcttccacggagccttctcctgcagggcgagagcgttcctccagttgtg

SEQ ID NO: 15521 - DNA, 45710 bp, Homo sapiens
attccgcccgcggcgtcgccacagggtgagggagcttggcttcctgagaagccacccaggagccccggcttggggatgacttgaggccgcgtcttcggtgaggaaaagcttcccagaggaactctgccggggaatctctagagtcattgtccttttttaaaaatgtttttataggccgggcgcggtggctctcgcctgtaatcccagcactttgggaggccgaggcgggtagatcatgaggtcaggatatccagaccagcctggccaacaaggtgaaatccagtctctactaaaaatacaaaaattagccgggcgtggtgccgcgcgcctgtaatcccagctactcaggaggctgaggcaggggaattgcttgaacctgggtggccgaggttgcagtgagccgagatcgtgccattgcactccagcctgggcaacttgagcaagactccgtctctaaataaataaataaataaataacgttttttcgctttttttttttttttctctgagacagagtctgtttctgtcgcccaggctggaggtggtttcggctcactgcaaccgccgcctcccgggttcaagcgattctcctgcctcagcctccagggtagctgggattacaggctcccgccaccacgcccagctaatttttgtatttgtagtagagatggggtttcaccatcttggccaggctggtcttgaactcctgaccttgtgatccatccgcctcggcctcccaaagtgctgagattacaggcatgagccgctgtgccccgccatgcgccgcattttctttctttctttctttttttttttttttttttgagacggagtctcgctctgttgcccaggctggagtgcagtggcgcgatctcagctcattgcaacctccacctcccgggttcacgccattctcctgtctcagcctctccagtagctgggactgcaggcgcccgccaccacgcccggctaattttttgtatttttagtagagacgggggtttcaccgtgtcagccaggatggtctcgatctcctgacctcatgatccgcccgcctgggcctcccaaagtactgggattacaggcgccgcattttcttatccattcatctgttgatggacatttaggttgcttccaaatcttggctgttgtgaacagtgctgcagcaaacatggcagtgcagacatctcttagacatgctgattccctttccggtatctagccatcagggattgctggagcttgtggtagctcaatttttagttttctgaggtacctccaaacagttctcggtagtggttgtactaatttacattccttccaaccgtgtatgagggttcccttttctccacgtccaccagagacactttccttaaattcataagcagagattccctcatgttctggaatgttcccatgcgttattctttactttctctggaaagtaaagatctcggagtgagatctgttttaggcatttcccttcacagaggggttggcagcgggaaacagagagcacctggtgtttccttaatcaggattgttctgggaggaaatccatgcaagtccagagaagtgcgtggcccaggtgagacttgcagagaacagtgttcgtgcctacagcttggggagtctgggagaaggaaaatgagcactcctgtggatgtgctttattcatttcttcctgtcttattttccctacagggttaaagtagttgtaaagaagaaagttttgcaaagtacatgtattaaaactcaaaacattaggccaggtgcagtggctcatgcctgtaatcccagcattttgggaggctgaggtgggcagatcacacggtcattagatcgagaccatcctggctaacacggtgaaaccccgtccctactaaaaatacaaaaattagccgggcgtggtggcacgcgcctgtagtcccagctactcgggaggctgaggcaggagaattgcttaaacccagaaggcagaggttgcagtcagccgagattgcgccattgcactccagcctgggcaacagagcaagactctgtctcaaaataaaaaataataaaatagaataaaaatcattatttccacttaaaatagttcatagcggctgggcacagtggctcacaccagtaatcccagcactttgggaggccaaggcaggcagatcacctgaggtcaggagttcaagaccagcctggccaacatggtgaaaccctgtctctactaaaaatacaaaaaaaagcagctgggtatggtggtgcatgccagtagtcccagctactagggaggctgaggcaggagaatcgcttgaacccgggaggcagaggttgcagtgatcccagatcccgccactgcactccagcctgggcaatagaatgagactccatctcaaaaaaaaaaaaaaagttcatatcaaaaggaaaatataggctgctctgcctgtggagtagctattcttttgtttctttacatctctaataaacttgctttcacttacaaaaaaaaaaaaaaaaaaaaaaggaaaatcctagcactctgggaagctgaggcaggcagatcacctaaggtcaggagttcgagaccagaatacaaaaattagccgggtgtggtggtgcatgcctgtaatcccagctactcaggaggctgagacaggagagttgcttgaaactgggaagcggaagaggttgcagtgagccgagatcatgccactgcactccagcctgggcaacagagcaagactccatctcaaaaaaaaaaaaaaaagggctgggcacggtggctcatgcctgtaatcccagcagtttgggaggccaaggcaggcagatcacctgaggtcaggagttcgagcccagcctggccaacatggagaaaccctgtctctactaaaaatataaaattaactgggtgtggtggcacatgcctgtaatccgagctactggggatgctaaggcaggagaatcgcttgaaccagggaggtggaggttgtggtgagccgagattgcgccactgcactccagcctgggcaacagtagcgaaactctgtctcaaaaaaaaaaaaaaagaaaatgtaaaaggtaattttacttttctggttttaatagaagcaaattcctcagtaatctttttttttttttttttgagacagagtctctcgctctgtacccaggctggagtgcagtggccgatctcggctcactgcagcctgcgcctcccgggttcaagcaattctcctgcctcagcctcccgagtagctaggactacaggagtgcgctgccacatctggctaatttttgtattttttagtagagacaaggtttcatcaggtcgggcaggatggtcttgatctcctgaccttgtgatctgcccatcccagcctcccaaagtgctgggattacaggcatgagccaccgcacccagcccatcagtaatcttttaaaaatgtacttattagctcacttcattttcacttaagagaatttccatgtttgataattttttatgactcactgactatctcaaaaggttttctgtggccaggtgtggtggctcacgcctgtaatcccagcactttgggaggccgagactagcggatcacctgaggtcaggagttggagaccagccgggccaagatggcaaaaccccatctctactaaatatacaaaaattagttgggcctggtggtgggcacctgtaatctcaggtactcaggaggctgaggcgggggagaattgcttgaaccctggagacagaggttgcagtgagccgagattgtgccactgcactccatcctaggtgacagagtgagactctgtctcaaaaacaaataaataaataaataaatgggttttttttgtttgttttttgagacagggtctcactctgttgcccaggctggagtccagtggtgctatcatggctcattgcagcctccacctcccgggctcaagcaatcctcccaccttagcctcctacattagcctccctagtacaggtgtgcatcaccacatccggctaattttttgtatttttggtggagacggggtttcaccatgttggccaggctggtctcgaactcctgagctcaggcaatccacccaccttggcttcccaaagtgatgggatgacaggcttgagctcccagccagctgctagttttgagtggggcccagaacaagtgaaggctctgcaacagatgcaggctgttgtgcaaggtgctctaccacttggtcacatgacccagcagatccaatggtgcttgacatgtcagtggcagagagcgatgctgggtggagccttggcaggcccgcataggagaatcacaatgtagacttttaggattttggtgcaaagccctgacattgtctgcagataattactcttctttttttttttttttttttttttgacttcaacgttttataacaatagagagtagctgaaaatactacatgctaacacagacaatatgatacacaacctcgggggacaagttggcagggagcacgtggcagaggccacaggtttagactaagagccttttgatggactgctgaatggattggatctgctgtttcagctgtgagccttctttgatggtgacagaacaggtgatgacaggcctggagaccccacaggctcttcccagggcctgcttggagcgcacaaatatgaagggcacgttcttgtcttcacacagcagtggaggtgcggaatgatctcctgtggctcggtgtctgcagccatcacgatgaactcagagatgcccctgttaagggttttggtggcctcgttggctcttttctgaagctgcttgtagttacacgactactgaatgaactccagtggtttcttggtgaggtgggcatcggcgaggggctaggccttcagattcacattggcctcagtcatggctgtggttccgtgagctcggcactcctagggccgcgcagccgaggtctgagaagcgctctcttccacccgtactcttcttttgacaaccagcttttggcttgctacaggacggtattagggactgaataattaagcatggcccaccaaattactgcatgacctgagctgctcatcacgaactcagtgttatctgaccccccaagccataaagtgaggcatacagagtagtactccatcatcacgcaatgacagtgcaaaactcacagaataccttacccaccgttgtggtgttagagaaacctgtttaccaggcctctggtttcataaaacatgaccagagtgactctatcttaaggtaagtagctaggcactcacaagacacctgtaaggttgctatggtctgaaaatagccacattctaagctgaccaccaattataattgcagaaatatttatggtcatacgggacatctcccaccaagcctgcagaatgtccagatgtcctaagagtgcagcccactttactcagagagaaccttaatgagcaggcttaggttgaaggattaatggtcactgatagcaccaatagccctaccttcagtgagcacatctgcacattccaggtttaattgtagctccttaagagtttcctgtacagcattcctcttcctgctttctgaggatgccttactctgtaacagagtagattctgataaacttgcttctttcacggtgctcagtgactcacctcaaattctttcctgtgtaagatctaagagccctttcttggagcctggactggaactcctctttttcctgtaacaatgacatcgcttctgatcgaagaacccacttcacagtaaatgaggtgcaccgtgggcccatgctcatggaattcatgggtcttgctgtgttctccatcatcctaccgattttggttctgtttttctggtggaactgactgagagaaacatatagtgaaaggtaagtcttcattaccccttgactttaagtccgtgtttcagaggaagccaccgccatttccttgtgtatccttctagagagattttcattttcataaacatatttgtatgtacacattattaattaaaagagtcaagctctacaaaatttgaagaggtttattctgagccaaaagtgagtgatcacggcccacggcacagtcccaagaggtcctaagaccctgtgcccatggtggtggggctacagcttggttttatactttttttttttttaaagacagagtctcactctgtcacccaggctggagtgcagtgacgcaatctcggctcactgcaacctctgcctcccgggttcaagcaattctctgcctcagcctcctgagtagctgagattacaggcacctgccaacaagcccgactaatttttttttgtatttttagtagacaaggggtttcaccatcttggccaggttggtcttgaactcctgacctcgtgatctttcactcgcgtccgtgtgaagagaccaccaaacaggctttgtgtgagcaataaagctttttaatcacctgggtgcaggcgggctgagtctgaaaagagggtcagcaaaggggagatggggtggggccgttttataagatttaagtaggtaaaggaaaattacagtcaaagggggttgttctctggcgggcaggggtaggggtcacaaggtgctcagtgagggagctttttgagccaggatgagccaggagaaggaatttcacaaggtaattgtcatcagttaaggcaaggaccggccattttcacttcttttgtagtggaatgtcatcagttaaggcaggaacaggccattttcacttcttttgtgattcttcagttacttcaggtcatctgggcatatacatgcaggtcacaggggatgtgatggcttagcttgggcccagaggcctgacattcctgccttcttatattaataagaaaaataacataaaatagtgttgaagtgttggggcagcgaaaaaaatttttttggggggctggcatggagagataatgggcgatgtttctcagggctgcttccagcgggattaggggtggcgtgggaacctagaatgggagaggtcaagttgaaggaggattttgtggtaaggggtgatattgtgggattgttagaaggagcatttgtcatatagaatgattggtgatggcctggatacggttttggatgaattgagaaactaaacggaagatacaatgtctgaataaaagaaggagaaaaatgggtattaaaggactaagaattgggaggacctaggacatccaattagagagtgcccaagggagttcagcgtaattacttgcttggttggcaagtttttgggccctatccttgagtttttttatgttgtcatacaccaggccagattaatttaggtaaaaacaacactcttcatttaaaaatatacagagtcctcctttttcagcattgagtaagtcaaggcctcagcgattttggaggacagctaaagagtcaacttgggcctggaggactgataaagtttgtgatatgtctgtgatgctagcagagaagtcattagagaggctacagaaggttgtgacagaggttgaaatgcctgctatcccagtactgagagcaatagtagaggcagaaagtcttaaaccgacaagcaagggaattagtggaataactcttttttgtcatgttggtgtcatgaggggaacaaggagctttttgctcctattggcaaattgaattttgggagtaaggaaaactaatgtgcatgtgcctgtccaattagcaggtagacacatgtaggtagaggatccacagaggaagaagggaccttgtgccaggcaaaattggagatgcaaagtaaaaagatgagaaggagtgctgaaaggggtgtcttgtacctacactcctagggatccagctagggcagcagccatcagaggttgtaatggggactggtggggtgactgcatagagggggacgttcgattttcatggtgtatgagaaaacgtctagtgtctatgagcaacctttcatgatggggtaactgcatagaggggaggatcgattttcatggtgtgtgagaaaacattgagtgtctacgagcaacctttcatgatggggtaactgcatagaggggaggatcgattttcatggtgtgtgagaaaacgttgagtgtctacgagcaacctttcatgatggggtaactgcgtagagggggaggttagactttcatggtgtatgagaaaacgtcgagtgtctacgagcaacctttcatgatggggtaactgcgtagagagggaggttcgattttcatggtgtatgaggaaacgctgagtgtctacaagcaacctttcatgatggggtaactgcgtagagggggaggttccattttcatggtgtgtgagaaaatgtcgagtgtctacgagcaacctttcatgatggggtaactgcgtagaggagaggatcgattttcatggtgtgtgagaaaacgtcaagtgtctacgagcaacctttcatgatggggtaactgcatagagggggaggttagactttcatgatgtatgagaaaatgtcgagtgtctatgagcaacctttcatgatgaggtaactgcgtagagagggaggttcgattttcatggtgtgcgagaaaacgtcgagtgtctacgagcaacctttcatgatgaggtaactgcgtcgaggggagggtcgattttcatggtgtgtgagaaaacgtcaagtgtctacgagcaacctttcatgatggggtaactgcatagagggggaggttagactttcatggtgtatgagaaaatgttgagtgtctatgggcaacctttcatgatggggtaactgcgtagagagggaggttcgattttcatggtgtatgaggaaatgctgagtgtctacgagcaacctttcatgatggggtaactgcgtagaggaggaggtttgattttcatggtgtatgaggaaacgctgagtgtctacaagcaacttttcatgatggggtaactgcgtagagggggaggttcgattttcatggtgtgcgagaaagcgttgcgtgtctacgagcaacctttcatgatgaggtaactgcgtagaggggagggtcgattttcatggtgtgtgagaagacatcaagtgtctacgagcaacctttcatgatggggtaactgcatagagggggaggttagactttcatggtatatgagaaaatgtcgagtgtctatgggcaacctttcatgatggggtaactgcgtagagagggaggttcgattttcatggtgtatgaggaaacgctgagtgtctacgagcaacctttcatgatggggtaactgcgtagagggggaggttcgattttcatggtgtgcgagaaaacgtcgcgtttctacgagcaacctttcatcatgaggtaactgcgtagaggggagggtcgattttcatggtgtgtgagcaaatgtcaagtgtctacgagcaacctttcatgatggggtaactgcatagagggggaggttagactttcatggtgtatgagaaaatgtcgagtgtctatgagcaacctttcatgatggggtaactgcgtagagggggaggttcgattttcatggtgtatgaggaaacgctgagtgtctacgagcaacctttcatgatggggtaactgcgtagagggggaggttcgattttcatggtgtatgaggaaacgctgagtgtctacgagcaacctttcatgatggggtaactgcgtagagggggaggttcgattttcatggtgtgcgagaaaacgtcgcgtttctacgagcaacctttcatcatgaggtaactgcgtagaggggagggtcgattttcatggtgtgtgagcaaatgtcaagtgtctacgagcaacctttcatgatggggtaactgcatagagggggaggttcgattttcatggtgtatgagaaaacgtcaagtatctacgagcaacctttcactattatttatgggtctgggtataagtaaacaagaagagggcctgggaggagagcctgatgagcaaggggaaggtagccaaggatggagtgaaatgcagggtaagtgtcttcttaagcaataattactactaatatttttaagtttgtcagtattgatagagggcttatctgtaatatggagctggaaggcttcaattgtttcagtgatgtgtgtagttgggctttggagatgaagaataaaggaacatcgagaaggtgaaaggttacctaggggaattccagtgggtctttgctgagagatacataaaggagcggccttgagcagagtttttattaaagaggcattaatgatggaggaactttgcgtagtgaggaaacctctttcagcctatataacagcatggtggtgcagaatatggaaggcatatttagagtcagtataaatattgacatgtagtccttttgcaagagtgagggcgccgggtgtggtggctcacacctgtaatcccagcactttgggaggctgagacgggcagatcacctgagtttgggagttcaagaccagcctgaccaacatggagaaaccctgtctctactacaaatacaaaattagccgggcgtggtggtgcatgcctgtcatcccagctacttgggaggctgaggcaaaagaattgcttgaacccaggaggcagaggttgcagtgagccgagattgcgccattgcactccagcctgggcaataagagcgaaactccatctcaaaaaaaaaaaaaaaaaaaaaaaaaaaagagtgagggactgagttaaggcaactagttcagcttcctgagaggtagtggagggaggcagagtggtagcctcaatgatagatgtggaagatactatagcatagcctgcctttgctagtgagtggcaattaggcctggtggaactgccatcaataaaccaaatgtgatcagggtgaggaacaggaaagaaggaaatatggggtgaatgtcaggtggatcagagagatacagtcatgagggtcaggtgtggtatccggaataatgtgggaggccgaattgaagtctgggccaggagcaatggtaattgtgggagactaaaggaagagtgagtatagctgaaggagccagggagcagaaattatatgtatcaggtgtgaggaagaaaatagattttggaagttatgagagctgcagagagtgagtggagcatagtttgtgatttttgagggcctctgaaagtattagggcggcagcagccactgcatggagacatgatggccagcctaaaacagtaaagtcaagttgtttggccaaaaggctacaggatgcaatcctggtccttgtgtaacaattctgactgcacagctctgcacttcggctgtgtgtaatgaaaagggttgggatgaatcagggagagctagtgggggcagtctctaaaactgtctttaaggaaaggaaagaggagtggggaaaggatttaggatctatggggtcagctaggtttccttttgtgagtttatatgatggttttgttaggatggcaaaaccatgtatccaaagttgaacgtatctaaccatgcctaggaaggaaaggagttgttttgtagacggtgttggggtttgagatatcagttggacatgatcagcagggagagcacgtgtgtctttatgaagaattatcatgaggtaggtaacagatgaagaaatttgagctttggagggggatacctgatatcctttggagaataaatgttgaaggagcaggagggtgtcttgttgagaatattcaaaggaggggctacaaagaagaaggtcatcaacatattgaataaggtgagaagcggaggggtggaaagaaagtaaatcatgagaaagagcttggctgaagtaatgagggctgtccccgaaaccttgcggcagcacagcccaggtaagctgctgggaccgatgggtgtcagggtcagtccaggtaaaagcaaagagaggctgggacgaggggtgcagcggaatagtgaaaaaagcatctttaagatcaagaacggaatagtgagttgtggaggaaggtattgaggacaaaagagtgtacggtggggcaccacgtggtgactaggcaaaacaatttggttgataaggcgcagatcctgaactaacctgtaagacttgtctggtttttggacggtaaaatgggggaattgtaaggagagtttataggttttagaagcccatgctgtagcaggcgagtggtaacaggctttaatccttttaaagcatgccacgggatgggatattggcattgagcggggtaaggttgattaggttttaaggggatagtaatgggcatgtgatcggttgccagggagggagtagaggtgtcctatatttgtgggttaaggtggggggatacgagaggaagacgcaaagcaggccttgggttgggaagaagggcggcaatgagatatggctgtagtccaggaatagtcagggaagcagataatttggttaaaatgtctcggcctaataagggaactgggcaagtggggataactaaaaaagagtgcataaaagaatgttgtccaagttggcaccagagtgggggagttttgaggggttttgaagcttggccgtcaacacccacaacagttataggggcaagggaaacaggcccttgaaaagaaggtaacgtggagtgggtagcccccgtatcgattaaacaggggatggacttacccgccactgtgagagttacccgaagctcagcatccatgatggtccagggggcttccagggtgatcaggcagcgtcagtcttcagccgctaagccaagcagatcttggaaggagtcagtcagagagtcttgggctagagctttaggggctctaggggtggctgccaggcgagctgggcagtctgatttccagtgggtccctgcacagatgggacacggcttgggaggaatcccaggctatgggcattccttggctcagtggccagatttctggcacttgaagcaagatcctgatggaggaagtcttgtaagaatgcttgactgctgtggcttaggtgtgtgcggcttaggcattttgaatttcttgtgtgctggaggtgtggctgggttttgtcttacagcagaggcaagtaattgtaactcagaaatgcgttgccgtctggctgcctcctctctattattgtacaccttgaaggcaaggttgattcattcctattgtggggtttgagggccagattctaatttttgaagttttttcctaatgtcaggagtggattggatgataaaatgcatattaagaataaggcggccttctggcccttctgggtctagggcggtaaagtgtctgagtgttgctgctaagcaggccatgaactgggcttggttttcgtctttaccttgggtagtttctttaagcttgtcataattaacaggtttgtaagctgcctttttaagcccttcaactaggcaggaaatcatgtaatcttgcctagctgtacctggggaatctgcctgatagttccattggggatcctctcggggaactgctctgatgccttcctggaggtatggctcgtgaagccggtggttatcagcgtgagattgggctagagaaaaaactctttcccgttcatctggggagagggtagaagtcaggatgacatttaggtcactccaggttaacttgtaggacaaagttagatatcggaattcctgtatatgtttagtggggtctgatgagaaagagcctaaatgttgactgatctgagagaggtctgatagagaaaaaggcacatgtaccctgactatgccttcagctccagccacctctctaagaggaaattgttgggcaggtggggaagagctagtcaaggaactaaactgtaagccggaccgggtgtgaggaggggaggtgacagaaagattatagggtggaggagcggaggctgaggaagaattgggacttagcttggcctggcgacgagcagcctggggaggaggggagaggtcagatgggtctgtagaaaaggaagactggaaagactcagcgacgcttggggttgggactgagggaacaggcaggagggagagaaggaggatttgggaggaatcgcattgggaacagagactagggagggaacgaagtgtgaaaaatgcctggatgtaaagcacctcagatcatttgcctattttttgacaaaaattatttaggtcttgtagaatggagaagttgaaagtgccgttttctggctatttagagccattgtcaagtttgtattggggccaagcggtgttgcagaagaaaacaaggcgtttaggttttaggtcaggtgtgagttgaagaggttttaagtttttgagaacacaggctaatggagaagagggaggaatggagggtggaagtttgcccatagtgaaggaggcaagcccagagaaaagagagggtagagacatggagagaagggggtggggggtgcttgccacccaggaaagtgaagaaggggtagagacacggagagaaggggttggggggttcttgccccccaaaaaagcattacttgccactaagggtgaaggaccaaggcaggcgtccctgcatggtcagacacctctgaaacgtgggtgaataatcaggcaggcgtccctgcgcgattaaacaccaagggaagactgtcttcccgagtccatgaccggcgccggaattttgggttcatggataaaacgcgtctcctttgtctctaccagaaaaggaaaggaactgaaattaagagtagggagagattaaagtgtggcaccaagattgaaaggagaaagaggttgaaggatagtgagagaggtgggagaagagagtgaaaagaggccattacccgatttaaaattggtgagatgttccttgggctggttggtctgaggacctgaggtcgtaggtggatctttctcacggagcaaagagtaggacaggggattgatctcccaagggaggtctcccgatccgagtcacggcaccaaatttcactcgcgtccatgtgaagagacgatcaaacaggctttgtgtgagcaataaagttttttactcacctgggtgtaggcgggctgagtccgaaaagagagtcagcaaagggcagataggggtagtggggccgttttataagatttaagtaggtaaacgaaaattacagtcaaaggggggttgttctctggtgggcaggggtgggggtcacaaggtgctcaatgagggagctttttgagccaggatgagccaggagaaggaatttcacaaggtaatgtcatcagttaaggcaaggaccggccattttcacttcttttgtagtggaatgtcatcagctaaggcaggaacaggccattttcacttcttttgtgattcttcagttacttcaggccatctaggcatatatatacatgcaggtcacaggggatgcgatggcttagcttaggttcagaggcctgacatgatccacctgcctcagcctcccaaactgctgggattacagacgtgagccactgcgcccagccggttttacaccttttagggagaaagttcatagatggattcaaagattttctgattggcacttggttgaaagagttgttattatctaaagacctggaatcaatagaaaggattgtctgggttaagctaagggagacaaagtttctattttgttattttttttttgacagggtctctgttgcccaggctggattgcagtggcacagactgtggtttaccgcagccttgtcctcccgggctcaaggaatctgcccacctcagcctcctgaatagctgggactataggcatgtgctgtcatcatgtccagctaagacggggtctccccatgttgcccaggatggtctgaattcctgggctcaagcgatccacccacctcggcctcccaaagtgctaggattacaggcttgagcaccaccactctggccattctaatgcagatgccgctccaggcagcaggcttcagagagaatagatggtaaacttttcttatcagagttaaaaaggtgccagagtcttacattctctcctggatcaggaaaagatgtggaaaaggaaggagattctctacaaagtagatttcccccaggagacagttttgcagggctacgtaaaactatgttaaataaatacatgtcagggtaaaatacttcgttttcttccagggcctgctatttgtcatgtgatgtatcttaatgctacagaccgtttggtcagccttaagttgtctgttttaacgtcgacgctggtcagttatacctgaattccaaagggaggacagtataatgggacatatccaaaccctgcttcccatcagggactgaactggtttttcagattaactttggcgttgagagactcagttcattcagttggttggggaggcttacaattttatttttggtttacaaggtatagataactatgcctatacctatatatacaaatgtttatatatgtatatatgtgtgtatatatggtttgttttacacaaatggatgcctactttatttattttggtagcgatgaggtctcaggctaatctcgaactcctgggctcgagatcctcctgcctaggccttccaaagcacttagattacaggcgtaagtcactgcgcccggtcctgcttcaccctcttaaaaccgcccttgggggctcctcatgagtgcagacattggcgcgttcctccaaaccgcacagactccccctgcgtggacgcgtctcgccgtctttactcctctttcgccgacctttcactttcagggaataccctctggcgcccttctctggagcacacacgtgaacgccgccggattccaagaagtgagatactgaggcaaaagttacgcgcgttcagaacaggaagaccccgcaaaacgccggccaagacgtggccccgcgtccaccctgcccacaagcagccgctcccactcgcggaccgcgccctgtgcctcagacttcggatctgtgtgatccactgtgtgcaactgtacccgaaagggtccccacgtgcactacctcgtgacaactaagatggaccgtcttctactcctaggagtcatccccagattagcggggctctcagaatccttggggcttccaatccggaagttccccgtcccttctgccccaacataacatggcgccgaccgcagccacttccgtgatccgcaggcgacgaagtcgcctggtcaggatcaaagatggccgagcgccctccacgcgcctactctcgcgggccactcccggctccgctttagctgccgctcttggtgagcgccgccgccagccaatcgcggggcgcagaggcctctggccccgccccgcggatcagctgagggagccgcaatgtctcttgacagcggcggcggcgcagccggttccgggttcggcgcggggcgggggtaagcgcggctggcgagggggctgcggcgggcggcgaagggggacctggttgcggccgtgggagggggcgcccgccggcgtccaggccgggctgcggggctgcgtgggcgcgggcggccgggccggggcccgcggggtggggcgggcgccgagtctcggcctctggggtcgggagtctccatgggcgtttccggggtctccgcagatgtgaatcccgatggagcggcccgaggaaggcaagcagtcgccgccgccgcagccctggggacggctcctgcgtctgggcgcggaggagggcgagccgcacgtcctcctgaggaagcgggagtggaccatcgggcggagacgaggtgcggggctgaggccggggccgggggccggggccgggcagagccaccgggttgcgggcaggccacacgggcggcggtgcagtgtgcgctccagatttttccgtggagtgaaatgtcatgtaagaactggtatttattcggtgttctgcccaccgattcttgcgcatgattcacgcacatcatttagccttcgttacaactgtataagttagttgtgttcatatactctccagaatgcaatattgtcacgttcgttgccgtacagagtatcttttctgactgtaatggaacgaaattaaaaataatagaaggaaaagtggaaaattcacagatatgtggacatgaaacaccacactcttaaagcaaccggtgggtcaaataagtctttacaacggggaccttgttttgagacaaatgaaacaaaaatagaatacaccaaaaggtatttaggatgcagccaaggcagtactcagagggaaatttatagctgtagtgcttatattaaaaaagatctcaagtcccagcccctagaatatttatttatttaataaacctggaaagctaaaaacttgaacaaagtcatacaacgggtgagagaaagttccctcagcctccacattcactgcctccagtctcccaagtgaccatctggttgtttgatttcctctgaagcctttgtatggggagagaaatgcgctggtcctgtcaacaaaaatgtttagtttgtctgaaaattaatgaattagctccgacattatactctaaaaaggagcgaggatgggaaatatttgctgtttggaagcaattttttttttttttttggttaatttcaccccttataatgtgcttgcacctggttttttttgtttttttgtttgtttttttgagataagagtcttgctctgtggcccagactggggtgcagtggtgtgatctcagctcactgcaccctctgcctcccggttcaagtgattctcccgcctcagcctcggagtagctgggactacaggcgtgcgccaccatgcctggctaatttttgtatttttagtagagatgagctttcgccatattgcccaggctggtcttgaacaactgaactaaagtgattcacctgcttcggcctccgaaagtgctgggattacaggtgtgaaccactgtgtctgacctggttttgttttttggggtgttttggtagtcttacattccagtatcaagtcaaagtttattttacaactttgaaagtatttagatatcatcataacatatcaaaattatccctttaagacaagaggaagtatttgaagatttttccctttgtctttacttgatagactaggaggtttggtgaagagcagaggccctagagacaaattatgtgggtttccaatctgtcaacacattactctgggctaacgacatctttctgcgcctatgtacctacttcatagatttgctctgaggagttaatgagatcatacacggactgcttagaaggaactttagcgttagcacttagcattagccattgttattgtaacatgttatacatgttattacatggtaggacattacatgttaagacaaggagagaaaatatgtcgttgagtttatcttttaataggaacgattttagtgaatttataaataatgttgccagcaaaaactttaagattattgtattagtttgttcatactaccatagcaaaatactacattctgggtggcttaagcaacagaaatttatttatttatttatttatttatttatttatttatatattttttgagacagagtctcactctatcacccaggctggagtgcagtggcgcgatctcggcccactgcaagctccacctcccgggttcttgccattcttctgcctcagcctcccgagtagctgggactacaggcgcccaccaccacgcctggcagtggtattttgtatttttagtagagacggggtttcaccatgttagccaggatggtctcaatctcctgacctcgtgatctgcctgcctcagcctcccaaagtgctgggattacaggcgtgagctatcgcgcccggccagaaatttattttttattttattttatttttttaatttttgagatagagtcctgctctgtcacccaggctggagtgcagtggcatgatctcggctcactgcaacttccctcttccaggttcaagcgattctcctgcctcagcctcccgagtagctgggactacaggcacgtaccaccacacctggcttatttttttctattttagtagagatggggtttcactgtgttgcccaggctggtctcgaactcctgagctccagcaatctgtctgcctcggcctctcaaagtgctaggattacaggtgtgagccactgtgcctggccagaaatttattttcatggttcaggaggctgggaagtccaagatcaaggtgttggcagattgggttcctggtgagggctctcttggcttgcaggtggccactttcttgctgtgtcctcacatggcagagagggggactctgcttgctctctctgcctcctcttaagagggcaccagccctgtgacatctgattcccacctagtgacctcatttaacatttatcagctcacaggccccatttccaaatacagtcacattggggattaggacttaaatatatgaattttaggggggtacagacactcagttacaaacattcagttcctaacagttgtagaacttgattattttatttatttattttatatatatatatgtatttttttttttgagacggagttttgctcttattgcccaggctgtagtgcagtggtgccttcttggctcaacctccaacctcccgggttcaagcaattctcctgcctcagcctcccgagtagctgggattacaagtatgtgctaccacgctcagctactttttgtatttttagtagagacggggtttctccatgttcgtcaggctggtcttgaactcctgacctcaggtgatccacccgcctcggcttcccaaagtgctgggattacaggcgtgagccactgtgcccggcctgatatatttattttttgagacggagtcttactctgtcacccaggctggagtgcagtggtgcgatcttcactcactacaacctgcatcttccaggttaaagtgattctcctgcctgagcctccagactagctgagatttcaggcgtgtgccaccacacctggctagttttttggtatttttagtagagatgaggttttaccatgttggtcaggctggtcttgaactcctggcctcaaatcaaatgatccacctgccttggcctcccaaagcgttgggattacagccatgagccacctcgcccagacagaacttgattattttaaagcaatgatgtgcctgccatttataaggcattatttgggggaaaagggaaagcctaggtaacgtgtaggaaggggtgcaacaaccttgttttcccaaagagctctttatccagtctggagtgcagtggcacgatctcggctcactgcaagctctgcctcttgggttcacaccattctcctgcctcaacctcccaagtagctgggactacaggcacccgccaccatgcccggctaattttttttgtatttttagtagagacagggtttcaccatgttagccaggatggtcttgatctcctgacctcatgatccacccgcctcggcctcccaaagtgctgggattagaggcgtgagccactgcgcccagtctttttttttttttttttgagacggagtttcactcctatttctcaggctggagtgcaatgatgtgatctcggctcactgcaacctccgcctcccaggttcaagtgattctccttcctcagcatccagagtagctgggattacaggcactcaccaccatgcttggctaatttttgtattttgtagagacagggtttcatcatgttggctaggctagtctctaagtcctgacctcaggtgatcctcccgcctcggcctcccaatgtgctgggattacaggtgtgatccaccgcgcccagccaagagctctttattctaagagagtggcagaaatgtacatcaactgcttgaaagatttaacccaccaagcgtcaagcgcagcaaatgctgtgaatagaactttagcacaaagcatctcggttccagattagaatgctgatattcaggccaggcacggtggctcatgcctgtaatcccagcagtttgggaggccaaaacaggaggatctcttgaccctatgagtttgagaccagctagggcaacatagaccctgtatctacaaaaacttaaaaaattagctgagcgtggtggtgcatattggtagtctcagctactcaggaggctgaagtgggaggatcacatgagcctgggagttcaaggctgcagtgagctgtgattgctccactgcaccacagctggggtaacagcgcaaggccttgtctcaaagaaaaaaaaaaaaacctgatgttctggcatggagacgcctctgttacaaactggctctggcgacaccgtgacttgcactggttttggggcttgaaggagactgtcctggcagttaacgctcaatggaatgggaagagcttgaccacaggtgatacttgccttggatacagtacttccaatagtacagaatgtttgcacaaataagatttttaatatccggtttcatggcagtatcatttacttgtagtaaaattcaccttttttggggttcagttccatgagttttgggaaatgtactcaccagtgcagtcaagatgtagaacatgttcgtcaccctgaaaggtccccctgagtcccggctcctggcagccactgatctggtttctttgccttctgctgcttccagcgtgtcgtgacacagggtcacagggtgtctgccatcatcttctgcgcctggcttctttccctggcacgcaccttgttgcatggatgagcagtttgctcctttctgttaccgggtagtgttctgtggtttggatgcaccatggcttgttagtttacaaccagtggatggacatttatactgcttcctgtttttgtaagaaataaagctaatataaacataagtgtgcagtctttgtagggacatacatttttctcttagctaagtaactatgaatggaattgctgggccacgtggccagtgtctgtttaacttgctgagaaactgccgcattgtttcccatgtgcttgtccattttgcagtcccacagcacagtacgagagttccaggttttccacttcccttttggccacttgtaggtggtcagtctttttttttttttttttttttgagacagcgtcttgccctgtcgccaggctggatttgcagtggcgcaatctcagctcactgcaacctccgcctcccgggttcaagccattctcttgcctcagcctcctgagtagctgggactacaggcacgtgccaccatgcccggctaatttttttgtatctttagtagagacggggtttcaccatgttggccaggatggtctcaatctcttgaccatgtgatccgcccgcctcggcctcccaaagtgctgggattacaggcgtgagccaccgtgcccggcccgtggtcagtattttcagccaattcttatttggtgtgtagtggtatttcatggttttaatttgcatttctctgaagattaatgatgttgagcattttgtcatgtgcttaatttgccatccatatctcttctttgataaagtgtttaaattgttttaagttgcattatttactttctatttattgagttatcagagttctctatacattctggatacaagatctttgtcagatatgtgttttacaaatatttccaccagtccatagcttgtcttttcatctttttaaacaatatctttgaagaacagatttttacttttttttttttttgagatggagtctcgctctgttgccaggctggagtgcagtggcacgatctcagctcactgcaacctccacctcccatgttctcccacctcagcctctcaagtagctgggattacaggtgcatgctaccatgcccggctaattttttgtatttttagtcgagatggggtctcatcctgttggccaggctggtctcgaagtcctggtctgaagtgatccgcccgccttggccacccaaagtgatgggattataggcgtgaaccaccgcccccagccttactttttttgttgttgttgagccagagtctcgctctgtcgcccaggctggagtgcagtggcgtgatctcggctcactgtaacctccgcttcctgggttcccaccattctcctgccttagcctcccgtgtagctgggattataggcgcccgccaccatgcctggctaagttttgtatttttagtagagactgggtttcaccatgttggtcaggctggtcttgaactcctgaccttgtgatccgcccgcctcggcctcccaacgtgctgagattacaggtgtgagccaccacgcctggcccagaattgactttttttttctttttttgagtcggagtcttgctctgttgcccaggctggagtgcagtggcaccatcttggctcactgcaagctccacctcctgggttcacgccattcttctgcctcagcctcctgagtagctgggactacaggcgcccgccatcacgcccagctaattttttgtagttttggtagagacgtggtttcaccatgttagccaggatggtctcgatctcctgaccttgtgatccgccccccccttggcctcccaaagtgctgggattacaggtgtgagccacggcacctggcccacattttacttttgacaaacctcagcttattattattattttttcctggtttgtgctttttatatcctatctgcgaagtccatgcaagacccaacggcactaagatttttgcctgtcttttccactggaagtttcatagttttagattttacatttgtctctgtctggccatccttacacagccacaatactgtattgtttactatagcatgatggtaagtcagttaagtaatatgagtcttccagcttcattctttttcaaaattgctttggtttttctacacgttttttctgtgaactttagaatcagcttgtcagtgtctacaagccctctgggattttgactggaattgcattgaatgtatgaaacaatctggaggacagctgacattttaacaatactgagtcttctgattcacacacccataggtcagtgatgggagcaaggctcaggctaaagcagattcagggtgtctttctgtgtggaacgtttaggaaaagtatgtttgcatgccactgtctcctgaccaaacccttcgcttttttgtcttctagtatctttatgtatccttatagattattataggcagtaatgattaatgatgagatattaaaacgcctttgttcttttgatttaaggagagggcaagtattgaggattttccctcttgcttttgtattcagggccgggcgctggtggctcacgcctgtaatcccagcactttgagaagccgaggcgggcatatcacgaggtcaagagatcgagaccatcctggccaacattgtgaaacctcatctctactaaaaatacaaaaattaactggccctggtggtgtgcgcctgtaatcccagctactcaggaggctgaggcaggagaatcgcttgaacccgggaggcagaggttgcagtgagctgagatcgtgccactgcactccagcctgggccacagaaagagactccgtctcaaaaaaaaaaaaagaaaaaaaaaatcccaaagtgtcagaattactgtattcagctatagatgcatccctgtatataagatgcagtttcttatacgtgtacaaatgcctatcgcaggccaggtgcggtggctcaagcctgtaatcccaacactttgggaggctgaggcgggtggatcaagaggtcaggagttcaagaccagcatggtgaaaccccgtctctactaaaaatacaaaaaattagctgggtatggtggcgcatgcctgtagtcccagctgctcaggaggctgaggcaggagaatggcttgaacctgggaggtggaggttgtggtgagccgagatggtgccactgcactccagcctgggcgacagtgcgagactccatctcaaaaaaaaaaaaacaaacaaaaacaaaaaaaaaaacaaatgcctatcacagttggctcagtcactttttctgtgactgtcattgcttcaattttatgttgatttatgaaacctaagtttacacagaaaagaaattaaggactaaattaagatactgaagaattacttaagcccctgagtttttttttttctttttttttttttgagacagagtcttgctctgtcacccaggctggagtgcagtggcgccatatcggctcactgcaagctcctcctcccgggttctcgccattctcctgcctcatcctcctgagtagctgggattacaaggcgcccgccaccacgcccggctaattttttgtatttttagtagagatggggtttcactgtgttagccaggatggtctcgatctcctgaccttgtgatctgcccgcctcggtgtgagccaccggacctagccaaccccctgagtttttttaaagttctaataatactcatcaggttagctgtgtatgcaagcatattgtaaaattgcttttttttttttttatttccagttggagtctagctctgtcgccaaggctggagtgcagtggcgcgatctcagctcactgcaacctctgcctcctgggttcatgcgattctcctgcctcagcctcccaagtagctgggattataggcaaccgccaccatgcccagctaatttttgtatttttagtagatatggggtttcactgtgttggccaggctggtctcgaactcctgacctcgtgatccattcacctcagcttctcaaagtgctgggtttacaagtatgagccactgcgcctggctgtaaaattgccatttaagaggctgtgtgtaactggaggtattgatgggtgtctttgagagggtggggattcagaaaggttcaggatgggccgggcgcggtggctcacgcctgtaatctcagcactttgggaggccaaggtgggcagatcatgaggtcaaaagatcgagaccatcctggctaacatggtgaaaccccgtctctactaaaaacacaaaaaattagccaggcgtgatggcgggcgcctgcagtcccagctactctggaggctgaggcaggagaatggtgtgaacctgggaggcggagcttgcagtgagccgagatggtgccactgcactccagcctgggcgacagagcgagactccgtctcaagaaaaaaaaaaaaatttctttatgtctttcttggtcaagtgtttttttttacatatgtacaatggggatcctgagttggaaccacatactttggtaaacaaagtgcagtagtgttcacagttaccacgatcatatcccgtgttgacccaccctctcttttttaggttgcgacctttccttccccagcaataaactggtctctggagatcactgtagaattgtagtggatgaaaaatcaggtcaggtgacactggaagataccaggtgagtatgttctgagcttcttttggtgtttcttcttgtagcttaagaagcctgacttcgtgctctgtgctgtgtgccacggctgaggaggagaagaaatgctgtctttagtgtgataacagcggctcatttttataacagcacagtcatgtgtcccttagcaacagggatccagtctgagaaatgtgtcagacaatttgatcatcttgcaaacatcatggagtatacttaaacaaacctagatggtgtagcctactacatacctaggctatatggtatagccgattgctcctaggctatcaacctatacagcgtgctactgtactgaatgctataggcagttgtaacacaatggtaagagtatttatctaaacacagaacaggtgcagtaaaaatatgatattttaatcttgtgggactcctatcgtatatgcgtctgttgaaaaaaacattattatcagcccgggcgcggtggctcacacctgtaatcccagcactttgggaggctgaggcagttggatcacctgaggtcaggagctcaagcccagcctggccaacatggagaaaccctgtctctcttaaaaatataaaaattagccgggcgttgtggcatgcgcctgtaatcccagctactcgggaggctgagacaggagaatcacttgaacccgggagtcggagattgtggtgagctgagatggcaccactgcactccagcctgggaaacgagtgaaactccatctcaaaacaaaacgaaacaaaagtttattatctggggcatgactgtagttaattaggctcccaaggtattagaagatgtatttcctggtttccaggatgggacacttagtgacactttggtgtctatgacccttcttgaatgtattcaaattaagtatgtctcagaaataagacttaaaagatgctggtaatttttggttcttgcaagcctattcaagtttgatttctttccctcaaatcaaaaaatcattttttaaaactaataaattctcgttcttgtacaactgaagtacagattgagtatctgaaatgattgaaactagactgtttagattttggattgtttcagattttagaatattttcattatacttaccagttgagcatgtctgaatcaaaattctgaaatgttccagtgagtatttttttgagtgtcttgttggtgctcaaaaagttttggatttcacatttctgattagggacattcagcttagggatattcaacttggaaagtggaaagctttccaaaatcctattcatacgttaaaaatgcatatgttggtatatatattttgcataaatgcaatcacactacacatactgttgtagcgtcagcttttttctttctttcttttttttttttgagatggagtttcactgtgttgcaggctgaagtgcagtggtacgatctcggctcactgcgacctccgactcccaggttccagccattctcctgccccagcctcccgagtagctggcattgtaggcacacactaccaagcccggctatttttttgtgtttttagtagagacgggatttcaccatgctggccaggctggtctcgaactcctgatctcaggtgatctgcctgcctcagcctcccaaagtgctgggattacaggcgtgagccatcgcgcccggccagcttttttcacttacggtgttttatggagcgcttcacatgtcactgcatctacatccagctcatcttttcattatcttaggatagtttctttgtcacttcccttattggtggacatttattgttttgactttttcttactataaataacactgcagtgactctttcccaaactctgccttcatgtctgttttcttgggatgatttctcggaagggaagtctgtgtcagtgttactcagaatgtgcctattcctttttttctcttttttgagacggagtctcgctctgtggctcaggctgaagtgctgttggtgcgatctcggctcactgcaacctccgccacccgggttcaagcgattctcctgcctcagcctcccgagtagctgggattacaggtgcccgccgccacgcctagctcagatggggtttcacaatgctagccaggctggacttgaactcctggcctcaggtgatccacctgcctcagcctccccaagtgctgggattgcaagtgtgagcccccacacccggccagaatgtgcgtcttttaaatctgctgcaagtggcaggtggtcttctagcagtatgttgagagtgtgctgttctcactgcaggattttttttgtttggtaaagatcaggctctgtgagattctttggtaactgatagtttcagggatagaagactaggaagtaggttttaataggaagaactgatgctccgtttcctagtctaatagatatcagattaagttctctatttcttggcacaatgggaaaggcagggtgctggtccctagctgtcccgcctgcttcagggcctggcttccccatgctgggtgctggtcctgggctttcctgcctacatcagggcctggcttctccacgctgggtgctggtcctgggctttcccgcctacatcagggcctggcttccccgtgctgggtgctggtcctgggctttcccgcctacatcagggcctggcttccccgcgctgggtgctggtcctgggcagtcccgcctgttccagggcctgggttccctgcactgggtgctggtcctgggcagtcccgcctgttccagggcctggcttccccacgctgggtgctggtcctgggtagtcccgcctgttccagggcctggcttccccgcgctgggtgctggtcccgggccttcctgcctgttccggggcctggcttcctcgcgctgggtgctggtcccgggcagtcccgcctgttccggggcctggcttccccgcgctgggtgctggtcctgggcagtcccgcctgttctggggcctggctttcccacgctgggtgctggtcctgggcagtcccgcctgttccggggcctggcttccccgcgctgggtgctggtcctgggccttcccacctgttccagggcctggtttccctgtgctgggtgctggtcctgggccttcccgcctacatcaggacctggcttccccgcgctgggtgctggtcctgggcctttctacctgttccagggcctggcttccttgcgctgaatgctggtcctgggcctccctgcctgttccagggcctggcttccccacgctgggtgctggtcctgggccgtcccgcctgcttcagggcatggcatccctgtgctgactgcatggtggtggtactttcttatggctattgtaatttaccacaagcttaatggatttaaaaaacacaaatttgctgtcttactatagttatggaggtccagagtccgatatgggtctgatggggctaaaatccaggtctgaacagggctggtttcttctggaggctccaggggagaatttgttctctgccttttccaggttccagaggtgccacgttccttggcagaggtgggctggaggggaggggtgctcaggcagaaggaaccacgtgtgtaggggcccctgagcataagcagggctgtgtggtcggagcgtgtggtgagcggcaaagtcacacaagggagcttgggctttagcctgagagcagtgaggagtcatcaaaggggtgtaagcggaggagtgaaataatcagatttttgtttggaaagaacaggaggatgagtgatggctgcagtcgcccctcggcatctggggggattggctccagccccctgcatgcacccaagtccgtgcacactctagccccgtagccagccctgtggagcaggaggacacagaaagtcagtccagctccagcgcccctgcatgcacccaagtccgtgtgcactccagccccgtagccagccctgtggagcaggaggacacagaaagtcagtccagctccagcgcccctgcatgcacccaagtccgtgtgcactccagccccgtagccagccctgtggagcaggaggacacagaaagtcagtccagcatatgtgtgggattcattccctctcattgaaaaaaacccgtgtataagtgcatctgcacagctcaaaaccgcatcttccagggtcagctttgtgttgtaacagcagaactcagacacacacagccactgcctggtttcggaggttttacggggagacggctgtggcagttcatttgcttactgtctgcatttgctttcctgctacagacggcagagctgagtagtggcaatggtgaccacaaaacctacactgtttaccctctgtttatggaaatcgtttgccactcccatccctcagcaaaccgtggtggtcactcggatgtgagttctgtccactgctggggcctcgggagtgaagctgcagagctgaggcctgtgtggtttcagtcgttttgcccggttgccgttttgtgtgtcgggtatgctgtgctcttggatcttggtcacctgaccaacacctgatttgctgtcaggtctctgctcagaagtccccaggaggcacttcctgccccatcaacttagcctcctcctgtctgtccctgggtcagcagcatctgcattggcctctccctgggcagagtacctcaaggggcttggcagccagaccacaagctctgagtgcagggccatgtcctgcagctgacggcccagcatttagtccgcttctgcccagagccagtctcttgggagggatcagtactcattggaggcatgagttcaccggggttgtgatggctgcaaggaacagaactgtggatagcacaagtccagctcaggggaggctggaggtggaagcaccacactgtagacgaggcctccgggtccactaggaggcaaacggggagagaacccagccctgcagcagcagagctgccaagcacgtgaggaggtgtagtggctggttaggctgtcagtcagggagaagtgggcgagccatttcttgagagaatggtgaggggtgcgtggatgtgtgcatcgttacgtatttacactgttcctatgagtatttccagagtggtcatatcgagctgcttgctaatggtgctagaaaaaaaatcttgtaactccaagttattttaagtagaataaattgtgtttttgtttttttacagcaccagtggaacagtgattaacaagctgaaggttgttaagaagcagacatgccctttacagactggggatgtcatctacttggtgtacaggaagaatgaaccggaacacagtaagagagaggaaggcttgccggggtcagacccgcacgggggtgcacgtgagggcgctctctgaacgttcctcctggctacatcccttcccataggaacgttcctcctggctacaccccatttcttgctcacatgggttcctgccgtgaatagtgtctgttgagtgggagtgtcgactttgcagcctgagcccagccattcctcaggaataccactgtggccatgagcagccaatcccaaaatggcagccaaggagaaactgatggggatggtttgggttctacaggagaagaacttgagttatggggaataaaacctaggaccaggggtctggaggccattgatggttctgcttttggagaccttacaagaaacatcaaaggttagactggattccagtaagttttttcagctccagaagtcccgtttttgttttgtggaagaacagtataggacaaggaaagttatgggagtccttcgaaggtcacccctgaaatacttttttttttttgagatagagtttcgctcttgttgcccaggctgaagtgtaatggcgcaatctcagctcaccgcaatctccacctgccgggttcaagcaattctcctgcctcagcctcctgagtagctgggattataggtgcccaccaccacgcccggctcatttttgtatttttagtagagacggggttttgccatgctggacaggctggtctcaaactcccgacctcaggtgatccacccacctcaacctcccaaagtgctgggattacaggcatgagccactgcacctggccaatacttatttatttaattttttaaataaataagagacagagtctcgctctgctctgttgcggaggctggagtgcaatggcgtgatctcagctcactgcaacctccacctcctggtttcaagcgattctcctgcctcagccttccaggtagctgggattacaggtgcacaccaccacacccggctaatttttgtatttttagtacagacagggtttcgccgtgttggccaggctggtctcgaacttgggacctcaggtaatccgcccgcctcggcctcccagagtgctgggattacaggcaagagccactgcacctggccacccctgaaatacctaaagaccacagtggtgagggagaatggggcaaatatgtcttaggcatcttcagcataaacttaaccagcccctggccacacggaaggatcttgtatctgctcctttgtgtagtttgaaattataagtgaggcatagattcttcaccttcttctgcctcctgatgccattttttcccgaggcttatttcttttgtgttggtagagatgttttagattacttgttttgaaatctcttaaactgatgaatttgttattagctgatgagtcaaaataatcaacaaaaacaaatggactggagaacagaagagaaaaatgagttctcagtttgcacaggggccaccacttttctgatttgattgattttcttttagacgtggcatacctctatgaatctttaagtgaaaagcaaggcatgacacaagaatcctttggtaagtaagagtgtagcaaagaagtgggtgcatgttaggagctatagcattccttttgtgttttgagatggagtctcgctctgttacccaggctggagtgcggtggcgcgatctcagctcactgcagcctccgcctcctgggttcaagcaattcccctgcttcagtctcccattttttttttttttttttttgagacggagttttgctcttgttgctcagcctggagtgcagtggcgcgatctcggctcactgcagcctcctcctgccgggttcgagagattctcctgcctcagcctcccgagtagctgggattacaggttgcaccgtcacgcctggctaattttgtttgtttgtttgtttgtttgttttttgagatggagtcgcgctttgtcgcccaggctggagtgcagtggcgcgatctcggctcactgcaacctccacctcccgggttcatgccattctcctgcctcagcctcccgagtagctgggactacaggcagtcgctaccatgcccagctaattttttgtatttttagtagagatggggtttcaccgtgttagccaggttggcctcgatctcctgacctcgtgatctacccgcctcagcctcccaaagtgctgggattacaggtatgagccaccgcgcccggcacgcctggctaatttttatatttttagtagagacggggtttcaccatgttggtcaggctggtctcgaactcctgacctcaggagatacacctgcctcgacttcccaaagtgctgggattacaggcctgcaccaccgtgcctggccttggggctgttgcattcttaagagcatttcaatccctagagtgtctgcttgagccctggttgtgtgctgcttctgctccttttgggttacagaagctaacaaggaaaatgtgttccatgggaccaaagatacctcaggtgcaggtgcagggcgaggggccgatccccgggtccctccgtcgtcgcccgccactcaggtgtgctttgaggaaccacagccatcaacatcgacgtcagacctcttccccacagcctcggcctcttccacggagccttctcctgcagggcgagagcgttcctccagttgtggtgaggtcacatctcatgaggtcttggtgctggttgcatggtttttgttcactactctttacctgtgttgttacagaggcagataagcgactgaggactggcatgaggttctcagtagtgagatttctgtaggagtcaatattgagtgtgttgttcccttcacttcccaagagaagtgaagatcagggactctagtaccattgtgtattttgcagtttcattgagactataattcgcataccataaaagtcatccagccgaagtgtacatttcagtggattttagtacatcacaaggtgtgggaccatcaccactcattgacacgaaaaggaaaccggtgcccaccagcagtgactccacatgtccccttcccctcggccccaccagcagtcactccccatgtccccttcccctcggccccaccagcagtcactccccatgtccccttcccctcggccccaccagcagtcactccccatgtccccttcccctcggccccaccagcagtcactccccatgtccccttcccctcggccccaccagcagtcactccccatgtccccttcccctcgaccccagcagcagtcactccgcatgtccccttcccctcagccccagcagcagtcactccgcatgtccccttcccctcggccccaccagcaatcactccccatgtccccttcccctcggccccaccagcagtcactccccatgtccccttcccctcggccccaccagcagtcactccccatgtccccttcccctcggccccaccagcagtcactccccatgtccccttcccctcggccccatcagcagtcactccccatgtcccctccccccagcccctggcagctgcgtgtgctttcggcctctggatttttctgttctagacacttcacagacatggaatcatgcgtgctcttttttgttgttgttgagacggagtctcgctctgtcgctcaggctggagtgcagtggtgcgatctcggctcactgcaagctccgcctcccaggttcacgccattctcctgcctcagcctcccgagtagctgggactacaggtgcctgcaaccacgcccagctaatttttttttgttttttgtttgtttgttttgagatggagtctcgctctgtcacccaggctggagtgcggtggcgcgatctcggctcactgcaagctccgcctcccacgccattctcctgggtccacgccattttcctgcctcagcctctgagtagctgggactacaggcacccgtcaccacgcctggctaattttttgtatttttagtagagacggagtttcaccgtgttagccaggatggtctcgatctcctgacctcgtgatctgtccgatcggcctcccaaagtgctaggattacaggcgtgagctgccgcgcccagccgtgactgggctctttcacttagcgtggtgttttcagagttcatccagaagaggatgttatttaaaactagttttgcagatgctgttccttacggcatgactcttacctcttccatggtcattgggaagaaattccatctgggtgcagcgtgacgggaatgttttctgttttcttttagggtttgtcacgtggaggatgtgtacatatggattctctaaattggatcgcgctatacatattatttttttttaattttcttagctattctctattctagattatgttttgaattagcttttccagtttaatagaaaaatctttttgagatttttgatttggggagaattgacagttttacagagcccaggaaaatggtgtttctccttgtttgttaagctcttcctgttcttcagtgaagtctcacggctttcttcgtgtcgtctgggctcattcttagtcctggagtgcttggctctcgcgttcttacattccatagcagtctgcagattcctatgaacagaagagcctctgaatctcagattaggctgtgtttcgatctgacaggaaagctggttccctgataaaaagtccagaaatgcccgctcagctcagctactcctgaggtcaccagggccttctgtgcactccacgctgctgtttttgctcaggtttttgcctcgaggtttcacagtggctgccagagctctgaacatcactgacacattcatggcaggcaccaggaagcctccggagaagggacctttgctttccatggatctgttggctgatccgcagcagcaagagccatgtctcccagaagactgctccctctgtctcatgagccagcctggctgctctgctacaggacactccttgtttttatgtctctctgtgtattccagtgggatttggggaaggagcggcatcgggtgcagggactcagtgtgccttcttgaaaccagaaacctctcacgctctctgggcctgtttccacttctgttgatgtggtttttactccgttgtatgccgttgctctgtcttcacacgggcagccacacctctcctgttcgttgatgttcttgaggccttgttgcatccgctccttccttcttcagaggctcctttggatgagcccagctcctcagcagcagagtgctctttattttctgtttttttgagacagagtcttgctctgttgcccaggctggagtgcagtggcgcaatctcggctcactgcaacctccgcctcccgggttcaagtgattcccctgcctcagcctcctgagtagctggggtcacaggcgcgcaccaccaccacgcccagaaaatttttgtatttttagtagagacgttgttggccaggctggtcaccaggagcagagtgttctaaaagcatacctcagtctgatggatgacatcccagccatctgaagagtaacatccagatgtgttgtaacattccagtgtgttgtaacattcctgtaacattccaatgtgttgtaacattctggtgtgttgtaacattcctgtaacattctggtgtgttgtaacattccggtgtgttgtaacatttggtgttacgcggtgtgttgtaactttctggtgtgttgtaactttctggtgtgttgtaacattctggtgtgttgtaacaatcgcggtgtgttgtaacatccggtgtgttgtaacattccagtgtgttgtaacatttggtgttacatgctgtgttgtaacattctggtgtgttgtaacattcccggtgtgttgtaacgttccagggtgtgttgtaacattccggtgtggtgttccggtctgttgtaacattccaacattccggtgtgttggtgtgttgtaacattccagtgtgttgtaacatttggtgtgttgtaacattccggtgtgttaacattccggtgtgttgtcacattctggtgtgttgtaacattctgatgtgatttcgggactcacctgggaggacttctcaggtgctaattggggacactaagttgcaggcaagactgtggagagtgagtgctatgtagtttccacctgatatttctggagataagaggaacagcggagaccaaacccatgacagacaagtttctactagcctgtctcctgtagactaaacacaaccccggcttctcagagcctctttgatttacctttgttttaacatcataaccttaaatttatgagtgaaagaaaataacacttcaagatgaaagcatctcagcactgggcacagtggctcacgcctgtaatcccagcactttgggaggctaaggtgggcagatcccttgagcccaggagttcaagaccagtttgggcaacatggtgaaaccgtatctttacaaaaaatacaatataaaaaatacaaaaattagccgggtgtggtggtgcatgcctgtaatcccagctacttggaaggctgaggagggaggattgcctgagcctgggaggcagaggttacaatgtgctgagattgcaccactgcactccagccttggcaacaaagccagagcccatctcaaaaaaaaaaaaaaaaaaaaaaaagacctgtaatcccagcactttgggaagccaagacaggcgaatcacttgaggtcaggagcttgagacctacctggccaacatggtgaaaccccgtctctactgaaaatacaaaaattatccaggcatggtggcaggcgcctgtagtcccagctactcaggaagctgagacaggagtttcacctgagagaggaggatcacctgaggctgggaggcggaggttgcagtgagccgataccgcgtcactgcactccagcctgggcgacagaccaggtctcaaaaaaaaaaagaaaagaaaacatgccagatttgaatagccacctgaatgctgaagttttaccagctctcttgggctgtgtacccttcatcgtatcttccaggttccttaaaacctacccttgggcacagctgggatgtgcactggctcttcacagctagatccagcatgcactgactctccccgtgcagggacagccccagaggaatagaggtggcgttccggccgctccagcgtggcccacagcgtttcaagtgcagcaagcacagacaggacgcggggttactagtattttggattgactgcagattttgaactgtctgcctagatgaactataccatgtccctagggccaagtcccatgtgcattttgtggctactagaccctcttcagaaatcaaacacaaaatagctctggcctgtaaagaaaacaaacttcaccagtaaaattgtttcctgttcctatccaccaatgtgcatagcacagtgtgtagtctgggtaatacggtttgcataattttttgataatgttctacttaaaaagggcagcgtatttatatattacttatgtaattaaaaaaaaaattcttctggccgggtgtggtggcttacgcctgtaatcccagcactttgggaggccgggtggttggatcgcctgaggtcgggagttcaagaccagcctggccaacatggcaaaaccccatctctactaaaaatataaaaattagccaagtgtggttgcgggcgcctgtaatcccagctactcgggaggctgaggcatgagaatctcttgaacccaggaggtggaggttgcagtgagccaatatcctgccactgcactccagcctgggtgacagcacaagactctgtctcaaaaagaaaataaaaataataaaaaataaaaattcttctatctgtatgcctaagtgtatgcatactaacaaaataagtatagttactgcttattgagcagctactaaatgtgaggcagtgtgccaggtacattctgtaagtggtaagatggtgctcctctccacgttggctgagcacggggcgctggagatgatggcgtgagtgggtgccggctgggggccggcccacaggctgtctctttccttctgttcgtatatgaggtggtttgtccccaaaactattctgttttctttcagctgctgtaagccagtttcttgtgtttttttttttcaaataataacacttacatttgaatactgtaagctagatatgtattatgctgtaatatgataaactaagtctttattaagatataggttattcacacctgtaatccttattcacacctgtaatccttattcacacctgtaattccagcacttggggaggccgaggtgggtggattgtttgggctcaagagtttgagaccagcctgggtaaaatggcaagaccctgtctctaccaaaaatacaaaaaacaatttagctgggcatggtggtgcacacctgtagtcccagatactcaggaggcagaggtggaaggatcgctttagcccaggaggcagaggttgcagtgaatgaagatctcgccactgcattccagcctgggtgaagagtgagaccctgtctcaaaaaaaagatagaggtgattagaaagtctgcctgtttttctgccaaggtcattcctgtcgttatgactctggcttcttgctcgtggagatagcgctctccctacaagtcactgtgctgtatccttcccgttatcacacctcttgtaaaatagttcacacgcagcaccatctccacccgttggaagctatgcatccctccactggagcatctgtgctttacacagacttctgtttttttttgtttgtttgttttgttttactttgtttttttgagacggaattttgatcttactgcccaggctggagtgcaatggcgcgaacttcgttcgctgcaactccgcctcctgggttcaagcagttctcctgcctcagcctcccaagtagctgggttacaggcatgtgccaccacacccggccaattttgtatttttagtagaaatggggtttcactgtgttggtcaggctggtctcgaactcctgacctcagatgatccacccaccttggcctcctgaagttctgggattacaggcatgagccaccgcgcctggcattttttttttttttttaagaaatgaggtcaggccgggcgcggtggctcacgcctgtaatcccagcactttgggaggccgaggtgggtggatcacgaggtcaggagatcgagaccatcctggctaacacggtgaaaccctgtctctactaaaaatacaaaaaattagccgggcgtggtggcgggcacctgtagtcccagctactcaggaggctgaggcaggagaatggcgtgaaccagggaggcagagcttgcagtgagccaagatcacgccactgcactccagcctgggtgacagagtgagactctgtctcaaaaaagaaaaagaaaacaaaagaaatgaggtcttggccaggcacagtggctcatgcctttaatcccagcactttgggaggctgaggcaggtggatcatgaggtcaggagatcgagaccatcctggctaacacggtgaaaccctgtctctactaaaaatacaaaaaaattagctgggtatggtggcgggtgcctgtagtcccagctacttgggaggctgaggcaggagaatggcgtcaacccaggaggcggagcttgcagtgagccactgcactccagcctgggcaacagagcaagagtccgtctcaaaaaaaaaaatgaggtcttgctctgttgtgcaggttgggagagtgatgtggtcatggctcactgtagcctcgaactcccgggctcaagtgatccactcacctcagcctcctgagtagctgggaccatatgctcgtactgtcacgcctagttaatttttttttcttttttgtattttttgtagagatggtgccttgctgtgttgcccaggctggtctaaaactcctgggatcaagtgatcctcccaccttggcctcccaaagtattgtgattacaggtgtgagccccatgcccagcctcagacctctattttttatttttatttttttttccccagagggagtttcgctcttgttgcccaggctggagtgcagtggcacgatcttggctcactgcaacctccgcctcccgggttcaagcaatttttctgcctcagcctcttgagtagctgggactacatgcactcgccaccacgcctgtctaatttttttgtatttttagtagagatggggtttcaccatgttggccaggctggtctcgacctcctgacctcaggtgatccacttgcttcggcctcccaacgtgctgggattacgggtgtgagccaccgcacccggcccaaagctctgttgtaacaagtttatgacacagtgtgtatcatatgaccacgggtatgtgggtttgccctgcgttagactcggtgctcgagggctaagcctggtcacagacatctccgcatttgtttctctgcaaatgggctccttgcccccagctccaccccacgtagagataggcacaaatagagttaagatgtgagttgagtgagcacacactcctcgtaagccacttgtcattcctaaactacgacatctcaggctgccagctgcactgggctccagtcagtgacaccttacaggcatggttctctcctgagctggatggatcagcacctatcttgtttgattcctctcacagggtctgggggtggtggcatctcccctaaaggaagtggtccctctgtggcaagtgatgaagtctccagctttgcctcagctctcccagacagaaagactgcgtccttttcgtcgttggaaccccaggatcaggaggatttggagcccgtgaagaagaaaatgagaggaggttagtgtctggttgtgtgtgtcctcagtcctctcgtgtgctcctggggcatgcgggggccgctgccatgctccgtgctgtggggcattgcttcctgcaggggcatgtggaccctgcctcaggttgatgcctgtaacacctccggcattttcattcagaaaacctgggcctgtttttttgcggtttgcataatccagatagaactgtgatttgctacaggctgttctcttggtctggaaatagtgcattctgaattgcagaattaatctcaaaatcctccttcctggccaggtgcagtagttcatatccgtaatcctaacactgggaggccaaggcaggagaatcacttgaggtcaggcgttcgagaccagcctgggcgacagagcaagactttatctctaaaaataaaaatcaagcctgacaccgtggctcccgcctataatctcagcactttgggaggccaaggtggacggatcatctgaggtcaggagttcaagaccagcctggccaacatggtgaaactccgtctctactaaaaatgcaaaaattagctgggtgtggtggtgcatgcctgtaatcccagctacttggaaggctgaggcaggagaattgcttgaacccggcaggtggaggttgcagtgagccaagactgtgccattgcactgcagccggggcaacaagaacaaaactccatctcaaaaaaaagaaaatcaaaaagaaagccctctgtcctggtaggacaataatttctaaaaatgtagcttaaatcttcacattgaagatgatttagggagaagtctgcactttgaaagccaaagttaagattattagaaaacatttgggaatgttatggtagaagcattgctgtatagcagtccagagagcagccagccactggggcactgtgacaggaaggttctaggaggggtccccagggaaagaaattaggttatctgacacgtggggttgatcggtgtggggaaggtgtggaaagagtcagcaacagttacacaggaaaaataagcacaggaatgaggaaattttaattctagcaaacatgaaaaattgtgtaagtcacacaacttaatctagtaaactacttggctcagcagtgaatacttgcataagcataataatacaaatacagtatcatgaactaatgtaatctgttaatgtaatgttggcaggggtgtctcaggacagagtttttctctaccttaatagatgtcaggaatgatgtctaaaattgataaatcaaatgtaccatgataacttagaaacacagaggtaaataccagaagaaacagctcaaagacatgaaaatagttttcctccgaggagggaaattgggtgaggagcggctgagacggagggtgactgcctttgttttcttctaaatatattatgtatacatttttttaagagacaggatcttgctttgtcacctaggccagagcgccgtggtgcagtcttggctcactgcagcctccacctcctgggctcagactgtcctcccacctcagccttccgagtagctgagaccacaggtgcacgctaccatagctggctaattttttttcccatttttttagagatggggtttcattatattgcccagactggtcttgaactcctgggctcaagcgatctgcccacctcagcctcccaaagtgctgggattacagttgtgagccattgcacctggcttcttctaaatacttggctttttaaattgtgtacagtttctttaattaaaaataaaaattaattgattaccaacatctgagcattatagaaaaataaaaacaccagaagagggtggggcgcggtagctcacacctgttaccctagtactttgggaggccgaggcgggtggatcacgaggtcaggagattgagaccatcctggctaacacggtgaaaccctgtctctactaaaaatacacaaaattagccgggcgtggtggtgggcacctgtagtcccagctactcaggaggctgaggaaggagaatggcatgaacccgggaggcggagcttgcagtgagccgagatcgcgccactgcactccagcctgggcgacagagcgagactctgtctcgaaaaaaaaaagactgcatgtatttccttctcggttacgacagttagaacacatccctttctcctgtggacggggaccttgacctgaacctgcgtgtatttccttcttggttacgacagaacacatccctttctcctgtagatggggaccttgacctgaacgggcagttgttggtcgcacaacc

SEQ ID NO: 15522 - DNA, 35235 bp, Homo sapiens
cagggtgagggagcttggcttcctgagaagccacccaggagccccggcttggggatgacttgaggccgcgtcttcggtgaggaaaagcttcccagaggaactctgccggggaatctctagagtcattgtccttttttaaaaatgtttttataggccgggcgcggtggctctcgcctgtaatcccagcactttgggaggccgaggcgggtagatcatgaggtcaggatatccagaccagcctggccaacaaggtgaaatccagtctctactaaaaatacaaaaattagccgggcgtggtgccgcgcgcctgtaatcccagctactcaggaggctgaggcaggggaattgcttgaacctgggtggccgaggttgcagtgagccgagatcgtgccattgcactccagcctgggcaacttgagcaagactccgtctctaaataaataaataaataaataacgttttttcgctttttttttttttttctctgagacagagtctgtttctgtcgcccaggctggaggtggtttcggctcactgcaaccgccgcctcccgggttcaagcgattctcctgcctcagcctccagggtagctgggattacaggctcccgccaccacgcccagctaatttttgtatttgtagtagagatggggtttcaccatcttggccaggctggtcttgaactcctgaccttgtgatccatccgcctcggcctcccaaagtgctgagattacaggcatgagccgctgtgccccgccatgcgccgcattttctttctttctttctttttttttttttttttttgagacggagtctcgctctgttgcccaggctggagtgcagtggcgcgatctcagctcattgcaacctccacctcccgggttcacgccattctcctgtctcagcctctccagtagctgggactgcaggcgcccgccaccacgcccggctaattttttgtatttttagtagagacgggggtttcaccgtgtcagccaggatggtctcgatctcctgacctcatgatccgcccgcctgggcctcccaaagtactgggattacaggcgccgcattttcttatccattcatctgttgatggacatttaggttgcttccaaatcttggctgttgtgaacagtgctgcagcaaacatggcagtgcagacatctcttagacatgctgattccctttccggtatctagccatcagggattgctggagcttgtggtagctcaatttttagttttctgaggtacctccaaacagttctcggtagtggttgtactaatttacattccttccaaccgtgtatgagggttcccttttctccacgtccaccagagacactttccttaaattcataagcagagattccctcatgttctggaatgttcccatgcgttattctttactttctctggaaagtaaagatctcggagtgagatctgttttaggcatttcccttcacagaggggttggcagcgggaaacagagagcacctggtgtttccttaatcaggattgttctgggaggaaatccatgcaagtccagagaagtgcgtggcccaggtgagacttgcagagaacagtgttcgtgcctacagcttggggagtctgggagaaggaaaatgagcactcctgtggatgtgctttattcatttcttcctgtcttattttccctacagggttaaagtagttgtaaagaagaaagttttgcaaagtacatgtattaaaactcaaaacattaggccaggtgcagtggctcatgcctgtaatcccagcattttgggaggctgaggtgggcagatcacacggtcattagatcgagaccatcctggctaacacggtgaaaccccgtccctactaaaaatacaaaaattagccgggcgtggtggcacgcgcctgtagtcccagctactcgggaggctgaggcaggagaattgcttaaacccagaaggcagaggttgcagtcagccgagattgcgccattgcactccagcctgggcaacagagcaagactctgtctcaaaataaaaaataataaaatagaataaaaatcattatttccacttaaaatagttcatagcggctgggcacagtggctcacaccagtaatcccagcactttgggaggccaaggcaggcagatcacctgaggtcaggagttcaagaccagcctggccaacatggtgaaaccctgtctctactaaaaatacaaaaaaaagcagctgggtatggtggtgcatgccagtagtcccagctactagggaggctgaggcaggagaatcgcttgaacccgggaggcagaggttgcagtgatcccagatcccgccactgcactccagcctgggcaatagaatgagactccatctcaaaaaaaaaaaaaaagttcatatcaaaaggaaaatataggctgctctgcctgtggagtagctattcttttgtttctttacatctctaataaacttgctttcacttacaaaaaaaaaaaaaaaaaaaaaaggaaaatcctagcactctgggaagctgaggcaggcagatcacctaaggtcaggagttcgagaccagaatacaaaaattagccgggtgtggtggtgcatgcctgtaatcccagctactcaggaggctgagacaggagagttgcttgaaactgggaagcggaagaggttgcagtgagccgagatcatgccactgcactccagcctgggcaacagagcaagactccatctcaaaaaaaaaaaaaaaagggctgggcacggtggctcatgcctgtaatcccagcagtttgggaggccaaggcaggcagatcacctgaggtcaggagttcgagcccagcctggccaacatggagaaaccctgtctctactaaaaatataaaattaactgggtgtggtggcacatgcctgtaatccgagctactggggatgctaaggcaggagaatcgcttgaaccagggaggtggaggttgtggtgagccgagattgcgccactgcactccagcctgggcaacagtagcgaaactctgtctcaaaaaaaaaaaaaaagaaaatgtaaaaggtaattttacttttctggttttaatagaagcaaattcctcagtaatctttttttttttttttttgagacagagtctctcgctctgtacccaggctggagtgcagtggccgatctcggctcactgcagcctgcgcctcccgggttcaagcaattctcctgcctcagcctcccgagtagctaggactacaggagtgcgctgccacatctggctaatttttgtattttttagtagagacaaggtttcatcaggtcgggcaggatggtcttgatctcctgaccttgtgatctgcccatcccagcctcccaaagtgctgggattacaggcatgagccaccgcacccagcccatcagtaatcttttaaaaatgtacttattagctcacttcattttcacttaagagaatttccatgtttgataattttttatgactcactgactatctcaaaaggttttctgtggccaggtgtggtggctcacgcctgtaatcccagcactttgggaggccgagactagcggatcacctgaggtcaggagttggagaccagccgggccaagatggcaaaaccccatctctactaaatatacaaaaattagttgggcctggtggtgggcacctgtaatctcaggtactcaggaggctgaggcgggggagaattgcttgaaccctggagacagaggttgcagtgagccgagattgtgccactgcactccatcctaggtgacagagtgagactctgtctcaaaaacaaataaataaataaataaatgggttttttttgtttgttttttgagacagggtctcactctgttgcccaggctggagtccagtggtgctatcatggctcattgcagcctccacctcccgggctcaagcaatcctcccaccttagcctcctacattagcctccctagtacaggtgtgcatcaccacatccggctaattttttgtatttttggtggagacggggtttcaccatgttggccaggctggtctcgaactcctgagctcaggcaatccacccaccttggcttcccaaagtgatgggatgacaggcttgagctcccagccagctgctagttttgagtggggcccagaacaagtgaaggctctgcaacagatgcaggctgttgtgcaaggtgctctaccacttggtcacatgacccagcagatccaatggtgcttgacatgtcagtggcagagagcgatgctgggtggagccttggcaggcccgcataggagaatcacaatgtagacttttaggattttggtgcaaagccctgacattgtctgcagataattactcttctttttttttttttttttttttttgacttcaacgttttataacaatagagagtagctgaaaatactacatgctaacacagacaatatgatacacaacctcgggggacaagttggcagggagcacgtggcagaggccacaggtttagactaagagccttttgatggactgctgaatggattggatctgctgtttcagctgtgagccttctttgatggtgacagaacaggtgatgacaggcctggagaccccacaggctcttcccagggcctgcttggagcgcacaaatatgaagggcacgttcttgtcttcacacagcagtggaggtgcggaatgatctcctgtggctcggtgtctgcagccatcacgatgaactcagagatgcccctgttaagggttttggtggcctcgttggctcttttctgaagctgcttgtagttacacgactactgaatgaactccagtggtttcttggtgaggtgggcatcggcgaggggctaggccttcagattcacattggcctcagtcatggctgtggttccgtgagctcggcactcctagggccgcgcagccgaggtctgagaagcgctctcttccacccgtactcttcttttgacaaccagcttttggcttgctacaggacggtattagggactgaataattaagcatggcccaccaaattactgcatgacctgagctgctcatcacgaactcagtgttatctgaccccccaagccataaagtgaggcatacagagtagtactccatcatcacgcaatgacagtgcaaaactcacagaataccttacccaccgttgtggtgttagagaaacctgtttaccaggcctctggtttcataaaacatgaccagagtgactctatcttaaggtaagtagctaggcactcacaagacacctgtaaggttgctatggtctgaaaatagccacattctaagctgaccaccaattataattgcagaaatatttatggtcatacgggacatctcccaccaagcctgcagaatgtccagatgtcctaagagtgcagcccactttactcagagagaaccttaatgagcaggcttaggttgaaggattaatggtcactgatagcaccaatagccctaccttcagtgagcacatctgcacattccaggtttaattgtagctccttaagagtttcctgtacagcattcctcttcctgctttctgaggatgccttactctgtaacagagtagattctgataaacttgcttctttcacggtgctcagtgactcacctcaaattctttcctgtgtaagatctaagagccctttcttggagcctggactggaactcctctttttcctgtaacaatgacatcgcttctgatcgaagaacccacttcacagtaaatgaggtgcaccgtgggcccatgctcatggaattcatgggtcttgctgtgttctccatcatcctaccgattttggttctgtttttctggtggaactgactgagagaaacatatagtgaaaggtaagtcttcattaccccttgactttaagtccgtgtttcagaggaagccaccgccatttccttgtgtatccttctagagagattttcattttcataaacatatttgtatgtacacattattaattaaaagagtcaagctctacaaaatttgaagaggtttattctgagccaaaagtgagtgatcacggcccacggcacagtcccaagaggtcctaagaccctgtgcccatggtggtggggctacagcttggttttatactttttttttttttaaagacagagtctcactctgtcacccaggctggagtgcagtgacgcaatctcggctcactgcaacctctgcctcccgggttcaagcaattctctgcctcagcctcctgagtagctgagattacaggcacctgccaacaagcccgactaatttttttttgtatttttagtagacaaggggtttcaccatcttggccaggttggtcttgaactcctgacctcgtgatctttcactcgcgtccgtgtgaagagaccaccaaacaggctttgtgtgagcaataaagctttttaatcacctgggtgcaggcgggctgagtctgaaaagagggtcagcaaaggggagatggggtggggccgttttataagatttaagtaggtaaaggaaaattacagtcaaagggggttgttctctggcgggcaggggtaggggtcacaaggtgctcagtgagggagctttttgagccaggatgagccaggagaaggaatttcacaaggtaattgtcatcagttaaggcaaggaccggccattttcacttcttttgtagtggaatgtcatcagttaaggcaggaacaggccattttcacttcttttgtgattcttcagttacttcaggtcatctgggcatatacatgcaggtcacaggggatgtgatggcttagcttgggcccagaggcctgacattcctgccttcttatattaataagaaaaataacataaaatagtgttgaagtgttggggcagcgaaaaaaatttttttggggggctggcatggagagataatgggcgatgtttctcagggctgcttccagcgggattaggggtggcgtgggaacctagaatgggagaggtcaagttgaaggaggattttgtggtaaggggtgatattgtgggattgttagaaggagcatttgtcatatagaatgattggtgatggcctggatacggttttggatgaattgagaaactaaacggaagatacaatgtctgaataaaagaaggagaaaaatgggtattaaaggactaagaattgggaggacctaggacatccaattagagagtgcccaagggagttcagcgtaattacttgcttggttggcaagtttttgggccctatccttgagtttttttatgttgtcatacaccaggccagattaatttaggtaaaaacaacactcttcatttaaaaatatacagagtcctcctttttcagcattgagtaagtcaaggcctcagcgattttggaggacagctaaagagtcaacttgggcctggaggactgataaagtttgtgatatgtctgtgatgctagcagagaagtcattagagaggctacagaaggttgtgacagaggttgaaatgcctgctatcccagtactgagagcaatagtagaggcagaaagtcttaaaccgacaagcaagggaattagtggaataactcttttttgtcatgttggtgtcatgaggggaacaaggagctttttgctcctattggcaaattgaattttgggagtaaggaaaactaatgtgcatgtgcctgtccaattagcaggtagacacatgtaggtagaggatccacagaggaagaagggaccttgtgccaggcaaaattggagatgcaaagtaaaaagatgagaaggagtgctgaaaggggtgtcttgtacctacactcctagggatccagctagggcagcagccatcagaggttgtaatggggactggtggggtgactgcatagagggggacgttcgattttcatggtgtatgagaaaacgtctagtgtctatgagcaacctttcatgatggggtaactgcatagaggggaggatcgattttcatggtgtgtgagaaaacattgagtgtctacgagcaacctttcatgatggggtaactgcatagaggggaggatcgattttcatggtgtgtgagaaaacgttgagtgtctacgagcaacctttcatgatggggtaactgcgtagagggggaggttagactttcatggtgtatgagaaaacgtcgagtgtctacgagcaacctttcatgatggggtaactgcgtagagagggaggttcgattttcatggtgtatgaggaaacgctgagtgtctacaagcaacctttcatgatggggtaactgcgtagagggggaggttccattttcatggtgtgtgagaaaatgtcgagtgtctacgagcaacctttcatgatggggtaactgcgtagaggagaggatcgattttcatggtgtgtgagaaaacgtcaagtgtctacgagcaacctttcatgatggggtaactgcatagagggggaggttagactttcatgatgtatgagaaaatgtcgagtgtctatgagcaacctttcatgatgaggtaactgcgtagagagggaggttcgattttcatggtgtgcgagaaaacgtcgagtgtctacgagcaacctttcatgatgaggtaactgcgtcgaggggagggtcgattttcatggtgtgtgagaaaacgtcaagtgtctacgagcaacctttcatgatggggtaactgcatagagggggaggttagactttcatggtgtatgagaaaatgttgagtgtctatgggcaacctttcatgatggggtaactgcgtagagagggaggttcgattttcatggtgtatgaggaaatgctgagtgtctacgagcaacctttcatgatggggtaactgcgtagaggaggaggtttgattttcatggtgtatgaggaaacgctgagtgtctacaagcaacttttcatgatggggtaactgcgtagagggggaggttcgattttcatggtgtgcgagaaagcgttgcgtgtctacgagcaacctttcatgatgaggtaactgcgtagaggggagggtcgattttcatggtgtgtgagaagacatcaagtgtctacgagcaacctttcatgatggggtaactgcatagagggggaggttagactttcatggtatatgagaaaatgtcgagtgtctatgggcaacctttcatgatggggtaactgcgtagagagggaggttcgattttcatggtgtatgaggaaacgctgagtgtctacgagcaacctttcatgatggggtaactgcgtagagggggaggttcgattttcatggtgtgcgagaaaacgtcgcgtttctacgagcaacctttcatcatgaggtaactgcgtagaggggagggtcgattttcatggtgtgtgagcaaatgtcaagtgtctacgagcaacctttcatgatggggtaactgcatagagggggaggttagactttcatggtgtatgagaaaatgtcgagtgtctatgagcaacctttcatgatggggtaactgcgtagagggggaggttcgattttcatggtgtatgaggaaacgctgagtgtctacgagcaacctttcatgatggggtaactgcgtagagggggaggttcgattttcatggtgtatgaggaaacgctgagtgtctacgagcaacctttcatgatggggtaactgcgtagagggggaggttcgattttcatggtgtgcgagaaaacgtcgcgtttctacgagcaacctttcatcatgaggtaactgcgtagaggggagggtcgattttcatggtgtgtgagcaaatgtcaagtgtctacgagcaacctttcatgatggggtaactgcatagagggggaggttcgattttcatggtgtatgagaaaacgtcaagtatctacgagcaacctttcactattatttatgggtctgggtataagtaaacaagaagagggcctgggaggagagcctgatgagcaaggggaaggtagccaaggatggagtgaaatgcagggtaagtgtcttcttaagcaataattactactaatatttttaagtttgtcagtattgatagagggcttatctgtaatatggagctggaaggcttcaattgtttcagtgatgtgtgtagttgggctttggagatgaagaataaaggaacatcgagaaggtgaaaggttacctaggggaattccagtgggtctttgctgagagatacataaaggagcggccttgagcagagtttttattaaagaggcattaatgatggaggaactttgcgtagtgaggaaacctctttcagcctatataacagcatggtggtgcagaatatggaaggcatatttagagtcagtataaatattgacatgtagtccttttgcaagagtgagggcgccgggtgtggtggctcacacctgtaatcccagcactttgggaggctgagacgggcagatcacctgagtttgggagttcaagaccagcctgaccaacatggagaaaccctgtctctactacaaatacaaaattagccgggcgtggtggtgcatgcctgtcatcccagctacttgggaggctgaggcaaaagaattgcttgaacccaggaggcagaggttgcagtgagccgagattgcgccattgcactccagcctgggcaataagagcgaaactccatctcaaaaaaaaaaaaaaaaaaaaaaaaaaaagagtgagggactgagttaaggcaactagttcagcttcctgagaggtagtggagggaggcagagtggtagcctcaatgatagatgtggaagatactatagcatagcctgcctttgctagtgagtggcaattaggcctggtggaactgccatcaataaaccaaatgtgatcagggtgaggaacaggaaagaaggaaatatggggtgaatgtcaggtggatcagagagatacagtcatgagggtcaggtgtggtatccggaataatgtgggaggccgaattgaagtctgggccaggagcaatggtaattgtgggagactaaaggaagagtgagtatagctgaaggagccagggagcagaaattatatgtatcaggtgtgaggaagaaaatagattttggaagttatgagagctgcagagagtgagtggagcatagtttgtgatttttgagggcctctgaaagtattagggcggcagcagccactgcatggagacatgatggccagcctaaaacagtaaagtcaagttgtttggccaaaaggctacaggatgcaatcctggtccttgtgtaacaattctgactgcacagctctgcacttcggctgtgtgtaatgaaaagggttgggatgaatcagggagagctagtgggggcagtctctaaaactgtctttaaggaaaggaaagaggagtggggaaaggatttaggatctatggggtcagctaggtttccttttgtgagtttatatgatggttttgttaggatggcaaaaccatgtatccaaagttgaacgtatctaaccatgcctaggaaggaaaggagttgttttgtagacggtgttggggtttgagatatcagttggacatgatcagcagggagagcacgtgtgtctttatgaagaattatcatgaggtaggtaacagatgaagaaatttgagctttggagggggatacctgatatcctttggagaataaatgttgaaggagcaggagggtgtcttgttgagaatattcaaaggaggggctacaaagaagaaggtcatcaacatattgaataaggtgagaagcggaggggtggaaagaaagtaaatcatgagaaagagcttggctgaagtaatgagggctgtccccgaaaccttgcggcagcacagcccaggtaagctgctgggaccgatgggtgtcagggtcagtccaggtaaaagcaaagagaggctgggacgaggggtgcagcggaatagtgaaaaaagcatctttaagatcaagaacggaatagtgagttgtggaggaaggtattgaggacaaaagagtgtacggtggggcaccacgtggtgactaggcaaaacaatttggttgataaggcgcagatcctgaactaacctgtaagacttgtctggtttttggacggtaaaatgggggaattgtaaggagagtttataggttttagaagcccatgctgtagcaggcgagtggtaacaggctttaatccttttaaagcatgccacgggatgggatattggcattgagcggggtaaggttgattaggttttaaggggatagtaatgggcatgtgatcggttgccagggagggagtagaggtgtcctatatttgtgggttaaggtggggggatacgagaggaagacgcaaagcaggccttgggttgggaagaagggcggcaatgagatatggctgtagtccaggaatagtcagggaagcagataatttggttaaaatgtctcggcctaataagggaactgggcaagtggggataactaaaaaagagtgcataaaagaatgttgtccaagttggcaccagagtgggggagttttgaggggttttgaagcttggccgtcaacacccacaacagttataggggcaagggaaacaggcccttgaaaagaaggtaacgtggagtgggtagcccccgtatcgattaaacaggggatggacttacccgccactgtgagagttacccgaagctcagcatccatgatggtccagggggcttccagggtgatcaggcagcgtcagtcttcagccgctaagccaagcagatcttggaaggagtcagtcagagagtcttgggctagagctttaggggctctaggggtggctgccaggcgagctgggcagtctgatttccagtgggtccctgcacagatgggacacggcttgggaggaatcccaggctatgggcattccttggctcagtggccagatttctggcacttgaagcaagatcctgatggaggaagtcttgtaagaatgcttgactgctgtggcttaggtgtgtgcggcttaggcattttgaatttcttgtgtgctggaggtgtggctgggttttgtcttacagcagaggcaagtaattgtaactcagaaatgcgttgccgtctggctgcctcctctctattattgtacaccttgaaggcaaggttgattcattcctattgtggggtttgagggccagattctaatttttgaagttttttcctaatgtcaggagtggattggatgataaaatgcatattaagaataaggcggccttctggcccttctgggtctagggcggtaaagtgtctgagtgttgctgctaagcaggccatgaactgggcttggttttcgtctttaccttgggtagtttctttaagcttgtcataattaacaggtttgtaagctgcctttttaagcccttcaactaggcaggaaatcatgtaatcttgcctagctgtacctggggaatctgcctgatagttccattggggatcctctcggggaactgctctgatgccttcctggaggtatggctcgtgaagccggtggttatcagcgtgagattgggctagagaaaaaactctttcccgttcatctggggagagggtagaagtcaggatgacatttaggtcactccaggttaacttgtaggacaaagttagatatcggaattcctgtatatgtttagtggggtctgatgagaaagagcctaaatgttgactgatctgagagaggtctgatagagaaaaaggcacatgtaccctgactatgccttcagctccagccacctctctaagaggaaattgttgggcaggtggggaagagctagtcaaggaactaaactgtaagccggaccgggtgtgaggaggggaggtgacagaaagattatagggtggaggagcggaggctgaggaagaattgggacttagcttggcctggcgacgagcagcctggggaggaggggagaggtcagatgggtctgtagaaaaggaagactggaaagactcagcgacgcttggggttgggactgagggaacaggcaggagggagagaaggaggatttgggaggaatcgcattgggaacagagactagggagggaacgaagtgtgaaaaatgcctggatgtaaagcacctcagatcatttgcctattttttgacaaaaattatttaggtcttgtagaatggagaagttgaaagtgccgttttctggctatttagagccattgtcaagtttgtattggggccaagcggtgttgcagaagaaaacaaggcgtttaggttttaggtcaggtgtgagttgaagaggttttaagtttttgagaacacaggctaatggagaagagggaggaatggagggtggaagtttgcccatagtgaaggaggcaagcccagagaaaagagagggtagagacatggagagaagggggtggggggtgcttgccacccaggaaagtgaagaaggggtagagacacggagagaaggggttggggggttcttgccccccaaaaaagcattacttgccactaagggtgaaggaccaaggcaggcgtccctgcatggtcagacacctctgaaacgtgggtgaataatcaggcaggcgtccctgcgcgattaaacaccaagggaagactgtcttcccgagtccatgaccggcgccggaattttgggttcatggataaaacgcgtctcctttgtctctaccagaaaaggaaaggaactgaaattaagagtagggagagattaaagtgtggcaccaagattgaaaggagaaagaggttgaaggatagtgagagaggtgggagaagagagtgaaaagaggccattacccgatttaaaattggtgagatgttccttgggctggttggtctgaggacctgaggtcgtaggtggatctttctcacggagcaaagagtaggacaggggattgatctcccaagggaggtctcccgatccgagtcacggcaccaaatttcactcgcgtccatgtgaagagacgatcaaacaggctttgtgtgagcaataaagttttttactcacctgggtgtaggcgggctgagtccgaaaagagagtcagcaaagggcagataggggtagtggggccgttttataagatttaagtaggtaaacgaaaattacagtcaaaggggggttgttctctggtgggcaggggtgggggtcacaaggtgctcaatgagggagctttttgagccaggatgagccaggagaaggaatttcacaaggtaatgtcatcagttaaggcaaggaccggccattttcacttcttttgtagtggaatgtcatcagctaaggcaggaacaggccattttcacttcttttgtgattcttcagttacttcaggccatctaggcatatatatacatgcaggtcacaggggatgcgatggcttagcttaggttcagaggcctgacatgatccacctgcctcagcctcccaaactgctgggattacagacgtgagccactgcgcccagccggttttacaccttttagggagaaagttcatagatggattcaaagattttctgattggcacttggttgaaagagttgttattatctaaagacctggaatcaatagaaaggattgtctgggttaagctaagggagacaaagtttctattttgttattttttttttgacagggtctctgttgcccaggctggattgcagtggcacagactgtggtttaccgcagccttgtcctcccgggctcaaggaatctgcccacctcagcctcctgaatagctgggactataggcatgtgctgtcatcatgtccagctaagacggggtctccccatgttgcccaggatggtctgaattcctgggctcaagcgatccacccacctcggcctcccaaagtgctaggattacaggcttgagcaccaccactctggccattctaatgcagatgccgctccaggcagcaggcttcagagagaatagatggtaaacttttcttatcagagttaaaaaggtgccagagtcttacattctctcctggatcaggaaaagatgtggaaaaggaaggagattctctacaaagtagatttcccccaggagacagttttgcagggctacgtaaaactatgttaaataaatacatgtcagggtaaaatacttcgttttcttccagggcctgctatttgtcatgtgatgtatcttaatgctacagaccgtttggtcagccttaagttgtctgttttaacgtcgacgctggtcagttatacctgaattccaaagggaggacagtataatgggacatatccaaaccctgcttcccatcagggactgaactggtttttcagattaactttggcgttgagagactcagttcattcagttggttggggaggcttacaattttatttttggtttacaaggtatagataactatgcctatacctatatatacaaatgtttatatatgtatatatgtgtgtatatatggtttgttttacacaaatggatgcctactttatttattttggtagcgatgaggtctcaggctaatctcgaactcctgggctcgagatcctcctgcctaggccttccaaagcacttagattacaggcgtaagtcactgcgcccggtcctgcttcaccctcttaaaaccgcccttgggggctcctcatgagtgcagacattggcgcgttcctccaaaccgcacagactccccctgcgtggacgcgtctcgccgtctttactcctctttcgccgacctttcactttcagggaataccctctggcgcccttctctggagcacacacgtgaacgccgccggattccaagaagtgagatactgaggcaaaagttacgcgcgttcagaacaggaagaccccgcaaaacgccggccaagacgtggccccgcgtccaccctgcccacaagcagccgctcccactcgcggaccgcgccctgtgcctcagacttcggatctgtgtgatccactgtgtgcaactgtacccgaaagggtccccacgtgcactacctcgtgacaactaagatggaccgtcttctactcctaggagtcatccccagattagcggggctctcagaatccttggggcttccaatccggaagttccccgtcccttctgccccaacataacatggcgccgaccgcagccacttccgtgatccgcaggcgacgaagtcgcctggtcaggatcaaagatggccgagcgccctccacgcgcctactctcgcgggccactcccggctccgctttagctgccgctcttggtgagcgccgccgccagccaatcgcggggcgcagaggcctctggccccgccccgcggatcagctgagggagccgcaatgtctcttgacagcggcggcggcgcagccggttccgggttcggcgcggggcgggggtaagcgcggctggcgagggggctgcggcgggcggcgaagggggacctggttgcggccgtgggagggggcgcccgccggcgtccaggccgggctgcggggctgcgtgggcgcgggcggccgggccggggcccgcggggtggggcgggcgccgagtctcggcctctggggtcgggagtctccatgggcgtttccggggtctccgcagatgtgaatcccgatggagcggcccgaggaaggcaagcagtcgccgccgccgcagccctggggacggctcctgcgtctgggcgcggaggagggcgagccgcacgtcctcctgaggaagcgggagtggaccatcgggcggagacgaggtgcggggctgaggccggggccgggggccggggccgggcagagccaccgggttgcgggcaggccacacgggcggcggtgcagtgtgcgctccagatttttccgtggagtgaaatgtcatgtaagaactggtatttattcggtgttctgcccaccgattcttgcgcatgattcacgcacatcatttagccttcgttacaactgtataagttagttgtgttcatatactctccagaatgcaatattgtcacgttcgttgccgtacagagtatcttttctgactgtaatggaacgaaattaaaaataatagaaggaaaagtggaaaattcacagatatgtggacatgaaacaccacactcttaaagcaaccggtgggtcaaataagtctttacaacggggaccttgttttgagacaaatgaaacaaaaatagaatacaccaaaaggtatttaggatgcagccaaggcagtactcagagggaaatttatagctgtagtgcttatattaaaaaagatctcaagtcccagcccctagaatatttatttatttaataaacctggaaagctaaaaacttgaacaaagtcatacaacgggtgagagaaagttccctcagcctccacattcactgcctccagtctcccaagtgaccatctggttgtttgatttcctctgaagcctttgtatggggagagaaatgcgctggtcctgtcaacaaaaatgtttagtttgtctgaaaattaatgaattagctccgacattatactctaaaaaggagcgaggatgggaaatatttgctgtttggaagcaattttttttttttttttggttaatttcaccccttataatgtgcttgcacctggttttttttgtttttttgtttgtttttttgagataagagtcttgctctgtggcccagactggggtgcagtggtgtgatctcagctcactgcaccctctgcctcccggttcaagtgattctcccgcctcagcctcggagtagctgggactacaggcgtgcgccaccatgcctggctaatttttgtatttttagtagagatgagctttcgccatattgcccaggctggtcttgaacaactgaactaaagtgattcacctgcttcggcctccgaaagtgctgggattacaggtgtgaaccactgtgtctgacctggttttgttttttggggtgttttggtagtcttacattccagtatcaagtcaaagtttattttacaactttgaaagtatttagatatcatcataacatatcaaaattatccctttaagacaagaggaagtatttgaagatttttccctttgtctttacttgatagactaggaggtttggtgaagagcagaggccctagagacaaattatgtgggtttccaatctgtcaacacattactctgggctaacgacatctttctgcgcctatgtacctacttcatagatttgctctgaggagttaatgagatcatacacggactgcttagaaggaactttagcgttagcacttagcattagccattgttattgtaacatgttatacatgttattacatggtaggacattacatgttaagacaaggagagaaaatatgtcgttgagtttatcttttaataggaacgattttagtgaatttataaataatgttgccagcaaaaactttaagattattgtattagtttgttcatactaccatagcaaaatactacattctgggtggcttaagcaacagaaatttatttatttatttatttatttatttatttatttatatattttttgagacagagtctcactctatcacccaggctggagtgcagtggcgcgatctcggcccactgcaagctccacctcccgggttcttgccattcttctgcctcagcctcccgagtagctgggactacaggcgcccaccaccacgcctggcagtggtattttgtatttttagtagagacggggtttcaccatgttagccaggatggtctcaatctcctgacctcgtgatctgcctgcctcagcctcccaaagtgctgggattacaggcgtgagctatcgcgcccggccagaaatttattttttattttattttatttttttaatttttgagatagagtcctgctctgtcacccaggctggagtgcagtggcatgatctcggctcactgcaacttccctcttccaggttcaagcgattctcctgcctcagcctcccgagtagctgggactacaggcacgtaccaccacacctggcttatttttttctattttagtagagatggggtttcactgtgttgcccaggctggtctcgaactcctgagctccagcaatctgtctgcctcggcctctcaaagtgctaggattacaggtgtgagccactgtgcctggccagaaatttattttcatggttcaggaggctgggaagtccaagatcaaggtgttggcagattgggttcctggtgagggctctcttggcttgcaggtggccactttcttgctgtgtcctcacatggcagagagggggactctgcttgctctctctgcctcctcttaagagggcaccagccctgtgacatctgattcccacctagtgacctcatttaacatttatcagctcacaggccccatttccaaatacagtcacattggggattaggacttaaatatatgaattttaggggggtacagacactcagttacaaacattcagttcctaacagttgtagaacttgattattttatttatttattttatatatatatatgtatttttttttttgagacggagttttgctcttattgcccaggctgtagtgcagtggtgccttcttggctcaacctccaacctcccgggttcaagcaattctcctgcctcagcctcccgagtagctgggattacaagtatgtgctaccacgctcagctactttttgtatttttagtagagacggggtttctccatgttcgtcaggctggtcttgaactcctgacctcaggtgatccacccgcctcggcttcccaaagtgctgggattacaggcgtgagccactgtgcccggcctgatatatttattttttgagacggagtcttactctgtcacccaggctggagtgcagtggtgcgatcttcactcactacaacctgcatcttccaggttaaagtgattctcctgcctgagcctccagactagctgagatttcaggcgtgtgccaccacacctggctagttttttggtatttttagtagagatgaggttttaccatgttggtcaggctggtcttgaactcctggcctcaaatcaaatgatccacctgccttggcctcccaaagcgttgggattacagccatgagccacctcgcccagacagaacttgattattttaaagcaatgatgtgcctgccatttataaggcattatttgggggaaaagggaaagcctaggtaacgtgtaggaaggggtgcaacaaccttgttttcccaaagagctctttatccagtctggagtgcagtggcacgatctcggctcactgcaagctctgcctcttgggttcacaccattctcctgcctcaacctcccaagtagctgggactacaggcacccgccaccatgcccggctaattttttttgtatttttagtagagacagggtttcaccatgttagccaggatggtcttgatctcctgacctcatgatccacccgcctcggcctcccaaagtgctgggattagaggcgtgagccactgcgcccagtctttttttttttttttttgagacggagtttcactcctatttctcaggctggagtgcaatgatgtgatctcggctcactgcaacctccgcctcccaggttcaagtgattctccttcctcagcatccagagtagctgggattacaggcactcaccaccatgcttggctaatttttgtattttgtagagacagggtttcatcatgttggctaggctagtctctaagtcctgacctcaggtgatcctcccgcctcggcctcccaatgtgctgggattacaggtgtgatccaccgcgcccagccaagagctctttattctaagagagtggcagaaatgtacatcaactgcttgaaagatttaacccaccaagcgtcaagcgcagcaaatgctgtgaatagaactttagcacaaagcatctcggttccagattagaatgctgatattcaggccaggcacggtggctcatgcctgtaatcccagcagtttgggaggccaaaacaggaggatctcttgaccctatgagtttgagaccagctagggcaacatagaccctgtatctacaaaaacttaaaaaattagctgagcgtggtggtgcatattggtagtctcagctactcaggaggctgaagtgggaggatcacatgagcctgggagttcaaggctgcagtgagctgtgattgctccactgcaccacagctggggtaacagcgcaaggccttgtctcaaagaaaaaaaaaaaaacctgatgttctggcatggagacgcctctgttacaaactggctctggcgacaccgtgacttgcactggttttggggcttgaaggagactgtcctggcagttaacgctcaatggaatgggaagagcttgaccacaggtgatacttgccttggatacagtacttccaatagtacagaatgtttgcacaaataagatttttaatatccggtttcatggcagtatcatttacttgtagtaaaattcaccttttttggggttcagttccatgagttttgggaaatgtactcaccagtgcagtcaagatgtagaacatgttcgtcaccctgaaaggtccccctgagtcccggctcctggcagccactgatctggtttctttgccttctgctgcttccagcgtgtcgtgacacagggtcacagggtgtctgccatcatcttctgcgcctggcttctttccctggcacgcaccttgttgcatggatgagcagtttgctcctttctgttaccgggtagtgttctgtggtttggatgcaccatggcttgttagtttacaaccagtggatggacatttatactgcttcctgtttttgtaagaaataaagctaatataaacataagtgtgcagtctttgtagggacatacatttttctcttagctaagtaactatgaatggaattgctgggccacgtggccagtgtctgtttaacttgctgagaaactgccgcattgtttcccatgtgcttgtccattttgcagtcccacagcacagtacgagagttccaggttttccacttcccttttggccacttgtaggtggtcagtctttttttttttttttttttttgagacagcgtcttgccctgtcgccaggctggatttgcagtggcgcaatctcagctcactgcaacctccgcctcccgggttcaagccattctcttgcctcagcctcctgagtagctgggactacaggcacgtgccaccatgcccggctaatttttttgtatctttagtagagacggggtttcaccatgttggccaggatggtctcaatctcttgaccatgtgatccgcccgcctcggcctcccaaagtgctgggattacaggcgtgagccaccgtgcccggcccgtggtcagtattttcagccaattcttatttggtgtgtagtggtatttcatggttttaatttgcatttctctgaagattaatgatgttgagcattttgtcatgtgcttaatttgccatccatatctcttctttgataaagtgtttaaattgttttaagttgcattatttactttctatttattgagttatcagagttctctatacattctggatacaagatctttgtcagatatgtgttttacaaatatttccaccagtccatagcttgtcttttcatctttttaaacaatatctttgaagaacagatttttacttttttttttttttgagatggagtctcgctctgttgccaggctggagtgcagtggcacgatctcagctcactgcaacctccacctcccatgttctcccacctcagcctctcaagtagctgggattacaggtgcatgctaccatgcccggctaattttttgtatttttagtcgagatggggtctcatcctgttggccaggctggtctcgaagtcctggtctgaagtgatccgcccgccttggccacccaaagtgatgggattataggcgtgaaccaccgcccccagccttactttttttgttgttgttgagccagagtctcgctctgtcgcccaggctggagtgcagtggcgtgatctcggctcactgtaacctccgcttcctgggttcccaccattctcctgccttagcctcccgtgtagctgggattataggcgcccgccaccatgcctggctaagttttgtatttttagtagagactgggtttcaccatgttggtcaggctggtcttgaactcctgaccttgtgatccgcccgcctcggcctcccaacgtgctgagattacaggtgtgagccaccacgcctggcccagaattgactttttttttctttttttgagtcggagtcttgctctgttgcccaggctggagtgcagtggcaccatcttggctcactgcaagctccacctcctgggttcacgccattcttctgcctcagcctcctgagtagctgggactacaggcgcccgccatcacgcccagctaattttttgtagttttggtagagacgtggtttcaccatgttagccaggatggtctcgatctcctgaccttgtgatccgccccccccttggcctcccaaagtgctgggattacaggtgtgagccacggcacctggcccacattttacttttgacaaacctcagcttattattattattttttcctggtttgtgctttttatatcctatctgcgaagtccatgcaagacccaacggcactaagatttttgcctgtcttttccactggaagtttcatagttttagattttacatttgtctctgtctggccatccttacacagccacaatactgtattgtttactatagcatgatggtaagtcagttaagtaatatgagtcttccagcttcattctttttcaaaattgctttggtttttctacacgttttttctgtgaactttagaatcagcttgtcagtgtctacaagccctctgggattttgactggaattgcattgaatgtatgaaacaatctggaggacagctgacattttaacaatactgagtcttctgattcacacacccataggtcagtgatgggagcaaggctcaggctaaagcagattcagggtgtctttctgtgtggaacgtttaggaaaagtatgtttgcatgccactgtctcctgaccaaacccttcgcttttttgtcttctagtatctttatgtatccttatagattattataggcagtaatgattaatgatgagatattaaaacgcctttgttcttttgatttaaggagagggcaagtattgaggattttccctcttgcttttgtattcagggccgggcgctggtggctcacgcctgtaatcccagcactttgagaagccgaggcgggcatatcacgaggtcaagagatcgagaccatcctggccaacattgtgaaacctcatctctactaaaaatacaaaaattaactggccctggtggtgtgcgcctgtaatcccagctactcaggaggctgaggcaggagaatcgcttgaacccgggaggcagaggttgcagtgagctgagatcgtgccactgcactccagcctgggccacagaaagagactccgtctcaaaaaaaaaaaaagaaaaaaaaaatcccaaagtgtcagaattactgtattcagctatagatgcatccctgtatataagatgcagtttcttatacgtgtacaaatgcctatcgcaggccaggtgcggtggctcaagcctgtaatcccaacactttgggaggctgaggcgggtggatcaagaggtcaggagttcaagaccagcatggtgaaaccccgtctctactaaaaatacaaaaaattagctgggtatggtggcgcatgcctgtagtcccagctgctcaggaggctgaggcaggagaatggcttgaacctgggaggtggaggttgtggtgagccgagatggtgccactgcactccagcctgggcgacagtgcgagactccatctcaaaaaaaaaaaaacaaacaaaaacaaaaaaaaaaacaaatgcctatcacagttggctcagtcactttttctgtgactgtcattgcttcaattttatgttgatttatgaaacctaagtttacacagaaaagaaattaaggactaaattaagatactgaagaattacttaagcccctgagtttttttttttctttttttttttttgagacagagtcttgctctgtcacccaggctggagtgcagtggcgccatatcggctcactgcaagctcctcctcccgggttctcgccattctcctgcctcatcctcctgagtagctgggattacaaggcgcccgccaccacgcccggctaattttttgtatttttagtagagatggggtttcactgtgttagccaggatggtctcgatctcctgaccttgtgatctgcccgcctcggtgtgagccaccggacctagccaaccccctgagtttttttaaagttctaataatactcatcaggttagctgtgtatgcaagcatattgtaaaattgcttttttttttttttatttccagttggagtctagctctgtcgccaaggctggagtgcagtggcgcgatctcagctcactgcaacctctgcctcctgggttcatgcgattctcctgcctcagcctcccaagtagctgggattataggcaaccgccaccatgcccagctaatttttgtatttttagtagatatggggtttcactgtgttggccaggctggtctcgaactcctgacctcgtgatccattcacctcagcttctcaaagtgctgggtttacaagtatgagccactgcgcctggctgtaaaattgccatttaagaggctgtgtgtaactggaggtattgatgggtgtctttgagagggtggggattcagaaaggttcaggatgggccgggcgcggtggctcacgcctgtaatctcagcactttgggaggccaaggtgggcagatcatgaggtcaaaagatcgagaccatcctggctaacatggtgaaaccccgtctctactaaaaacacaaaaaattagccaggcgtgatggcgggcgcctgcagtcccagctactctggaggctgaggcaggagaatggtgtgaacctgggaggcggagcttgcagtgagccgagatggtgccactgcactccagcctgggcgacagagcgagactccgtctcaagaaaaaaaaaaaaatttctttatgtctttcttggtcaagtgtttttttttacatatgtacaatggggatcctgagttggaaccacatactttggtaaacaaagtgcagtagtgttcacagttaccacgatcatatcccgtgttgacccaccctctcttttttaggttgcgacctttccttccccagcaataaactggtctctggagatcactgtagaattgtagtggatgaaaaatcaggtcaggtgacactggaagataccaggtgagtatgttctgagcttcttttggtgtttcttcttgtagcttaagaagcctgacttcgtgctctgtgctgtgtgccacggctgaggaggagaagaaatgctgtctttagtgtgataacagcggctcatttttataacagcacagtcatgtgtcccttagcaacagggatccagtctgagaaatgtgtcagacaatttgatcatcttgcaaacatcatggagtatacttaaacaaacctagatggtgtagcctactacatacctaggctatatggtatagccgattgctcctaggctatcaacctatacagcgtgctactgtactgaatgctataggcagttgtaacacaatggtaagagtatttatctaaacacagaacaggtgcagtaaaaatatgatattttaatcttgtgggactcctatcgtatatgcgtctgttgaaaaaaacattattatcagcccgggcgcggtggctcacacctgtaatcccagcactttgggaggctgaggcagttggatcacctgaggtcaggagctcaagcccagcctggccaacatggagaaaccctgtctctcttaaaaatataaaaattagccgggcgttgtggcatgcgcctgtaatcccagctactcgggaggctgagacaggagaatcacttgaacccgggagtcggagattgtggtgagctgagatggcaccactgcactccagcctgggaaacgagtgaaactccatctcaaaacaaaacgaaacaaaagtttattatctggggcatgactgtagttaattaggctcccaaggtattagaagatgtatttcctggtttccaggatgggacacttagtgacactttggtgtctatgacccttcttgaatgtattcaaattaagtatgtctcagaaataagacttaaaagatgctggtaatttttggttcttgcaagcctattcaagtttgatttctttccctcaaatcaaaaaatcattttttaaaactaataaattctcgttcttgtacaactgaagtacagattgagtatctgaaatgattgaaactagactgtttagattttggattgtttcagattttagaatattttcattatacttaccagttgagcatgtctgaatcaaaattctgaaatgttccagtgagtatttttttgagtgtcttgttggtgctcaaaaagttttggatttcacatttctgattagggacattcagcttagggatattcaacttggaaagtggaaagctttccaaaatcctattcatacgttaaaaatgcatatgttggtatatatattttgcataaatgcaatcacactacacatactgttgtagcgtcagcttttttctttctttcttttttttttttgagatggagtttcactgtgttgcaggctgaagtgcagtggtacgatctcggctcactgcgacctccgactcccaggttccagccattctcctgccccagcctcccgagtagctggcattgtaggcacacactaccaagcccggctatttttttgtgtttttagtagagacgggatttcaccatgctggccaggctggtctcgaactcctgatctcaggtgatctgcctgcctcagcctcccaaagtgctgggattacaggcgtgagccatcgcgcccggccagcttttttcacttacggtgttttatggagcgcttcacatgtcactgcatctacatccagctcatcttttcattatcttaggatagtttctttgtcacttcccttattggtggacatttattgttttgactttttcttactataaataacactgcagtgactctttcccaaactctgccttcatgtctgttttcttgggatgatttctcggaagggaagtctgtgtcagtgttactcagaatgtgcctattcctttttttctcttttttgagacggagtctcgctctgtggctcaggctgaagtgctgttggtgcgatctcggctcactgcaacctccgccacccgggttcaagcgattctcctgcctcagcctcccgagtagctgggattacaggtgcccgccgccacgcctagctcagatggggtttcacaatgctagccaggctggacttgaactcctggcctcaggtgatccacctgcctcagcctccccaagtgctgggattgcaagtgtgagcccccacacccggccagaatgtgcgtcttttaaatctgctgcaagtggcaggtggtcttctagcagtatgttgagagtgtgctgttctcactgcaggattttttttgtttggtaaagatcaggctctgtgagattctttggtaactgatagtttcagggatagaagactaggaagtaggttttaataggaagaactgatgctccgtttcctagtctaatagatatcagattaagttctctatttcttggcacaatgggaaaggcagggtgctggtccctagctgtcccgcctgcttcagggcctggcttccccatgctgggtgctggtcctgggctttcctgcctacatcagggcctggcttctccacgctgggtgctggtcctgggctttcccgcctacatcagggcctggcttccccgtgctgggtgctggtcctgggctttcccgcctacatcagggcctggcttccccgcgctgggtgctggtcctgggcagtcccgcctgttccagggcctgggttccctgcactgggtgctggtcctgggcagtcccgcctgttccagggcctggcttccccacgctgggtgctggtcctgggtagtcccgcctgttccagggcctggcttccccgcgctgggtgctggtcccgggccttcctgcctgttccggggcctggcttcctcgcgctgggtgctggtcccgggcagtcccgcctgttccggggcctggcttccccgcgctgggtgctggtcctgggcagtcccgcctgttctggggcctggctttcccacgctgggtgctggtcctgggcagtcccgcctgttccggggcctggcttccccgcgctgggtgctggtcctgggccttcccacctgttccagggcctggtttccctgtgctgggtgctggtcctgggccttcccgcctacatcaggacctggcttccccgcgctgggtgctggtcctgggcctttctacctgttccagggcctggcttccttgcgctgaatgctggtcctgggcctccctgcctgttccagggcctggcttccccacgctgggtgctggtcctgggccgtcccgcctgcttcagggcatggcatccctgtgctgactgcatggtggtggtactttcttatggctattgtaatttaccacaagcttaatggatttaaaaaacacaaatttgctgtcttactatagttatggaggtccagagtccgatatgggtctgatggggctaaaatccaggtctgaacagggctggtttcttctggaggctccaggggagaatttgttctctgccttttccaggttccagaggtgccacgttccttggcagaggtgggctggaggggaggggtgctcaggcagaaggaaccacgtgtgtaggggcccctgagcataagcagggctgtgtggtcggagcgtgtggtgagcggcaaagtcacacaagggagcttgggctttagcctgagagcagtgaggagtcatcaaaggggtgtaagcggaggagtgaaataatcagatttttgtttggaaagaacaggaggatgagtgatggctgcagtcgcccctcggcatctggggggattggctccagccccctgcatgcacccaagtccgtgcacactctagccccgtagccagccctgtggagcaggaggacacagaaagtcagtccagctccagcgcccctgcatgcacccaagtccgtgtgcactccagccccgtagccagccctgtggagcaggaggacacagaaagtcagtccagctccagcgcccctgcatgcacccaagtccgtgtgcactccagccccgtagccagccctgtggagcaggaggacacagaaagtcagtccagcatatgtgtgggattcattccctctcattgaaaaaaacccgtgtataagtgcatctgcacagctcaaaaccgcatcttccagggtcagctttgtgttgtaacagcagaactcagacacacacagccactgcctggtttcggaggttttacggggagacggctgtggcagttcatttgcttactgtctgcatttgctttcctgctacagacggcagagctgagtagtggcaatggtgaccacaaaacctacactgtttaccctctgtttatggaaatcgtttgccactcccatccctcagcaaaccgtggtggtcactcggatgtgagttctgtccactgctggggcctcgggagtgaagctgcagagctgaggcctgtgtggtttcagtcgttttgcccggttgccgttttgtgtgtcgggtatgctgtgctcttggatcttggtcacctgaccaacacctgatttgctgtcaggtctctgctcagaagtccccaggaggcacttcctgccccatcaacttagcctcctcctgtctgtccctgggtcagcagcatctgcattggcctctccctgggcagagtacctcaaggggcttggcagccagaccacaagctctgagtgcagggccatgtcctgcagctgacggcccagcatttagtccgcttctgcccagagccagtctcttgggagggatcagtactcattggaggcatgagttcaccggggttgtgatggctgcaaggaacagaactgtggatagcacaagtccagctcaggggaggctggaggtggaagcaccacactgtagacgaggcctccgggtccactaggaggcaaacggggagagaacccagccctgcagcagcagagctgccaagcacgtgaggaggtgtagtggctggttaggctgtcagtcagggagaagtgggcgagccatttcttgagagaatggtgaggggtgcgtggatgtgtgcatcgttacgtatttacactgttcctatgagtatttccagagtggtcatatcgagctgcttgctaatggtgctagaaaaaaaatcttgtaactccaagttattttaagtagaataaattgtgtttttgtttttttacagcaccagtggaacagtgattaacaagctgaaggttgttaagaagcagacatgccctttacagactggggatgtcatctacttggtgtacaggaagaatgaaccggaacacagtaagagagaggaaggcttgccggggtcagacccgcacgggggtgcacgtgagggcgctctctgaacgttcctcctggctacatcccttcccataggaacgttcctcctggctacaccccatttcttgctcacatgggttcctgccgtgaatagtgtctgttgagtgggagtgtcgactttgcagcctgagcccagccattcctcaggaataccactgtggccatgagcagccaatcccaaaatggcagccaaggagaaactgatggggatggtttgggttctacaggagaagaacttgagttatggggaataaaacctaggaccaggggtctggaggccattgatggttctgcttttggagaccttacaagaaacatcaaaggttagactggattccagtaagttttttcagctccagaagtcccgtttttgttttgtggaagaacagtataggacaaggaaagttatgggagtccttcgaaggtcacccctgaaatacttttttttttttgagatagagtttcgctcttgttgcccaggctgaagtgtaatggcgcaatctcagctcaccgcaatctccacctgccgggttcaagcaattctcctgcctcagcctcctgagtagctgggattataggtgcccaccaccacgcccggctcatttttgtatttttagtagagacggggttttgccatgctggacaggctggtctcaaactcccgacctcaggtgatccacccacctcaacctcccaaagtgctgggattacaggcatgagccactgcacctggccaatacttatttatttaattttttaaataaataagagacagagtctcgctctgctctgttgcggaggctggagtgcaatggcgtgatctcagctcactgcaacctccacctcctggtttcaagcgattctcctgcctcagccttccaggtagctgggattacaggtgcacaccaccacacccggctaatttttgtatttttagtacagacagggtttcgccgtgttggccaggctggtctcgaacttgggacctcaggtaatccgcccgcctcggcctcccagagtgctgggattacaggcaagagccactgcacctggccacccctgaaatacctaaagaccacagtggtgagggagaatggggcaaatatgtcttaggcatcttcagcataaacttaaccagcccctggccacacggaaggatcttgtatctgctcctttgtgtagtttgaaattataagtgaggcatagattcttcaccttcttctgcctcctgatgccattttttcccgaggcttatttcttttgtgttggtagagatgttttagattacttgttttgaaatctcttaaactgatgaatttgttattagctgatgagtcaaaataatcaacaaaaacaaatggactggagaacagaagagaaaaatgagttctcagtttgcacaggggccaccacttttctgatttgattgattttcttttagacgtggcatacctctatgaatctttaagtgaaaagcaaggcatgacacaagaatcctttggtaagtaagagtgtagcaaagaagtgggtgcatgttaggagctatagcattccttttgtgttttgagatggagtctcgctctgttacccaggctggagtgcggtggcgcgatctcagctcactgcagcctccgcctcctgggttcaagcaattcccctgcttcagtctcccattttttttttttttttttttgagacggagttttgctcttgttgctcagcctggagtgcagtggcgcgatctcggctcactgcagcctcctcctgccgggttcgagagattctcctgcctcagcctcccgagtagctgggattacaggttgcaccgtcacgcctggctaattttgtttgtttgtttgtttgtttgttttttgagatggagtcgcgctttgtcgcccaggctggagtgcagtggcgcgatctcggctcactgcaacctccacctcccgggttcatgccattctcctgcctcagcctcccgagtagctgggactacaggcagtcgctaccatgcccagctaattttttgtatttttagtagagatggggtttcaccgtgttagccaggttggcctcgatctcctgacctcgtgatctacccgcctcagcctcccaaagtgctgggattacaggtatgagccaccgcgcccggcacgcctggctaatttttatatttttagtagagacggggtttcaccatgttggtcaggctggtctcgaactcctgacctcaggagatacacctgcctcgacttcccaaagtgctgggattacaggcctgcaccaccgtgcctggccttggggctgttgcattcttaagagcatttcaatccctagagtgtctgcttgagccctggttgtgtgctgcttctgctccttttgggttacagaagctaacaaggaaaatgtgttccatgggaccaaagatacctcaggtgcaggtgcagggcgaggggccgatccccgggtccctccgtcgtcgcccgccactcaggtgtgctttgaggaaccacagccatcaacatcgacgtcagacctcttccccacagcctcggcctcttccacggagccttctcctgcagggcg

SEQ ID NO: 15523 - DNA, 50944 bp, Homo sapiens; identical to SEQ ID NO: 1158

SEQ ID NO: 15524 - DNA, 131896 bp, Homo sapiens
gaggggcggagccccggcccggaggtctgtcatgctgttcccgctccaggtggccgctgtaacctcttcggtccgcgacgatcctctagagcactgtgtgtctccccggacgcgagcccgctcccctgagtaagagtcagccagccgcggatggggagcgtgagtggcgaggtgtggcctggggtggtgtaggttgagggtggagggtcctggggctgcattcgctgccccggagcgggggcaggggcagtggctccctcggggcgtaggtctcgaggcaactaggccggcgacgtgccagagttacaggctctggaatctgggggtgggggtggggtttcttgtcggcagggggtctcgtggcggctgggtgcggtgggggaggtgcccgagttaagggtgtggagagttgggatttcgccgccgtgaggccggcatcggtgactacgagttatgagggttgggggcgggagttctgtgagcaggggtcttgcagctgccggggtcggggaggttccctggttacacggtccggattcctgggccactgcggtcgctgctgcccgcggtgttgttgatagctggttgcctgacgacgcttcctagtcagccacctccagggcccgggggcgagcggttccttggttcccatgcgccttctctccccaacggccaggccccccctgctccgtcaagcctccccgagcgcctttcttgcccctcggtgcttgttattgttaacgtgggagcgcttgtgcgcactgctttgctagtaaaacttatttaatcttcaccgtagctcgtagctcgtactgttgtgaccgtatttccccccgtgattgcccgactgcttgagcttgaacctcttgtttctaactgccttgattttaggaatcttatgtgggactcaaatccagttgtcagtacatgttattaatgggactcatcttttgagagaggctagctctcaagattgtaggattaagacgcttaactaggattgcggggaagactaaattctgaagtaaaccatcacctactttccaaacaccttggaaaatgcaggggcttaaaagcaaccgataggaatttataaaaagcctaaattaggctttattctgtgtgaaggaatgacttgtaatgttgacaagctccatggaagctattgaggtattttcttttctccatatcattcttctccctaggaggtcgctagctttctggtgattaaatgtctgctgaaatgctccacaaggatcaagtttttttgtttgtttgttttgttttgtttttggagacagggtctcgctctgttgtacaggctggagtgcagtggcattagtagagaagggggtttcaccttgttggccaggctggtctcgaactcctgacctcaagtgatccgtttgcctcggcttcccaaagtgctggaattacggccctgagccattgtgcccgttcaagtttgggtcttctgccagatggccgcctgggagggagtgggtgagtttagacagagtaaattgaaacaggctactttcggtacagtttttctcagatgaagctttcagacaaatatgaattaactgttacacatttgagcagatttcagattatccttttaacatcattctgacttaggttctgatgtactttcctgagtggcaggcaagggtgtttgagcaagtgtttcagcaatttggcataacccaaaggctaatttatgctactgccgttaatcaccattaagggtgtattattaatagctactgaaagacttcaacatggttttatatatttattcactctctctttgtatcctgtctcccagcctccctctctttcccccagcaacagtatttacatcttagcaatatttagggaaatttgtcaaaattttggtgtacccatgggaggaagttgctcatgtggatgccatctgccaggaggaagatggagaacctttcattcggtagatggatctctggatggatgagaagtgagaaacattgtcctggtcactttgtccctccctttcttctaaagctctttcactggcccctccccccaccgcacatgttatcacactttgacacctgttctaggtcctgttcccctactctagggtctctttttccagacaaaactcttctcccacagccttaatgattattttaaacactgctagatctttatttccagcctgggttctattctgagttgtagacattttcagattgatttcttcgtatctccggtgtatccattatggatatctcacattcagctcctaaacccctgtcagcctctgtagcagggggcattatcttgtccaaatttgaggacaagaatcatgtttatatatatacatatatatacacacacacatatatacacacatatatatttgttttttgtttgtttgtttgtttgttttttgagacagagtctcactctgttacccatgctggagtgcagtggtgtgatctcggctcactgcaacctctgcttcccattttcaagcaatggttctgcctcctgctacacccagctaatttttttattcgtagtaaagatggggttttgtcatgttggccagcctggtctcaaactcctgacctcaagcgatccgcccgtcttggcctcccaaagtgctgggattacaggcgtgagccacggtgcccagccacattttatatttttgactacgccagcctctagcacaatgtcatgctttaggagggaagtcattttccatttctcatgctcccatagtggggaggaaatttgtactccactccttgagagggaaaaggataggagcaacattttcccatctttttgtgactgatggatttgggagaaggaattgggcaaactcagttttaactgggttctgtttgtttattggatttgactagacttagcagaatgggtatgctctggtctgcttatatctatatgataagcataaagagccaaaggttaaggtttagagatgttggtgtggattatgataaccaagtatcaattattgattatttaaatctcagcatactttacgtttgcaggctctgttttttttgtttgtttgtttgtttgttttggtttttgagacaagagtctcgctctgtcacctaggctggagtgcagtggcacgatctcagctcactgcaagctctgcctcccaggttcactccattctcctgcctcagccttctgagtagctggaactacaggcgcctgccaccaagcctggctaattttttgtacttttagtagagacggggtttcaccgtgttagccaggatggtcttgatctcctgacctcgtgatccgcccgcctcggcctcccaaagtgttgggattacaggtgtgagccacaacgcgcggctgcaggctctgtttttaagaggtaaatcttcatatatgcaaagactgtaaagatacaaccataaacaataaaagaattgatctgttgatttcttttttttttttttttgacagagtattgctctgtcatcgaggctgtagtacagtggcgtgatctgggctcactacagcctctgcttcctgggttcaagcaattctcctgcctcagcctcctgagtagctgggactacagaggtgtgccaccatgcctggctaatttttgtatttttagtggagatgggttttgctgtgttagccagactggtctcaaactcctaacctcaggtgatccactctccttggcttcccacagtgctgggattacaggcatgggccactgcgcctggcctgatctgttgatttctaagtgttaggttctctgtcataatttttatatgcattattttcttttttcttcataatatactagaataaatgatatttctgttttatagattaggcatagagcagttaaggaacatgcttgaggtcattcatgttgagatcaataagtgatagaagtatatttcaaactcagttctttcaattaaactattttcctgaaaactgtttatcatctacatactatgtacacagctactggagaaataatacttggccatgatgtcttgaaaaaagttgtgagtgactttatattgtagagtgtcatatataaataatctcatttaggtttctttcagctgatttatttttggcaacttaatccttaaattataaactttcttactctatattgtacctatgccatatttattaacccagtctctgtgattcaccaagtaattcttgaataattgtgtagttgaaatatgttttctgtaagttaccacatgcttttaggagtgagaaaaagaaaagtggccgtgatatctagaaactggtattgctagaaactagcctggcattcacagtaactttgtgtttttctgttgaagataaactattgtacagaatgtcaacatcagataaggccgctctgtgtctatgatggatcaagacaaaaacattccatcagtgtctccaaacacagacaaaacgtaaatattgtccaagaaccgagataccaaacattccctttcccagctgatgtgaatgactactgcttgtttaccagttacagcattagcctccccctatattttagatttattgagtggtaccatcatagaattaaccccacttctaacagtgttcaatcctgagcaaagctccacttcctcaaattaagccttcccccaaatcacccaacacatataagtcttttccaataccctcttaccacgataccacagggttccccatggtgtgtgttctccgtgcattccttaatgcaatgagtagtacatccaacttaactgtggtagttttcctggtgttctttggctggagatcattaccaggagaaagctcattagtgtctttgactctttaatattaaagtcattataatctaatcagattagatacaggaaaaatttagaaatgattagaaatgtacttatatctcggataaatcttatgttttagttatggcatatgctatatttactatggttgtttaaaagtatgttttatttgtactttttgtacttttgattactgtaagttaaaatcagttctataatttataatgttaaataattacagtaaagagaaagataagcatctataaattcaagagggagatctttcaaagcctggttagaacaacatgtaaatgaacatgttaaattaataattgttattaggtggtatggaaaccttagttccatgtgaaggtggcatgttactgttttttttttctttttagataaatgacatttcttttttttcttttctttcttttttttttttttgagatggagtctcactctgttgcccagactggagtgcagtggcatgatctcggctcactgcaacttccacctgcctggttcaagcgattctcctgcctcagtgtcccccggtagttgggattacaggtatataccaccatgcctggctaatttttgtatttttagtagagacggggtttcgccatattggccaggctggtctcgaactcctgacctcaggtgatccacctgcctcacactcccaaagtgctgggattacaggcgtgagccaccgcccccaacctagataaatgacatttctgtttaaattctgtgcaaaattctatagcaaaatatatgcgttatctcatcattttattcctatcagacatagaatatttagggaagattagaggattttgaggattgattgttttaaacatgaaaacttgtttgctgttgagttcagaatttttactaggaaaaatctttcgtgactattagcaaattaaaaatggctgaaataagtcgggacggtggctcacacctgtaatcccagcactttgggaggccgaggcaggcggatcacgaggtcaggagattgagaccatcctggctaacacagtgaaaccctgtctctactaataatacaaaaaaattagctgggcatggtggtgggcacctgtaatctcagctactcgggaggctgaggcaggagaatggcatgaccccgggaggtggagcttgcagtgagccgagatcgcgccactgcactccagcctaggtgacagagcgagactccatctcaaaaaaaaaaaaaaaaagctgaaataagctgagtgtggttgctggcagttataatcccagtgattctggtggccaacatggaggatcacttgagcttagcagttcaaagttacaatgaactatgatcgtgccactgcacactagcctgggcagcagagcgagacctcatctctaaaaaacaaaaaacaacaaaagaaattggccagaatttatcaacttttgttgatttgaagtatattttgctaaaactatatatgtaaatatatatatatatatatatttctatttttagtgtttttttttgagatggggtcttgctctgttgcccaggctggagtacagtggcatgctcataagctcactgtagccttgatctcctgggctcaagtgatccaatcctcctgcctcagcttccccaatagctgggactacaggatgcaccactatgcctggctaattttatttttatttttagtagagacaagatcttactatgttgcccaggctggtcttgacctcctgcgctcaagtgatcccacctcagcctctcagagtgctgggattacaagtgtgagccaccaagcccagcctacggctatgttttaaaatcagtgtttcttttggcattacataatggcgtgaagtttacattaggtactgtttacctgttataagtttcaacatattcttttaggtaaagcctgcttttctacaatgatatatatatatattttacaaattattattgtcccaaacattaagttcaggggatactttttttctttaacttgcttgcatttgatattgtttaccagttctattttgtacctctttcctcttttcctcaactaattatgctgattgggtttgtttcatatccctgttttaattattatttaattattccctctgttttttttttttcccccagcttcaattcttctgtcactccctcaagtgaacattggctgttgtttagttctgggtcatctctctttttccctccctgtgctcatttactgtggcttcaactgttacctttaaaatacatagttaatgtagttcattttcttgaatttgaatcttgaatttctaaccgtctactgtaaatttccagtagcacatcttactagctccaacttaacatatgtaaaccaaacctttctaaatcttccaacttgctctgacttacttctgtccaagattctatccacatttagcttccaggccttaaaactttgatcattagtggcttcttttttgtctacgtacccaattagatgctaactttaatgggactttggaagatgtgtttggaaaaaaattctaggttaaatgaagaaaggttagtcttttcaaaaaatggtgctggaatactctattcatatgcaaaaaagttgagccttgacacttacagatttgcaaaaattaactttgaatggatcacagacttaaatgtaagagaaaaaactaaaaacttctaaaaggaaacataaaagaaaatatttgtgatcttgggttaggcaaagattttttttagctgggcgtggtggctcacacctgtgatctcagcactttgggaggccaaggcaggtggatcacaaggtcaggagattgagaccatcttgagaccatcctggctaacacggtgaaatcccgtctctacaaaaaatacaaaaaattagccaggtgtggtggcgggcgcctgtagtcccagctgctcaggaggctgaggcaggagaattgtttgaacccaagaggcggaggctgcagtgagattgcgctactgcactccagcctgggcgacagagcaagactctgtctcaaaaaaaaaaaagattttttttagataggacacaaaaagtacaaacaaatttaaaaattgataaattggacttgataaaaattataaactttcactgttaaaaatatatcaagaaaacttacaaaccacagattggcagaaaatatttttacaaagcaagttttgtaaaatattgctttgtaaaaataaagcaagtttaataaatgacttttatcaagtgtatataaagaaatcttacaattcaatggtaataaaacaacctgctgggcttggtggctcatgcctgtagttggaacactttgggaggccgaggcaggaggatcacttgagtccaggaattgaaggggtaacattgagctatgatcataccactccagcctgggcaacgtagtgagatcctgtgtctgcaataaacaaacaaatgaaaaaactagctggggatggtggtgcttgcctatagtcctagctgttcaggaggctgaggtgggaggattgcttgagcccaggagttcaaggctgaaggtgtactatgatggcaacactgtactctctagcctgtgaaacaacgagagagcctgtctcaaaaaaaaaaaaaaaaaaaaagaaagaaagaaaagctaattttaacaaaagggcagatttgagtagatactttcccaatgattatatgtatggtaaaaaaatagatgaaaagatgctcaacatcatagttatcagagaaatgcagattaaaacactcagagagataaccactaaataaatacacaatagaatgactaagataaaaatgactgaaaatatcacgccctggcaaggatgtgtagaaattgcaattgtcattacaacccacatacattcttatacattggaatgtaaatatggtactttgtactttgaggaacagtttagcagttcaggaattagacaacatcttgaccatataataaaaaataacatcactaacaaggggcaggtaaatatcacgtgccttctctttgtgacaccttaaaatttcacctaatatttctggtgagaatgcataatctaaatttagtcattaagaaacatcaggcacaccctagatgagggatgttctattgaaaaggatgttctgttacacaggattcttttacctgtgtaaattggtaaaagacaaagaaagatggtagagatagatattccaaattaaagaaggcaaaagagatatagcagtgaaatgcaatcagtacctaacttagatgggatcccgaattagaaagagaaaaataggctgtaaaggctgctattgagtcagttgacaaaagtggaatatggacaatagattaaaaaatcagtgttacaaaagttgataattatgttgaggttatataagaaaataacccaattcttaagacacacacactgaagagcttaggggcaaagggctatgatatatatactttattctctgaataattttagaaaaaattgtgtttgtgtgtatggagagaatgaccttgtgtgcacaagcaaaggatgaagcaagtggagccaaatcttaatagggaattaataaagactctttgtgtgttcttggtattattactgtaacttctctgtaggtcagaaattatctcccaatatttaaaaaaaactttttttttgaagtgctttggcttaaggatttaaagagctttttgtttgcttgccttcgttttttgccggagagggagtgtatatggagggtggtggtagtttttcattttctttttatttcagatattttaaagtatattgtaggctttttggggaagctgggagaggcagtaggcaggcatatttatgatcaatcttaagtttgaatttctcaatttgataagtgagattgaaaactaaatgtggactaagcctacatgttgataattaggctaaaaatactgtgatatagatacgctcactgaaatttttttttaaagaatctgcaaaatggctgataatttggatgaatttattgaagagcaaaaagccagattggccgaagacaaagcagagttggaaagtgatccaccttacatggaaatgaaggtaaatttaataattttctttgaacatgttttattataattgtctatggagattactcctgtgtaaatacaaaacatcctcttctatgagtgagaatcttctgttttgtagtatgctgtcattctaggagcctgactccagacaagattgcagtaattttgaatgcagtttttcttttgtggtggtttatatctcacagtgtttctcttatctcttgttgaagaattatttggttataaaatgattatgagaccagttctattacaaagaacttccacaacataaacagaatagttgtaaaagcaagtttatagtctatgtgaaaaaattcaatttaattagtttaaaaagtttttttgaaatctgaaaaagtgaatttattaatttattttgtactatttgtgtttcttaatataaatttcttaaaataattgcttttttttttttgagatagaatctcgctctgttggccaggcaggactgcaatggtgtgatctcagctcgccacaacctccgcctcccaggctcaagtgattcttctgcctcagcctcatgagtagctgggactacaggtgcccgccactatgcctggctaatttttgtatttttagtagagttgagatttcactatgttggccaggctggtcttgaactcctgaccttgagatccacccacctcggcctcccaaaatgctgagattacaggcatgagccagtgtgcccggcctaaaataattgtttcttaaagcaatgtcttaaaggctttcttaaagctttccttgtttaggtgaaactgatttatccatttagcaaatacttactgagattgtgttaggtattatgctaagctctgagaatgcagcactgattagagtgttgtggcaccttctcagggctcagtgtatgtaataagatacagcatgtagtttaatctgtgccatatggttcatcataatgacagtaaccatatatattggtttgttcaagatgatcctggtttacctgttgtccagtgtttttttctggtttagcatttgtcctggacaaaggtaccttggctgagatgataaataatatagataccctgattacaattttactcacatggctaacatttattgagtactagctatggacaaggcatattcttaagaggttatatttcacagtaatctatgaggtaagtgctgttattgtaattttccagatgagtaaactgaggcaagttaagtaatgagactaaggcagtagagttggtggaactaggctttgacccctggcagcctggcttcagtgcttgtcctcggaaccaacataataggttgcctttcttccagataacctgtcatgtaccaggaatgccaaggactttatatgtatcattttatttaatcataatatccctgttaagcaggtgaattttttttgttttatggattaagaaagtgaagctcacaggagttaagtaatttgtccaggtccacacagtggtggattcaggagtggaacctttatgcagctccagagtctatctcttaaccactctccagtagttaggaccagcttacggctttggagttacatgatttggagtacatagctttaaagacagttttgttataatttctaacattaatttgtacataaataattttaagtcttagttcaagtatcacctgctcagtgaggccttatagtcccccagcatttctgggcctccttactttaatctgcttttttttttttccataaccacttcctgccactatctacatatcacataatctaatcatgtgttgagttcattatgtgtccccccaatagtttataagcttcatgatggcagaaattcttctattttttaaaactcttatactttcaatgcttgacaaaatgtttggcacttaatgggaactcagtaaatatttgttggtaagtgaatgagttaaatattagaatatctattataaaattaaaatacctttggctaattcctcaaaccttacacttaatttcttctatgatgtactgtgtaatttcatcaagctgtttaattaaaatttgagatgagttgtatatttcatggttttttttttcctcttgcttttgtaaacattatgtctctttcagggaaagttgtcagcgaagctttctgaaaacagtaagatactgatctctatggctaaggaaaacataccaccaaatagtcaacagaccaggggttccttaggtatgtcattagatgtgctaaacttattttaagatatccttagtgggctcttctgaaagaggtttgtcttgtcagaaaaaaagatttatttggaatcctagtagtttttctttctggaatcttacgtaagtcaatatggtctacatatgaaatagaactcatactgaaaactttgtacttgttttatgtgatactgcattggttatgatttatggaacttatagaagaaggtgtgtataacataacttaaaaattgaaaactttgaaaggaatttgtgtgtgtgagagagagagagaagagaaacttttatttgttgattgaaaatggtgaacttgcttatttaaaaattaaagaaatatgcttaaagggtacaaaatgctgtttggtgaaagactattttaattattgatgatcatgttggaattgtaaagaagttaatactgtagccatactaatgctttgattatggtatggtatgaaaatatttggaaactttttaccacattttggcttgttggtaggtatacattttaaaaaaagaaaatgtatgaatatgtaaaaatttttgtttatttattaaagacagggtctctctctctctctctctgtcactcaggctggagtgcagtggcatgatcatagttcagtgttatcttgaactcctgggttcaagcaatcctcctgccttggcctcccaaagtactacaattacaggcctgagccaccatgcccagtctgtatgaatatatataattttttttttttttcttcaaggctgagtctgaccctgtcgcccaggctggagtgcagtggcacgatctcggctcactgccgcctccacctcccaggttcaggcgattctcctgtctcagtctctcaagtagctgggattacaggcgcatgccaccacactcagctaattgtttatatttttggtagagacagggtttcgcagtgttggccaggctggtctcgaactcctgacctcaggtgatctgcctgcccgcctcggcctcccaaagctggggttacaggcgtgagccactgtgcccgacctgtatgaatattttcaatgtgcattttgtgatttattgatgatgacaaactttttcacaaaaagaaaatcaactatgataagttcatttgattaaagcattgttctcaaatggacagcttttcatggatgtaggtatactcctaaattgtttttgtgtgccagtggatacaaggggatgccggccaagaaactggatagtcagtaagctttgtctctgcattagacaaatagctcaaagtgagtgccctacttttaatatcagatagataactctttccattttgaatctcttataaattattaatatacagcattagtgaactaaagtattatatattggtaaaattttttaatctctaaggctctcaattttttttctgtgaaataagtttgattatcttccagccctacgtttttatgaatctaaattttaattattccaagagataatttttaaaaagtttaatagtaggttatctcaagcactaaggtcgctaaggttagacagaatcccttttaaattctagggttacagcttgctttggattgggctgtgatgcctttatgacctgtcaggagctacactttgtttccttatcttatgacatctatctcaaaaagtcgttatgggcgaaagttaaatacgtgaaaagatggctggcacgtaattggtacacaataaatattaatttctttttctccttaacatcttttttttttgagacaggatcttactttgtcgcccaggctggagtgcagtggcataatcttggctcactgcaacctccactgtccaggcttaagtgattcatcctccctcctcagcctccaagtagctgagaccacaggtgagcaccaccatgctggctaacttttttttatatacatatattttctgtagaggtggtgtttcgctatgttgcccaggctggtctggtctcgaactcgctagctcaagccatccgcctgcctcggcctcccaaagttctgggattacaggtgtgagccacttgtgcctggccttccatctttttaaaagtagtttttcgggctgggcgtggtggctcacacctgtaatcccaacactttgggaggctgaggccagcagatcacttgagatcaggagttcaagaccagcctggccaacatggtaaaaccccatctctactaaaaatacaaaaaaattagcccagcatggtggcgcaggcctataatcctagctacttgggaggctgaggtgggaggatcacttgaacctaggaggcggaggttgcagtgaccgagatcatgcccctgcactccagcctgggtgacagagagagactccatctcaataaaaaaaaagagtagttgtttgaattgtcttaggaattattctttgatcattacattcacatattatggagagttaacagtataactgaaagatggtgacctctgccttttcattaattggtgttacttcggcctctgacctaggctgacttctcatcttatacattccccgagtgtccatatctgctcacagggctttatttactgttagtgtgttcatgacttctgaatctgtatccccagtcccaggttctattgcgaacttgacccatatgtctgattttccattggacatctgtacttgtatggtcatgtatggcatgggctcaaaatcaaaatttgcaaaattaacttatactcttgtcaaactttctagtgctccccatctcactgagctggctgcctagtcatccttgattcctgtcttctcctgtctcctatatcaagcagttacacaagtctagttgattctaatgcataaatctcaagtaaggtcactctgctgtaatcccactgactttcttttatgaggcctctgttgtctgtcagatttttgtaaaagcttcctagtgtttttggtggttgttttgttttacagtctagccccgtgtatcaaatctctatgttttctatatatttgcataaaacaaatctgatcatattagtctctgcttcaaaccctttgatggcttctttttttcttatatgataaatttgccatcttaatacttctgctagattgggttggtcaatcctgtcatgtgcttctagaggatttgttctcctcttgaagagtagttttgaacttattcagcttctcttttgtaccacaatgacatgccaacttgcatcccgttgtatttccactgcctagcacagtgcgcagcacttactgcttggaaaagttgttttaaaccaacgggttaatgtccccattgcaaaaataaaaccaattctcttgggtgtgttgactttaattttcatggaatgcttcttccattgccatctgaaaccatttgatgcacatggaattttattaaagaacaatatataattgactaattttatactgcataagcatttagttactgacctcctgcctgattaattgtggctttaaaattcagtcaaatacatagtttctcacactgggaaaaatgtaaaattatttggcaactaagggttttccttaagtggtctcatttaggaattataaaaaacaggtctaatataggtcagatttggaaatgaggtattgacttaaagcactgtaacatcgtagtttgaataagtaattaagcatagtgtagtaatcagtgatatataaactggacatactcattttatccaatgaaaacaatctattgatagctcatagtacaactatcatacaacactatgattttataaattcttttctgttagatactgatgatattcatggttaattccatgtggctctttctaccaccatttatacctttcataaaaggatttgaggtagcgttacagtgacttctgacaccagctacctggagttggaccaaacttcacaggttaagggcataggcctccacaagactgccttcacttcagactccagctgcaagttcaagggtcaccaggacaccttcaggtctgaccatctggctataaatttgggggtttcccctatcccctcaagttcaataattcataagaatgactcacagaactcaagaaagtgctgtacttatggtcacagttttatagcataagtatacaaattagaaatagccaaaggttgagacacatagggtaaggtctgggacggtccaaacattaattatctgttagtctcagggagacattaccctcctagcacatcagtatgtgacaggatacagaatattgccaatcagcctcacctaagcctgagtgtccagagtttttactggattttccttatgtaggaatgattggttgaattgttgctccttggcttgatctccagccctgctgtattcattccccttaggcctggctgatgtcacatggcgcaaaggcccaaccctcaaatcacatggttggtttttctggcatgaccagctcccgtttttgtcttctctgtagcataaactctctaggggttcacaatgattcacttcgttagtataaactgttaggtatggtccaaggtacccactgtgaataataaagacattcccatcatctggtaaattttaaggtcaaacccactaggggctcacaatgatttacgttgttcgtgtaaactattaggtgtggtccaaggtgtccactgtgaataataaagacattcccattgtctggaaaattttaaggatttagaggttacctcccagaaactggagacaaaggattcaattttttttttcttttttcttttccaagccaattttttaattacacataggatgtacatgatttagttcatataagctaatgaaaaaatgtctttaataaggagtttgtcagaatactagtaatattaaattaagagaaagtcacctgaaagtgatctataaaagatcttttatctccctaaactgtttctaggcataatgtttgtgtttatttcattaaaagaaattcttactaacttattattgtttaacaaccattactggtattattaacaataatcaatattgttgaaatacttatattaatcatttaaatgctcccattaatcttttaaaaatgttttgatacaaatgtgtcaaggtcttaaaacatgtagtttctccccaccacccagtttttttaagggagaggatcttgctctgtcatccaggctcgtgtgcagtggcaccataatagcttactgcagcttaaaactcctgggctctggggatcttcctgcctcaacctctcgactagctaggactacaggctcaggccaccatgcctaatttttaaattttttgtagagatagagtcttggtatgttgccccggctggttttgaactcttgggttcaaacgatcctcccttctctggctcctaagtagttgagactataggtttgtgccactgcatctgtctagttgtagttttaattatttgttttgagatagagtctcgctctgttgcccaggctggagtgcagtggcgcgatctcggctcactgcaacctctgcctcctgggttcaagctattctcctgcctcagcctcctgagtagctgagattacaggtgcctgccaccacacccagctactttttttgtgcttttcatagagacagggtttcaccatcttggtcaggctggtctcgagctccttacctcaagtaatccacccaccttggcctcccaaagtgctgggattacaggcgtgacccacagcacccagccttgtagttttaattatcattcctctttgtcttaggtttatcctattgtaaactaaatcacagatactcttctacagtttttattcattttgtatgagtgaaatgggtccttgtagtgatacctttatagctgaaatttaagagtacagtgtctcctcaattagtcacatctccttgtaagtcacccattgtgtaaaggcctattattatttcctataatttgtcttttgattatttttacataatgctttttcatggtagtataataatgaaaagaaagtaaatgttctatggtaatttgtttcatagagtaattatgatgaatgctctgttagaaggtaaattaattatgaagaagttatatactttagtcttaagtattttatgtaagccacaactgttatagaaaccaaatacttctaattactatagttctgaagcataatgttaactatcttagggtcattgatgttatacttgatgaagtgacatcacttcaaatgaccctaaaatgacacaaatgctttacttgctgctagatccatcagaagacaacaggcacaataagtaagcctcaccgtgttccttagctcattaagtcaattgagatgctattgttaatgcatggtttaaaagaataggatatttacattgttctatacagttcctaattttatgtctgtgacttacctctaatgccataaaatgttggtacaagatgacaaaataagaattaaaaagttagtgttttctgttgactaaacattaaattaataaagttataaataactcagaaggcattatatattgttacttgtcaagacaattttacaatactatttgaattaatagtgaaaaacaaatactcttagtaaataaaaatttaacttaatatgaataataggccgggcgcagtggctgaggcctgtaatcccagcactttgggaggccaaggtgggcggatcatgaggtcaggagtttgagaccagcctggccaatatggtgaaaccccgcctccactaaaaatacaaaaattagccaggtgtggtggcaggtgcctgtaatcccagctacttgagaggctgaggcaggagaatcacttgaacctgggaggtggaggttgcagtgagccaagattgcgccactgcactccagcctgggcaacagagtgagactttgtctcaaaaaaaaaaaaaaaaaatatatatatatatatatatatatatgtatatatgaataataatgtaaatgaaaatgaattatgtttttctttccattcttccacataaacccccaagtagaattgaaaaacagcagtaaaagccaccttaaacttacactttttgtaaatttgtaaattgcttgttcctggatgggcaggtagtgtgttggcatcatcctggcagcattgttgtcttttactccttggcacaatagaacatccattgtgaccctgtgtgactagtgatatgtaactttggtaactacctctctctatgcagtcagaccgctaacaggagaaatggaatattaagtatagtatattgttccccctcaccttttctcatttcttcctctgtctcaggcactcattcatatattcatttgcagatttattcaatgaacattttcttgggttaaagttatgtgccagcattataaaattgaatagcgcatgggccttgccttcatagattttatagtttagttttatatatgatgttccattctgaacatgagaatcaaaactttctctccttaggcttaaattctgtatctttaaaaaaaggtttagattccttcaaaaggaaacagttcctttctaggatgatttaaaattccaagcatatggaatgctttagtttcttttggaagagagttagaagcatgtgtaagaggtgtccctaaggaatcctctgttataccctctatcatcaaggagttaaataggccagaaatgtttatcaagagaattccagtgttgatagcggtaagtggattttagtattctgtaagaatccataaacatccacttatgtttatattacactggccttttccctgcctgaaatgtttcagtgatgtagtaagcagtgatatgacacattcttgaaaagttcccatcattcagctacattgtgagaaataaggcacaaaatggtgatttttatatcagtttataaactacagtcaaattttatttcatctatagtgctcatagctgaatctttaaggaaagttttggccaggcgtggtggtgcatgcctgtagtcctagctactcgggaggctgagatgggaggattgcttgaggccaggaggttgaggctgcaatgtgccatgatcacgccactgcactcaagcctaggtaacagagcgagaccctgtctaaagagagagaaaaaaaaaaaagccaagttttattttgtttagaaatgataattttttaatactatagtattatgtgtatagtaggactaaaaaagggatgaagcttcagatctgaatactcatctaatgtctatgcttcttgacatagtattttattattgaaggtttgaaaagtatataatttgatttttgatagctttgttgagatataatttacacaccataacatttacctatttaaagtgtacaattcaatggtttttagtatatttacaagttgtacagtcatcattgtcatcatccctaaatgtaatttgatttttaaattttgtgtaaggaaatactactcaaattcgaagtttttcttcaaaaattaacatccatttacagagtttctgtttgggatgatgaaaaaattctggaaatggatagtgatgatggttgtacaacattgtaaatgtacttaatgccactgaattgaatgcttaaaatgattaaaatggtaggttttatattatatacattttaccacaataaaaattaatatccatttttatgaaatcagaagtggtttaactttagaagtttttaggaatttcatcctatctgaatgctctttgatacaaaaagaaaattaaaaaaaaaaaaagaaatgtgattctaagcaacacatggccctaataattttttctcagaaacatgttatattaaagatattcttgtatgctaaaaaaaatcatgttattagttttcctagactgaaaatgatgcattaaaattgttgttggtatttatttttatagaaattagtgtataattaagtgaagatgtaaagataattagtttttctttaattttgctgttcttgagaaagcaagatgccaaacaatgctggactacttgtcttaactggaggaaaaagtgaatataatgcacacatgcatataaatatgtatatgataatataaaagtatctgtttataggtgcattaaaaaattatctgcatggagacaagaaataacaatgtttgttgttctggacaggagaacagggtggctagggctcatggatgagaatgatatttttgataatatttttgattatctgaatgtattatctattgagacattttaagtaaaaaacttaccctaatcctactcttggaataagcataattctgttccttcttactgtgctttgttacaggaagtagaactttgagattggtttgaaaatgaattatactaagaagttgttttttttctaggaattgattatggattaagtttaccacttggagaagactatgaacggaagaaacataaattaaaagaagaattgcggcaagattacagacgttatcttactcaggtaatgagttctattaatgagttgggtttaatgtttcagaattcagctcctaaatttgttttcataaggtattagtcatatgtgttaatttttaggttttcagtggtactagcaaagtagtagtatagtcaaagttaagtggcatatatgacattggtagagaaaaaaatattgctgagaaccggtgccatagaatgatacagacttttgaccttttgactaaggcagtggattctaattttaagtgagatcgttaattatggtttttcatgttttctgtaaagttgtcatggtttgaagtagtccaatcatggtttcccactcttctacaccccccaactatgtattaaaatgacatatggagttctagttgctaattattttcctatgagccaagcttataaaattacatttaattatttagccactaaagcttttgttttatgatctcatgttttacttagcagaactcttgagtatttttgttaaattatataatggccaaagtaaggtttattgtaagttttaaatttaggttataaaattattttaaacaattatgatatttgttgtcatctcaaaatattctttagttttttactgctttatgtttgttccaagtgtacaaatgtctcttattctgatttacacatggagagaatgaactttgacttaatacactttgtcaatggtttgtttcccttgactttagggcattacacaagggaaaagaaaggtagggttgtctgcaatacgtcctccttcagttttttctttctttttttttttttttacgatctagaaggttgcaatcatttgcatttatgagattcaaaccaattaggaaaacgggttcatttgtgattttgagatgtttgaatggcaccattttgtattcttgcttttagcagatgacagcatacacattataattttccgttaatatagtcattacttttgattcctgctttgcatttgtgtttattgctttcttatgcattctttttgaatattctgcagttaagtctgttttcagcatgcaattttttatttctcaaattacactaatcacagtaagattaatagagtagtagaatatccaagatatttgaactacatgttgtgagaatttggattactctgtttttccaccaaaatctatagattgcattgtccatttatattggaaaacaaagagaaacagtttatggttttacaaaactggttttaaaaggaatctcacagattcaccattcaactaacatattttaaacacttattatgaagatatatcaggtatgcatcctgtcttcaagaggcttagaatttagttgtagagatagcattcatacgattcagaaagtggtaactacaagaaggatataatgatcaagatagtcctcatagtgggaatttctattttgtgaggcaatctagatttgggtgatctggagagagaatcgaagcgagaaagcttttcagatggaaagcatagagtaaaggaggacctagagggtagactttagctttgtatgaatgaggcatattaggtttaccagcctgactgggtcagagtatcattctttttgagagtagtaagaaataatgatgtatataggataggatcaaattagaaggcagtggatttttaacttgttatatgtaatagtcagtgatgagcatcatactttcttaaatagcttgtgaagagcatggtaactgtgttttaggacagttagttctgcatgtagagactctcattgtgttaaattgctgcccaacttcttaactgatttcctcgcgctaattttcacttcaccctccaagctattttccagaatgattcagtccctaacttatttaaatatgtcagtatcctctaactgcctccaggataaaaattcaaattccttagcatggcacatgtctttcgtgttccagcctgactccctgggcttatacctcattatcttccccttccctactttttcttattgggtggagttttcctctggtatcagatatctaccattttctcttgtaggttttgcattactccctaggtaagatttttaaaaaggatagtggtgggggacatgagaagaaattgccgtcatgaaagtacaaatctttaaattcaaagggatgtgaaggagttttttaagatttttttgtttgttttttggtttttttttgagacagagtcttgctctgtcgcccaggctggagtgcagtggtacgatcttggctgactgtaatctcagcctcctgggttcaagcgattcttttgcctcagctcccggagtagctggaactacaggcgtccaccaccatgcctggctaatttttttgtacttttagtagagacggggtttcaccatattggccaggctggtctcaaactcctgaccttgtgatctgcccacttcggcctcctaaagtgctgggattacaggcatgagccaccgcacccggccagtttttgagattattaagaatatagtcggccgggggcacggctgacgcctgtaatcccagtactttgggaggcagaggcgggcagatcacaaggtcaggaaatcgagaccatcctggctaacacgttgaaaccccgtctctactaaaaatacaaaaaaattagcctggcgtggtggcaggcgcctgtagtcccagctactcgggaggctgaggcaggagaatggcgtgaaccctggaggcggagcttgcagtgagccgagatcgcgccactgcactccagcctgggcgacagagtgagaatccgtctcaaaaaaaaaaaaaaagaatatagtcttgtagaggagcactatttccttaaaattagagagacagtcttttgttcacatttgagaaggtgggactggaagggaaagcaagagaaaaagaaaactacacagactatagggagctggctgcagcttcctggaccccctgaaatatgtatggtttccaagtcccactcatatctcttgtggcttccagacttggattgcatggatatttgagtttttaaaaaaaatcaaatcttttaattttgtcaagaagagttattaaaacaaacaactaccatcttttttcgtgttttaattaatttttttttcctgtgcccttcctgcccagagatggtttcctgtttttagaataaaagatgcttgaccatctaaacacagaaaagacatgttctcaggggaacagtttttaaattgagtcagttaattaatatccccagcccagacctccatcctgaacttcagagttttctagctggctgcataattcacattttcactttgaaatctacctgatatcttatgtagaccatgtccaaaagagaattcttgatttctgttcttcccaccctcatggctgataaacctgcactatccgtagcctgtccttttaatttcctttttgtcacagtaattattaccttctagcatgctgtataattactcctcattatgtttattatttctttttcattttccccagcttgaatgtatgcttttggaggacaggaatctttatctgtttttttcagtcccaaatgtatcagaaagtttgggcacatggtaggcactcagtatttattgaatgaatgaatgaatgaatgattaaaatttagctttttgaaaaaactcactatgttgttctttttttaagaattaaagtttttttggtagagacagggtaataaaaaaaagttttttttttgtttttttttttaaatactcaagctggtcttgaactcttgggctcaagtgtccctcctgccttggcctcccaaagtgctgggattacagacatgagccaccactccctgcctatgttgttgttattgtttattcttttcattttattgaaaatttcaaacatcattcttgacccatgtttggaatgggaaattgcccagtgaaggagtgaggatgttaaatctatcttcctggttggaactatgaatgggtttttcatgcatttataactctacaaaataattaggtttatagtgtacttcagtatataggaggtaaaatcactcagggatctggtcatgtgtcttattttttccttgtcaggtaagtttagagttccatacagccaactttcaaattagcttttgtagcacaactcatttgtaaattcagatttaatgacactttatttatttatttttgagacagattctcactctgtcacccaggctagagtgcggtggtgctgatcttggcttgctgcaacctccgctttttgggttcaggtgattctcctgcctcagcctcccaagtagctgggactacaggtgcgcggccccaagcccggctaattttttgtgtttttagtagagggggtttcgccttgttgcccaggctggtccgaactcctgagctcaagtgatctgcctgcctcaacctcccaacctgctaggattacaggtatgagccaccctgcctggccagatttaatgaaactttattaatcacttagttttgctaattactatctttccataatgttttgaatacaacgctattgtagttaatacgttgttttgcggttatttgcttacatgtctgtttctgctactgaattgtaaatcccttgaatatagggaaaatatatttgtatccctaccatctgaaaatagtacctgcatagtattagatggttgctaattgcttgtttaatgaataaataaaaggcatggaattaggcaggttgacaattattgattgattttatccttataacctagtgatgtgtagatggcattatttctgttttatagacaaggaaactgaaatgaagtgaagtaaattattccaaagtatttgactgctaagtaacagtaccagaaagttggagatcatatgtatttttttaccaattggggatcatgtgtattttttttttccagttctttgtatttgctttacagctttcaaagcgattttatattttttgtcctccttcatccttataccagctttggtaggtaggcagagcaggtactattctcattttgcagaagaagaaagtgtctgtcagaaaagttaagtgacttccccattgttacacaactgataagtgcttgggctagttgtagatcctaggtcttttgactgctagtctaatgctgcctctactacactgcattacttaaatgcttaatgaacaagattggaggaacacataaacaacattcatagtttatatctattggcatttcagtagatattcactcacataattataggaaaaatagaaaaaaaacttgtggcatgcattaagatatttgtgaggaagtttaaatttgccttgagaacaaaaagacagtagagcactgataatgaagagtacatgcttagaagacgaaattgggaaattttttttcatgcttctaatcatcttgaatcaatagacgtatatattgcacatgaaaattaaggcctgattttccctttcagggagttgttgattggaagaaaattctcttttttccaaatgcttttggtatggtctatatagatttgtagtttctgtcttcattccatttcattcatttgctctgcataatataatactagtttagaatatagaatgcaaagacacatttatgcaacatattttataaaggcaattaggtaatatatttttttaatgtgtatatatacagaaaaattttctatctacgagtgaaacagatccatctactttgggagtttctcttcctattggtgagaggttatctgctaaggtaggtggataggagtagttattgtgggtaccagttttccgaggcatcaaaatcattaaagaacatactgctgatttaaatgcaaatggaagatcacatcatttccccacacttgaatatatttctatttcaaaaatccgtggagtcatatttatgctgtttaaaaaaattttcttgaacacaacatttgtaaccatataattttatatttctttaatatgttgattcttttgctgtattcagttatacttaactgaatattcagaattcatttttttcagcattgatttctgactataaagtttatgctatgtaacacagttattggaataagtggatgtgaaattatagtgagcttttatatagggtgagggtaagggttctttgaatgtgtgattctgacactccattaatacacgtccatattccttagagatgaaagtaataaagcactgtacacctcttgtagtgactcaggtctcaccagagtatatcagagatcatgaaatagtatataagacaaaatggacagttaataaatttcaaaagacagacctagtttctttttttttgagacgaagtatcaccccgttgcccaggctggagggcagtggcggggtcttggctcactgcaacctccacctccccagttcaagcgattctcctgcatcagcctcctgagtagctggaggcaggattacaggcccctgccaccaagccccgctaattttttgtgtttttagtagagatggtgtttcacaatgtaggccaggctggtctcgagctcctgacctcgtgatccacccgcctcagcctcccaaagtactggcattacaggcgtgagccaccgctcccagctgacctagtttctttagtacttttttagattgtgttgttttagcgacacgggagtattaaaatttaagaacattttttaatcatatatttatgttttaacagaacatttcattataatattttataatctgtgataatttttctttttaagtttaaaatataaaggatcattttttaaccttggaaagcaaatggttagcagcaggtgcttcaggggagtgggttgggcattaggagagggaggtgtccctgagaaggaaagaaggaaggtaaccccatcatatctctttggaaacatgctaatgacagatctcctggcaaacacaatcatcatatttactagtgggagagatttatctctgaatgcttttggcagaatacacctggtttgtctaggattgctgttgggaatcaaacctggaatctatggatttatgtggcatggctctttggaaaatgtcatctaagctctgttaactattggagtgtaaaatggagatgtttcatgaacgaagcaactcccttctgttagagacctcatgtattaatggaccaaagcatgtagtcatgcatattctcatgtgacaagaaagacctggggagctgtatgtgtgtcctcaaacctcttccgacttctcccatgcctttcagtgacatctgtccttgaaattattagtaaagcttgattctgggtaagagttctgatatgtatgattcagatttgacattctgataggacattgagggatttttttttcctgaagttgaattttaacattgccttttgatttttattttaaggaaaggttgaaacttgaacgtaacaaagaatacaatcagtttctcaggggtaaggaagaatccagtgaaaagttcaggcaggtggaaaagagtactgaggtaggttttgcttttgaattaaatctgtactactactaccacaggttgaatattttgtacttgaaaagctttttctattttagacattttacttttttttgtaaatacttgcaaaattaagccaaattaaaccaaacacaggacatttaaatatttagttttggaagttattttatctcatattgaagaacttttaacatttaattggggagatttaattttagagatcagttttgttaagtgattttcatttatttttaaaaatttaaatgagtttttatgatgacaattcctagctatgtttgtttttttcaaaatttaaggatcaattagccggacatggtggcaggtgcctgtaatcccaactacttgggaggctgaggcaggagaatcgcttgaacctgggaggcagaggttgcagtgagccaagattgcctcactgcactccagcctgggtgacagagcgagacctggtctgaaaaaaaaaaaaaaaaaaaaaaaaaaggatgattgatgtatctggggccaaaacatttaccactttctatatcctttgtgttgagaatttaatttgaaatattttgaagtaatatctcctgggataggaatttgcatttagtttatcctctcttttttttttttttttttttgagacggagtcttgctctgtcacccaggctggaatgcagtggcacaatgtcagctcactgcaacctccacttcctggcttcaggcgattctcctgcctcagcctctggagtagctgggattacaggtgcctgccaccacgcctggctaatttttgtatttttagtagagttggggtttcagcatgttggtcaggctggtcttgaactcctgaccttgtgatccgcctgcctcggcctcccaaagtgctgggattacaggcgtgagccaccaggccctgccacagaaaggtaaaattttcttgaaatttttttttctaaaaaaatatatgggtgattaatgttgcctaggctggtcttgaactcccaggctcaagcaatccactggcctccacctagaatttttatgtaataagcttttcataaactgcacaatttgatgggttttagaatatgtaaaccacaatcaagataacgagcgtatcctgtatcccccaaagtggttctgggaccctttggaatctgtgtgtcctcactgtcctccactcattcccatactgtctccagatcttcctgacctgacttctatcaccctagactagtttacatttgatcatttactataaatggatcatacaggatatactagttttggagatatggcttctttcactcggtatgattattttgaggttcatttgtgttgttgaatgtatggatgattcattccgttttgttgcatagtaatgttccattgcatggctgtatcagcttgtttatccattcccctgttgatggacatttgagttatttctggtttttgctattacaagtaaagctcatgtgaacattaatgtaaaaacgtatatatatataaatatatgggtgattaaataaacatcagagttgaaatgatagactaagtataaattgagggtttaattaccttataagagatagtttcttgtcaagttttgtttcttttttcttttttaattgaacagcccaagagtcagagaaataaaaaacctattggtcaagttaagcctgatctaacttcacaaatacagacatcttgtgaaaattcagagggtcctagaaaagatgtcttaactccttcagaggcatatgaagaacttctgaaccaaagacgactagaggaggacagataccgacaactagatgatgaaatcgaattaaggaatagaagaattattaaaaaagcaaatgaagaagtgggcatttccaacctaaaacatcaaaggtttgcaagcaaggctggcattccagatagaagatttcacagatttaatgaggatcgtgtttttgatagacggtatcatagaccagaccaagatcctgaagtaagtgaagaaatggatgagaggtttagatatgaaagtgattttgatagaagactttcgagagtgtatacaaatgacaggtatttacaacttcatttttattttatttgcttaatatagcaaattaattgttaatatttgctgttgttactttttatcattatactagggagaagcagttttgatttatcataattaattctaagatgctgtcagttttaagatgcatcattattttatgtcccactgaggggaaaaagaaaacactcaaggtgggggccctgttgtaaagttggaaaactgaaaggctacaccctttatgtaaaagtatgtgaattggaagtagtcattcccacagaaagggacagagaggaaatgtccacatcccaaccttggcagtgagtagagagtaaagatacaaacaaccttccttgagaatttgaagtgtaaattagtaatgattcaagttcacagtccgaattcatactgccagtagcgtccaaagaaaccttgaggcaagaattcagagttttctcaattcatagtgctcttggatgaggggaaaaataactctgcaataacttgacataaaaccaggtcattggctgttctgacttccaatattaaaatgtggccaggcatggtggctcatgcctgtaatcccagcactttgggaggccgaggcgggcggatcgcgaggtaaggaggttgagaccagcctgaccaacagggtgaaaccctgtctctactaaaaatacaaaaattagccaggcatggaggtgcgcatctgtaatcccagctactcagaaggctggggcaggagaatcacttgaacccgggaggcagaggttgcagtgagcagagatcacgccactgcgctccagcctgggcggtaaggtgagactctgtctccaaaaaaaaaaaaagtgtggctgggggttgtgcctcacgcttgtaatccctgcagtttgggaggccaaggcaggcagatcacttgaggtcaggagtttgagaccaaactgaccaacatggtgaaaccccatctctactaaaaatacaaaaattagccaggcgtggtgggacgtgcctgtaatcccagctactcgggaggctgaggcaggagaatcgcttgaacctgggaggcagaggttgcagtgagccgagattgtgccactgaactccagcctgggcgacagagcgagactctgtctcaacaacaacaataaaaataaatgaataaaataaaacgtgtgaaaaaaggataccttaaaatagatgaaatacaatttattcctgtagtcataagttttttcagtcagattttcagatggttttcagttcctttgaatgtttttgtgacactatttataatttcttaactgctacaatgaggttttattgttgtatttatcatacattgatacttgccatagtttaacctaacttgttttggagataggaatacctcagggtctcatatttgtcattgacttgtttacttgacaagtgttaatacattttgagtagcttttgggacctgctttatttgctagtccaaatagattagtttttaagtattttagaaaatgttttcggggtagtgctgtacattcaatattctaactattaattacaatacaaagcttttacagttctttgtcttctacattctgtagctgttatgtcctcacacaatatttttaatatttaccttgatttaggtaatttgaatgaaggattagaatttggaaatggcaattatagtttctctgatctgaatctaattgtttatacttcagaaaattctccaaatcctataatgttatatttgaaaatgcttatatgtaaggtaattaaaggctgactaaactaaaataattcagttggggaactgcaagtaatctttgactcttggtgataatgtctcctttgtacatgagaacttcttttccctttatggtgtttgtttacgtttagggtgaatgtaatgcatacccttttaagtttggaattttaagaaacataatggttgcttctttgtttttttttaatctattacttttataattatatcctgtgataattttatacatgaactaacaaatgaatatcattctatttgagaactctcatatcttcttatgtatcccaaaataaaatgaactccttcaatataaacttttccaaatactatttaagaatagattaaacatgaggttgagtgagaataattcttgttaaatactttaaagtgtttcttcaatatataaatcatatttttatttcgtttttatataaactctgacatctccaagtgttttttcttatgtgtctctttaacaatttaatttaaaatgggatttctttatttcagatttatagattccttatttccagcaaaaaaaaaaaaaagaccagtcattcagtagtttataaatagactggtttaggagaaatgactgtatttgtgaaaattttgagactaaagaaatgtggaactgagtttcatctcttgctccaagcatttattcttaacatactatgcaatcttgatcagaagttcttgacaaaaaataattataatgtattatgagaagtgcacagttaattttccttcattcttctaagttttctttggtcttttttttttttttcctttcctaaaagtcagcatctggtaaattctagttttggtttataataattttttatttttggtttcaatttttctctaccctataaacgtttacttttttttcatataccataattattaatgaaatatttccccatacttaaatatgggaaagctaaaacttttctcagaaaatgatgttgccttcctaaactcatatcatgaaatcactgacagcattcttaattaacaaggtggttaacactgtaattgatagttgcattctgtgtgtgtatgtgtgttgtttatttatgcatatttaccaattcaagtaaaatttatcatgttttaggagctttctaaagtagaatgtaatagcatgtcttaagatactttgaaatttataagctctatttaaatatagtaatcctagtcttatttattaacttgaactgtagaagttaatattttactttattatcttttactttaaccaatgttaatgaataaaagaagttttacttcttaatacccaaagaaaccaggtacagagtagatggggttgataatagaaaacactgctaccaaagtaaatataaaaattgggaaagaatggaaaacaaagagaaaaatgattgtccacagttaacatctcagagtgtttcattagcttctttttttttttttaaagattaacatgtgttcatttttaggataaacttggcctgtaccctatacctggtttctttgggtattacgatttttacctgatcaactagagttgttgactcttgtcttcaaggaaatagggagaaaaatatttttttcatttaaaataccttttttttttagttagtaggatggtgaaaccattttgcagttattttattccctcaatcatatctgatttgcatttcaaagttatgagttctgtccctttgtgacaaaacccaacatgttaaggtgtggtaagtgaacttatatattaaaagccatagaatatttagatagattttctatggctataccaccctggaatgtgcctgatcttgtttgatgttggaaactaagtaggcttggacctggttagtaatttggtgggagagtatttagatagattacttttgggtcacaaggatagtcttaatctggtactctcacagtgaaacataaaggggttccagggacaaactgaacctaaacagaactcctgaactttgattagaatcaaatggttcttagacatttagtgagtgcattacttttggatattatcatctgtctgttttcctttaatgttgagatgattgaatagagatgtagccgtggtaaaaccactgctgattcttactagttgctttcttcagagaggactttttttgttcagaaaaggttacaacaataaattgtaagaccataaaagctgttttaagtgaactaacagagctagttctgggtgattaaatgctaaatttattagaaatataaaggccaatttagtaaatgaaggaaatgccataaaaattgtagggatattttaatagagaataaggtggctaacttaccaaactatagtttgtcttttcagcttaatttcccttcaaggtttcttttttttaggtcttacattggtaatttaaaaaaaattataaaatctgtatttgtaaacagtaattcttccttgacttaaaaaagataaacaaatcatatgtcatttcataaaattgaatagtatccctaagattttattatctttttagtgaaatgcttatttctgctcttttttagcctcttaaacatttttcggtcttgatcttataattattggtgacagagtggacttttataatcttgttaatgatttttttcttcaatgaaaggtataccttagaacatctttcatatgtgctgctcactaggaaatcttttgattttgctgtagattttagcaaagagaccttaaccttatacataaataaaatcatttcttaaattaatttaggatgaactttgaaaatgacctcttgtgtttatggtgtttgctttactatctatatacactgaagagactgtaaaagattttttagtgtggataccttgggtgcagtggtggtataaagataagctagaattattaatctaaatattatcttcagaaaacttaactaataattaaggaagccacaagccctatgttaattttagaaaaagcttttgtatatttaactggcctttaattctgggaccccaagttatgcttttaagaatttgtaactttaaatttctatttaatttttttcttttttttttgagacagggtcttactctgttgctcaggctggagtgcagtggtacagtcttggctcactgcaacctctgccttccaggctcaaacagtcctcccactttagcctcccaagtagctgggactataggcatgagccgccgtgcccggcctctgttaaaaaaatttgtaataaagatttctttattattaaagaatatatatatatatataaataaagattatttttatatgtaatttttttttggcctagatacctctttactacaccagtgaatttactttttgtgttgtgtcatgggttctcaagaaaacctctaggttgggtgatttgctaggaggatccataaggactttgggtatagttgtagtcacagttataatttattacagcaaaatgatacaatgcaaaatcagcaaaggtaaaaggcacatggaacaaagtttgaaggaaaccaggcacaagcttccaaggggtctctcccagtggtgtcacacaggagatgcttaattcctccagcattgaattgtaacaatataaggaaatgtctgccaggaaagcgattagacacttggtgcccaaggtttttattgtgggatggttacgtaggcaccctgtacctggcatgtaccaaaattccagacttcctgaagaaaagcaaatgtttagcataaactatagtttgtgtaaacagtttaagcacagtgagctgctcttatcagttctgccagtggttgtaactctcccaaaatctatattcccaggtgccagccaagggtcaactgtacagtcaggattttctgaggataggcagtctcaggcctgctctgttaacgcttttctgcattatatataaatatccagtataattaaatctggttgcctggcagtgttaattacaaatttgaatttgagtttgtatttacctgtttgttaagtggtagaagtagggaatgacactaaactgatgtgtcattcacacatcagaatgtgtgtatgtgatctgtgatcgattaaaaaatggaagccattcatgcgttatgccatgtcatagttactaagattaaaattccaaatagtgttttctccacagatgatattgacagtggcttgtatgatggaaacaagggaagaaagaattttatatgctggttctgtggagagtgagaagtttctttttttttccggaaaattgccatttttcttaatccaataatgaaattcacctaaaatactgaatactgctttaacaaccatatttctttgtaatagtcctcttgagaaagacaatatagttgggtaactcaacagccatgtaaagaaactttgaaatgcttatgaaatgctgattttcacggatgccaataagtgttggtgtaaaaagtcatgttggttttatggtatgagaaattaagctaaaaataaaatcagtgtttgccaaatggaaaaaagattgattgaaaaacattttttcattattattttccaaaaaggtttttaaagaagaaaacagaaaacatgctaatctttctttttgttgtttatgacctcgtaagtaaagttagctaatcattttctctgtttatattttccattcacctatcagtaacatttattctttcctgtgatttacagtgttagcaaatgtcatggtttgttatattttatttaatttattgataagactgctgctgtatttttaagttaaaaaggttatgacaggtcgcggtggctcatgcttgtaatcccagcactttgggaggccaaggcgggagatcacaaggttaggagatcgagactatcctggccaacatggtgaaaccctgtctctactaaaatacaaaaaattagccaggtatggtggtgcgcgcctatagtcccagctacttgggaggctgaggcaggggaatcacttgaacccaggaggtggaggttgcagtgagccgagattgtgccactgcactccagcctggcgacacagcaagactccgtctcaaaaaaaaagaaggttatacgtacaatgaaataattcacagactctatgaattttgatttaaaaaatgttctcattttgaattttgactataatctttgtgagtgcagggactgtgtccgaatacccagtaggtgttcagttattcacttttaaattgaatgataaaaaagtgttagtatatttgtagttttaaaaataaaaatttatagcaagtacattaaaataacataatctttttagaaaagattattacgtttaaactcttagtgtctcattaaccagcagatcatacaaattctatttaattttataatgcatttatagtaaaacttcattataacactttgttccttttaatgttgccaacatcaaatgtaaaaacaccaaactgttataagaaggtccactgtatgtggcacatgctttataagctaatgtgtttttaaggatgcacaggaacaaacgagggaatatgcctcctatggaacatgatggggatgttatagaacagtcaaacataagaatttcatctgctgaaaataaaaggtacagtatgtaatataaattctctgctttagtcattacattgtgaaacagaatgtgcctaaaactggctaactgaaaaagtagaaagatacagtaaattaacagccttccttcttagtgagaagtgaattaaaggaaaagaaaggtggggaggtagtactaaatgaaaatcgatagtactttacagcattcttttaaagaacaagttttggttataaagtgtgccaaggtgttctgaagaagtccctatcattacaaagtatgtaaatttgtttgaaataataaaagaaataagtataatttaatggactaaaaatcaacttaaaatatcttagagtcatggtgatgcaacttgactggaaataaattgaaaatgtggccgggcctggtggctcatgcctgtaatcccagcattttgggaagccgatgcaggcggatcacttgaggtcaggagttcaagaccagcctggtctggccaacatggtgaaacccagtctctactgaaaatacaaaaaaaaaaaagaaaaagaaaagaaaaaattagccaggcgtggcaatccctgtaatccctggtaatccctgtaatcccagctactcgggaggctgaggcaggagaatggcgtgaacccaggaggcggagcttgcagtgagccgagatcgcaccactgcactccagtctgggcaacagagcaagactccctctcaaaaaaaaaaaaaaaaaaaaaaaattggaaatgttcctgtggtgtgaatttttctttcaaaagtttatttttgattttcagtttatcaagtagatagcttttatgcctactttgtaaaattagtgctcatatatttctgtcatgttgaaaggaaattgtatgtattttatatttatgttctctttctacttacagttttttatcattttggtggcattcctgtgtcgtacataaggataaatgattttgaatctatagtatacagtgaagataatgtcatatgtcaagaaagatgtctatttttttctaagaaaagtaatatataaacactgcttgcaataagataatttgctgttttgttctaattgattaagtttcctttgaggatttttttccccttgtttctgtcttccaagaaaggtttttttttttttttcttttttgagacagagtctcgctttgttgtccatgctggagtgcagtgacatattatagctcactgaaaccttgactttacaggctcaagtgaccctcccaccacagcctctggagtagttgggactacaggcatgtgccactatgcctggctagttttttaaaaaatttttttgtagagtcaggatctctgttgtccaggctggtcttgaactcccaaactcatggtgggattacaggcatgagccattgcgcatggccaggaaggagtgtttttagggatgatcttttctaagtatgtgcatagatcactctttcttttcctttttttttattttttatttacgtgcactttttttctttttctttttcttcttttttgagacagagtctcactctgtcacccagactggagtgcagcggcacgatctcagctcactgcaatctctgcctcctgggttcaagtgattctcctgcctcggcctcccgagtagctgggattagaggcgtgtgtcaccacgcctggctaatttttttgtatttttagtagtgatgggatttcaccatgttagccaggctggtctcgaactcctgacctcaggtaattcgcccgccttggcctcccaaaatgctgggattacaggcatgagccactgctcccggtcttacatgcacatatatatatatatatattttttttttttttttttttttttttactggggtagctgtttttttatgaaaaaggatttttttttttttttttttcgagacagagtcttgttctgtcacccgggctggagtacagtggcaggatcttggctcactgtaccctctgccttccaggttcaagtgattctcctacctctgcctcccaagtagctgggattataggcgtgtgccaccatgtccagctaatttctgtatttttagtagagatgaggttttactgtgatagccaggctggtctcaagctccagacctcaagcgatctgcctgccttggcctcccagggtgctgtaatacaggtgttagccaccacgcccagcctgaaaaagattttatttgagaacctatacagccagtgaagcaagctgaatgtttttgtttttgtttttgtttttgatatgtgtctcactcttgttgcccaggctggagcacaatgatgctatcttggctcattgcaacctctgcttcctggtttcaagtgattctcctgtgtcagcctcctgagtagctgggattacaggcctccaccactgcactcagctaatttttttgtattttttattagagacggggtttcaccatattggccaggctggtttccaactcctgacctcaggcaatccacccacgtaggcctcccaaagtgctggaattacaggtgtgagccaccatgcctggccaaattattattaattttttaagcctgaatacattggagttgcactgtataaagagatagaatgccatgattttaccttaaccttaaaaatttgtaaatattttaatgtccatagtactttgaaaggctaataattcatagctacattttactctgaaattttgcttcctgaaaattatctggattttaatttactctttttctctgtctttttttctttagtgctccagacaatgaaacatccaaatctgctaatcaagatacctgtagtccttttgcagggatgctctttggtaggcacaaaacttccaactagttgcgcttgtatagagtgtcttataatccttttttaagtgagaactcagtgttgtaattaatactatttttactaatagtagaaaatatttgtaagtgcttactttacactaggtactattctaatcatttaacatatatagctctgtataattttattttgtatttttaaaattttatgtatcttcttatttttactcatgatgttcatgaacacatctatgtataattttaaagctaaattatttagtgatgtgctttccgtaggtgataatgaaattattagtttcagtaatcttttttttttgcaaaatggattgatcattaccaatcagtaatgagcttttaattccatattttattagcactctgttgcagtgtggctgtttcttttctgcttttaaaaagtattttgttttatttatgatagttttttccttaattcttctttctagtttctttagctagtacaaaactgctgtgtattttagtttcttttctccaaattaaacctttctttcctttgttcttttcatgtagtttctgagaaggtgttttgttcaaatcgtgatgatggtctaaattttctatttattggaagtcaaggtcattgctgaatataagcttgttttgctatattacacttggcaaaatttaataccagaaactgtgaggagagacttgtttctggtttatacctttaaatatgtaatagaaaagaggtctttttgtgaaaactgttagaaaaaaatgaactgaaatttggttttagtaaagtatatgaagaaattaacactctagattcattcaacgtaaaaacagtcagtaaattaaatactggtttagagacatattattgcattatattgtcaggtttttgttcccttgtgaatggctattgtgagaaaaatggcatgccacctagaattctagtgtaatatctgtaggtgaaaattgaccagtttaatcagtaccatgtaaaggctatattctttttgttttgtttttatttatttattttattttaaatggctatattcttatgttttgttttttttttttaattttgaaattgagtttcgctctatcactgaggctggagtgcaggggcacgatcttggctcactgcaacctccacctcctgggttcaagcgattcttgtgcctcagtctcctgagtagttggaattacaggcatgtgccaccatgcctggctaatttttgtatttttagttgagacggggtttcaccatgttggccaggctggtctcaaactcctgacctcaagtgatgtgcctgccttggcctcccaaagtgctgggattataggcgtgagccactgttcccggccgatgtagtttataaaacatggtaaaataagagaaatgtctttctgagctgagagcctactgataaataattttatcaataaaaggattattgtaccctgaccttttaaagatgaatggcatgagtttatcactaatgcaatccaggatttatagatgaatatttggtaagacaatggactctaacatttgaaactgttaaagtcatttaattcaatgacttacctcctggttgatcttttccccccaaaactatgtttgtacatacctataggaaacttacgatttccagagacaggacattccatcttcagatggctgtgattgttatgatactcttatttcaattgaactgaaatttatcttcctataattttgccccaaggatgtcacttgggaccttttgctttatttaaaaagtgagatcattgatttagtttagagctaaataggaaatgtattgtggggtttataagagaaccataggtaatttagaagtatgttttaaaatttccaagcatttggggattttccttctatcttttttgttattgactgctcgtttaagcctcttatgatccaagaatataattagattaatttcagttatttcaagtttgttaatttctttgacaaagttttttttttttttttttgtttgggtggctcagaatatagtctgtcttggtgagtgtttagtatgtacttgaaagaatgtgcatggtgcagttgttgagtatagtagttgataaatgtcatttaaggttgggtgtggtggctcacacctgtaatcccagcatcttaggaggctgaagcaggaggatcacttgattgagcccaagagtttgagagcaacctgggcaacatagggagaccatgtctctacaaaaagtaaaaaataaaaaaattaactgggtgtggtggcatgcacctgtagtcctagccacttaggaggcagaagtaggaggattgcttaagcctgggaggttgaggctgcagtgagccgtgattgtgccactgtactccaacttgggtgacagagtaagaccctgtgtcaaaaaaaaaaaaaaagagttaagtcaagttggttcatcgtatgttcatgtcttgtatatccttaatgaattttatctgcttctattgattgcttagagagaagtgttgaattctctatcttgtccttcgtgtgaggcctggagtgccagagagatttttcttagtgttcctgcactttccccagttttcagcaagaccttcatgtccttgacagtgagggcatctctccctccacactttccccttctccgcagtatattgctgttgattgttacttgatgctggactggtcctgtgcatctgggcctcagggatgggtctttctcaacattactgtccttgcccaggatgatagctaaactcttctttgtgtctgaggagggttttgcatcagatttttcaccagatttttttgcccttcccctaacagtaacaagcctttgctatataagagtgtgggatactgggtccaagctgattttctgtcccttcaccaatagcttgcagcttttgctttgtatagtctgctttgaaagtctggaatgtgggccatgttttgtgcctgaatgtcacaaaagtatctctttcaggtcttctgtattgtttgatcccagtttttctagtgaacatttgaaaattgcattcaggcagcaactccagtgggtcaagtctgggcatggtttactgaacagatcctttgttaatggtctcaaaaggctataatcaaggtatccgccaggctgccttttaaccggaggcttgagtggggcagaatcttcctctaagctaattcaggttgttggcagaattcatttctttgtggctgtatgactgagggccctggcttcttactggatacccactggaggctgcccacagttcctagtggccatctgctgttcttgtcatgtgggcttcctcaccatggttactcactttatgccagcaagaagaatctctaaattcagggagggcccagtccttcttctaagggctttcacctgattatatcaggtccacctaagataatctctcttttaattacttcaaaattagttgatttggtaccttagttacatctgcaaatatttttccatccttccatattctattgtatacaagtaagttacaggtcctacccattctcaaggggagggaattatacagggattcagctgggagcagggaacatagtagccatctttaaaaaattttgcctaccattgtcgcatttctctgttactaatgttgcaatctcacacatgctccttaatgtagcagtttctcattgtccgaactagtaccccaggttctttgtcccatatccgagaaaattaagaaacatagacacaaaggtggggttggagtgaaagtttaataagtgaaagaaaaaaagctctctgcaggaaagaggggagtccaagtggatggcggggttacagctgaattaaaaagcttttgtaagaaactcttcatctctgtaggagtttgagtaacttattttatcagtaaagctgtctgtgctactcccgttatcttatacagctgtgggtacgtctttaggcaagcagaaatcggcttgtcttgtttgtataactgtgggtttgttttagataagccacccccgccccatccccatgcaagttcccaccatgaatatgcctaaactggggtggaaactttttcctgggagttcactaattagacaaagaacaaagagctctgtgctagatcctgtttgcttatctgtccaggtgcagtctgaggttttttttttttccccaggttgttttatttttgcctgttgctgtgacttttcaagcaggctgcttctgcagtctgaattttttcccaaatgatttttcctttccttctccctcactaaagaccaacttgatctaagttcagttttaagcttagctaaggacctctagagtagctttcctttcagagaatagtttagtcttactactacagagtgacctttctgacatgttccctgagagaccaccaagaacatagctggctggagcttgaattttgctcctttgtttcaggtctgagaattgttcagtttatatccttcttagtttgttgccaggccaaatggaatttcactctgtgaatgcacaaactagcacactgcaaagtctgaagggacctcctgtggatttctggagctctttttatgcttcctattggatctttgctccataacttctagccattttagccttcctgaattttgctctttatctactcaatttagctcagtttcctggccctctttgggttctctttacctctttacctgtatctgtggtctggaaatttcatttgggcagaaattgggtgattatagggctcacctcaattacaattctgcactacctattgtccagtatctggaaaacaattattttgtgtattttgcgcagttttctaatgtttctgttgttgttgttgttgttgttgtttatttgttttttaaactgtgaggttaagtcttgtgcttggttattctatcatggtcagaagtgaaatgggaatatttacttttattataaaacacagttattaaccttaatgtaatttatgttacctctacgggagcttcacttttgctgacatctatgcttaatggacaaactgagatgctgtgtgcccactgatggttggagaccaataatgaaggcagtacagaaattgctgtttcaattgcattcttgataccctgtgatttttgtagtgttccagatcttgcatatttagattaagaggttattttgtggcattaacatatgcaataataataatcttctctgcattcaaaatttttgattaactggatttttgtataaggaataccaaggtgagaggtttgtattttttcctgtagaattgagttttttgagcagagtgccagtttgattagtgtattttatgacagttaatattacatagtgtactggatctattggagcagggagaagggagttgggaagactggtaattagttaggaagttattgctgcaatccaggttagatgtagagaggacttatccaaggttaatggctctgagaatagaaaggagggggcctcatatgaagtgaatagaagaggacaagcagtccaagttatagtgagattttgaggctccagtattgggccattagtagaaaatgaagaggggcagttggttttgagatgctcgtttgcgattgaaatgttaaatttgtaagacttatggaagatattaatggaaatattatttagattgttagaaaaatggggttgggataagaacattctgttatttaggaaaatttttgactaatggtagaggcatgggcatgattactgtatcttgtgtttgacgcatagtaggtacccattaattacaaaagaaattgaagaaggactgattcatgtgatttttttccttctgtatttcttgcatattagtaattatatgatacaattaagatggagtttttaaggacttaactttctaattgcatacgatgcttaagagttaagattgtatttttctcataccactatctaggaggtgaagatcgagaacttattcagagaaggaaagagaaatacagactagaactgttggaacaaatggctgagcaacagaggaacaagagacggtaatgaaaggtttgcatttaaaagagatattttgagtttaaagtgcatttgtgtaaaatgacatggttaaataaggggttgtcgttctaatatgatgtttgatttgtaaatcacttatattttcatctctacatgctaaatcaacaaggaaaataaatactaagagagttttttttttttttttttggtcataagtagcaagtgagagtatttatatattctgtaatagcccttttacttccctcattgatttcttcagtttttgatttaaggtagcatttaatgttatagatatgcccattggattatcccatatatagtaacaaatataaaagtattttttgccatatgaaatggtatgcacacacacatacatgcaaaaaaaattgtatcctataaatttaacatttccatcccaaatgagcatctcaaaaccaactgtccctcttcattttctattaatagcccaataatggagcctcaaaatctcactatgacttggattccttgtcctctcgtattcacttcatacgaggccccctccttctttctattctcagagccattaatgttggataagtcctctctacgtctgacctggattgcagcaatagctttctaactaataactagtcttcccaactcccttctccctgctccagtagatccagcacactgtgtaatattaactgtcaaaaaatacactaatcaaactggcaccctgctcaaaaatcttcagtggcttcctcaattctacaggaatggtaaatcacaagtatttatgttgtacataggtatcattgtttgtagtctttcttgttgaaatacctatgagatattatagtttaaaattaggaatagagtttaaaattagaaattttaaatatagcttaaaattagaaattacagtggatcacgcctgtaatcccagcactttcggaggccgaggtgggtggatcacaaggtcaggagatcgagaccatcctggctaacacggtgaaaccccgtctctactaaaaatacaaaaaattagccgggcgtggtggcacatgcttgtggtcccagctattcgggaggctgaggcaggagaattgcttgaacctgggaggcggagtttgcagtgagctgagataacgccagtgcattccagcctgggcgacagggtgagactcttgactaaacaacaacaaaaacaacaacaacaaaattaggaatagagatctcgttttgagagaatttgagacctgttatctcttagtttttgccttttttccctctatctcagaggaagccaatatctactgtttgatgttagctatctttaacatcatttttaaaaaaaccctattattaggaagtatggtagatatatttaaatttttacccttctttttgctaactgaaaatatatgtgtaccctaaaagaggtttttttgttttacaaggtaaatattttatttttgtgttttattttgtgtgaattagtctttgaaatactctaggcattggcttagagatacatagtccaagttagttacatgtgaattctagtttactttgtatcaagtaaaaaaatttggctttcagtattatttaaggctgtaatgtcagttaaaggaattatttgtttttgtagatgtagtgcatagactttgtgtataagcttctttcagtgatgatttataattttgatagtttactatatctttttaatatgtaaaactttaattttgtttagagaaaaagatttagaactcagggttgcagcgtctggagcacaagaccctgagaaatcggtaagggtttctggcatcttttaatgtttaatctttcatcaaatgatcctcaaatgtggtggcaggtggggatagagaatattgggagaaaaagagagtagaccaatttgaacagtaataaaattaactaaattcagttctcataaagtgtaaattctcttaactgttatttccttgaggtaatttttcctttttcatttgtgtgtcatttttttaaagtttaaattagttctctctgctttattcacatgtactattccatgggaaagttatctgggttaaatttacaattgatgttaatatttttcttgaatacatcttgatcacttacttttcttacattggagtgatttctgagaaaactgacgactttatttttaaagcgttttagtaattgttacttattgtaacattagagagataataatcttatttttactttaattttgcaattctcatcattaagtggaatgaattactcacatcattgcagttaagtaaggaggaggtaatttattgtttttaccacaatttattttttctgtagttggttatgtaatatttatttctaatacaagtcttgtttcatctttgaatgatgattaagacctttaatttcattaaaaagctcattcttaaaaaggatgcagcaacttaaaattatttacctgtaggcaacttttgatttgcttttacttatgctgagaatatatcctgtgggttatctatttggaaaagtttcatattgcaccagcatcactcgcagtatgcttctgggttaacctgataaatcattcctgataagataaccatggtaggaaaaaaagaagataaatttcaaagctaaatatattttcctttatgaatcaaaagtttccttttaagaggtgagctttttaatgtaatatgttggcatgttaaattttgtatttatggttacactagtgtgtgacagaccttatttatctttgaattgaagctcctatacagtgtcaagttgatttatgagaataaataagtaattggaggcaacagttacgcctttacttttgggtttacttttgatgtgcaaatcttagaaaagggcacataagtgatgttctaaagtagagattagcaaagtgtggcctgtgaccaaatttgtttgctacctgttttcataaaaaaaagttttattgcagcacagccttgttcattccttgacatactgtttgtggctgctttagcaccatagctgagtctgctcattatgaagagactatgtagtcttgcaaatcttaatctatttactgtctagccctttacagaaagcatttgctgaccctgttttacagaatactataacagaaatggcaattagagaagtagcacggtgtcctagtacataaaaagaatactacaggtatatttaaaattaatatctgactctagtctttgcttaattatttactaatagtgagaccttaggtgatatattacttctcagagagcctcaattacccatttataaaataagcattagatattcagagtctggctgggcacagaagctcacacctgtaattccagcactctgggaggccgaggtggtcggatcacttgaggccaggagttcaagaccagccttgccaacgtggcgaaacccccttctctacaaaaattagctgtgcgtggtggcaggtgcctgtaaccccagctactctgaggctgaggcaggagaattgcttgaattcgggaagtggaagttgttgtgacctgagatcatgccactgcattccagcctgggcgacacagtgagactctgcctcaaaaataaataaataaataaataagatagatagatagatattcagagtcttttatagctgtaaaattctgttattcagtaaataaataaataaaaatagatattcagagtcttttatagctgtaaaattctgttattctgtgactgtcttaagtgcctgctgggataggaggtcttttgaggtcccttccacctttaaacttatgattatatgtaacaaacagattttttttctttattttagcctgatagactaaagcagtttagtgtggcaccaagacactttgaagagatgataccacctgaaagacccagaatagctttccagacacctctccctcctttatctgccccatctgtcccacccatcccatcagttcatcctgttccttctcaaaatgaagatttgcgcagtggactcagcagcgcccttggtgaaatggtgtctcccaggtgcttgtttaaatgttttgtgtttgggaattaggtaaggtattgctatattttatgtttagaaggatatactgaagcggatgacgttattcttcagagattttgtacagttaacagttttgtgaaataaattctcttgaaatttgtttttttctctgctattataaaaaaagggaaattcttaaaacattttattgtttaaagatgattttgtatctttagaatgaattactaagtacattttagtatttatttagttttgggttgtattttgggatgtttttgatatcttttaacatataaaagttgtacatttttttcaattttgttctttccacttggcaaacattgaattcttcaatttgtgcagaaaaagtttctaatgtggctcttttacacatataattttattttagcttctgtttcttcagctcattctctgtgattacttatgggctgtgtaactcaaatacctgaaataaaaagtgttgagattataaaacctgtaatttaagtattggggtaaagatttgatttctgtaggtgaaaggcatcacactataatagaatatacataaagaaaatcctgttgttaacactgatattttctgggctatactttcttctttgtagggcctgggcttattttttgttcactgttagtgtattaattataaaatatatttaaatttagaggtgtttttcttaacttttttgaacattgatattttctggactgtattatttcagtagaagttggtcttttagttactaaccaactgtggaagtgtgtttactatacttatcaggggctttgtgttttttatctgatggcttcctgactcaggaataggaggcattggaattaacagagcattttatggtggtctcagcattgaattagggattgaaatggttggctttcctatctggattttgggcaaaccacacctttgttgaacttcaattttctcatttgtaaaagtggagtagtattatatttttttcatgtttacaattacagggttgtgaggattagcttgtataaatctctatgaaattcgatttaatgatgacagctccctttcataacagttatttgacatttttgttgatgtatttttgttgtgaggatggtataaggtttagacacattgagtggctagtaaatgtgaaagatattccctactgaagagaacttccgtaccttcttagttctttggaattattttgaagtatatgacaagggagaacctgttaagatacatacaacagtgagaacattctagaatgccgccatctctttctattcatttaaaggaatttgcctttgccatttttactactgaaaaatattgcattggtagcaatacagagatatttcctaatcagtaatgaagtgctaatgtagaggtttttagaagttttaaatttatgaaatacttaaagattgtgtcaatactttactgttggtatttaagttgcttttattttactattaagaaatacactcgtttcctcagtcagactgaaccatttgtactcacactgttttgtagctctttgccttctctttctggattgtccttcctctaacacacacaagctcactccagtagcatggcttaagcgttgcctcttctggaaagccttacatgtgctttctttctctccctcatgtgatttaaatgtcccttctcctgtacctatagcaatctgcattttttgggctatattgctatttagtttaatttgcttgtactattattaattatttaatttgcttgtacttgactgtagttgtttattttcatgttactcctgagggacagggaccatgtttgtctttatttgatactggcacatagtgcctattggatattaattgattgaatattaacccaggtttttatcttacataaatgtacctgaaattgtgaaatcctatgtaatagtatttgctttttaagtcataatttttggtgaatgattggagcaagatggtgacattttctaaagtagtgataggattttcagtactgtttttgcaaaagagtaacatcttgattttttaaaaaattgcaatgaaatatgagaggaatttttcatctttcttttcatacaggattgcacctctgcctccacctcccctactaccacctttggctactaactatcgaactccttatgatgatgcatactatttttatgggtccaggaatactttcgatcccagtcttgcttattgtaagttatctatagggtaagcattttctccccgcttggctcaataaggaaaattgtttttttgtgtaaacaaaaaatatctaaatgagaaaagcacaactttgcttaattcagatgttatatattgatttaataaatgccctattttaaagcccagttatattttatagttatttccttttcatcttggtttaagaaataacgattgtgttttcttatgttgttctttgctaacttctagcccagaaggaaatattgatggttttctctatgtaacattttgattatgcacctttttctggaggaataagtaaaatattattaaatgattattctaaataaactttttttgtttttttgttttttctttaagatggttcaggaatgatgggcgtacagcctgcagcttatgttagtgctcctgtcacccaccaactagcacaacctgttgtgtaagttattagttaaaagaataattttttccccacttttattttgttaagatacacataacctaaaagccaccatcctaacattttagagtatactatttagtggtatttaatattttcataatgtgcaaccatcaccacaatccatcttcagaactcttttcatcttgtaaactgaaactctatacccattaaataataatggtgtacctcctcattcccctacctccgttctctggcaaccaccattctatgtctctgattttgactactccatgtacctcatatgaatagaatcatacaatgtttatctttttgtgactggcttatttcactttgcataatgtcctcaaggttcatccgtcttttagcatatttcagagtttctttcctttttaaggctgaattataatccattgtaattgtatacaacattttacttatctaaaatctatccatttatccattagtggacactttggattgcttccacattttggctatttgtgaataatgctgctgtgaacatgagtttacaaatatctctttgaaatcttgttttcaatttttttgggtctgtacccagagctggaattgctgggtcatatggtaattctatgtttaattttttgaagaactgccatactgttgtccacaactgctatactttttaatattctcaccagtagggcacaagggttccaatttctccacgtctttgccaatacttattttctttttcttttttttatagtaaccattctaatgagtgtaagatggtatttcattgtaggtttaatttgcatttccctaattattagtgaggttgagcatcttttcctatgcttcttggccatttgtatatcatctttggagaattgtctttccaagtactttcccatttttgaattaggttgtttgttttttgttgttgagttttcagagtcctccatatatcctggttattaattctgtatcaggtatttgatttgaaaatatttgctcccattctgtcttgatattgccttttgatgcacaaaattcttaaattttcataaagtccaatttgtctttttattattgttgcctgtgcctttggtgtcatgtctgagaaatcattgccaaatccaacatcctgaagcttttgccctatattttcttgtgagagttttataattttaggtcttatgttgagctgtttgagtcattttgagttaatttttttatggtattgcataagggtttgtcttagttattttgtatgtggatattcagttttcttagcaccatttgttggaaagactatcctttctgcattgagagatattggcattcttgttgaaaatcatttgaccaaatatacgagggtttatttttgggctatttatccttttcccttggtgtgtatgtcttcctttatcccagtaccttagtgttttgattactgttgctttgaatgttttgaaatcagaaaatgtgagtgctacagctttgttctttttcaaaattgttttggctattttggatccctggagattccatatgaattatgggatgagtttttctatttctgcaaaaaagtcattgtgattttggtagtgagtagtgagtgtattgaatctttgggtagttttgacattttaacagtgtcatgtcttctgatccatgaacataagatatatgtccatttatttatgtcttttaaaatttctttcagcaatatttcatagttttcattgtataggtataggtctttcacttctttagttaattcttaagtattttattcttttggatgctttcataaatggaattcctttcataattttcttttcaaattgttcattgttagtgtatagaaatgcagctgatttttgggtgttgatttgtatcctgttactttactgaattcatttattttaataattttgttgtagaatctaggattttctgcaaataagatgataacatctgtgaacagagataattttactttttctttctgatatgaatactttttatttatttttctttctttctttttttttttgagacagagtctcaccctgtcacccaggctggagtacaatgttgtgaacttggctcactgcaacctccgcctcctgagttcaagtgattcttctggctcagcctcctgagaaactgggattaaaggcgtgcaccactatgcccggctaagtttttgtatctttagtagagacagggtttcaccatgttggccaggctggtctcgaactcctgaccttgtgatctgcctgcctcagcctcccaaagtcctgggattacaggtgtgagccactgcgcctggccccttatttttctttcttaattactttcttaattaccctgactagagcttccagtactatgtttaatagaaatggctaaagcgggcatccctgccttgttcctgatcttagaggaaaagctttcagtctttcactgttgtgtatgatgtttgctgtaggtttttcatatatatagcttttattatgttgaggtaatttcattctattcctagtttgttgagttttaacgatgcaagtgttaaattttgtcaaatgctttttctgtattgtgatgatcatgtttttttcccctttattcttttaatgtggtatattgattgatttttttatgtttaaccataaccatccttgttttccaggaataaattccacttagtcatggtgtataatcattttaatatgctgctggatttggtttgctagtattttgttaaggagttttgcatcagtgttcatatgtgatcttgttgtagtttccttatactgtctagctttggtataagcataatgttgggcttatagaaggaattaggaagtgttccctcctcttgaactttttgaaaaagtttgaggatttatattagttcttctttaaatgtttgatagaattcaccagtgaaaccataaggtacagggcttttctttgttgggtgattattgattagagattcagtctctttagtaactagttatataggtctattcagattttctttttcttcatgatttagtcttgataggtttttatttctaggaatttgtccatctcatctaggttatccgatttgttggcatataattgttgataatattcccttacagtcctttcttatttttaaaagattaatagtgatgcccctttgtgaatttctgattatattttattatttatttatttatttatttttctgacctcattcttcccatcacagaattcctgattttaatagaagattcagagccttcttgttggtcagtgtagctaagcatttgtcaatcttgttgatcttttcaaataacaaactattggtttggttgattttttttttttctgtcgttattctagtttccatttcattgatttctgctgtaatcttttaaatttcctcccttctgcttactttgggttccgtttgctctcatttttctggtttctagagatgaaaatctagattattgatttggtatctttccctttgtttggtatgtatacttacaactataagctttcctcttagtactgttttagctacatcccttaagttttggtatgttgtcttttcactttcattgctctcaaaatattttccaatttttaaaaatttcttcatcaacctgttggttattttgaaatgtgttgtttactttccacataattgtgaatttcccaaatatccttctgttactcatgtctaatataattacattgcagtaggagaacaaactttgtatgatttcagtcagtcctttttaatttattgaggcttattttaagacctaacatggtctgtcctagagaatgttccacatgcatttgagaagaatgtgtattgtcctgttggtgagtgtattattctataagtgtctcttagatctagttggcttatagtgttatttcttttatttccttgatcttctgtgtagttgttctattattagaagtgaagtatttaatctccaactgttactttgtgtgtgtgtgttctgatatacagtcttgctctgtgtgtgtgtgtgtgtgtgtttgtgtgtgtgtgtgttctgatatacagtcttgctctgtcacccaagctggaatacagttgtgagaccatagtttgctgtagcctcaacctcctgggctcaagcaatcctcctaccccagcctcctgagcagctaggactacagccgtgtgccactgcacctgactgatttgtttattttttgtggaaacagggtctccctgtgttgcccagtgtgatcttgaactcctggcctcaagcgatcctcttgcctcagcctcccaaagtacgaggaatatagccatgagccaccacacccggactccaactattattcttgacttgtgtattattctcttcaattctgtcagtttttgtttcgtttcttaggtctctctttatatgcatatgtttataattgtgtcttactgaagatttgacccttttattagtgtcagagattcttctgtgtctctgctaacaatttttgtcataaagtgcttttagttctaatataaatgttgctgttctggttctcttttagtactgtttgcatggtgtatgatttttcgtatttactctcaatttatttgtctttgaatctaaaagatgtctctatgtagacagaatgcagttacttcctggtttttatgtttgccattttgcaatttttttctatatgtcttatgtctttttattcctctaatcctcctttattaccttctttttcttcttcgtttttttttttttttaagagatagggtctcattctctttcccaagctggagtgcagtggtgtgatcacagagctcactgcagcctcaaactcctgggctcaagcaatccttccactccaatctctcaaggagctggaactacaggcacatgccaccacgcctggctaaatatttgtattttttgtagagatagggttttgccatgtttcccaggctggtctcaaacttctggctcaagtgatcccagccccacaaagtgctgggattacgggcatgagccaccgcggccaggctcttttttttttttttaagacgcagtctcgctgttgcccaggctggagtgcagtggtgcgatctcggctcattgcaagccccaccttctgggttcatgtcattctcctgcctcagcctcccgagtagctgggactacaggcgcccgccaccacgcctggctaattttttgtatttttagtagagacggggtttcaccgcgttagccaggatggtctcgatctcctgacctcatgatccacccgccttggcctcccaaagtgctgggattacaggcatgagccaccgcacccggcctattagtttcttttatgttaaatatttaatagcattcaattttgatttttttgttgccttttgcataattttgagtttttttgtggtttccctacagattaaaattgatatcttaatttaaaataaatgagtttagattaagggcaacttaatttcaatggtacacaaaccttttctctaatataaggtcattccttttcctctacttgatgctattattgtcatacaaatcacactattatacatttaagtctctcaacacagttttataattattgccttatgcaattgtcttttatttatttataaatttattttttgagatagggtcttactctgttgcacaggttggagtgcagtggcatgatcatggctcactgcaagcttgaactcctgggctcaaacagtcttcccgccttagcctcctgagtagctgggactacaggtgcataccaccaatgctcagctaattaaaaaaattttttgttttgttttgttttggagataggatctcactctgtcacccaggctggagtgcagtggtatgatcatagctcactgcagtgtcaaactcctggatttaagggatcctcccacctcaggctcccaagtagctactactcccactacgcctagctaattttttatttttttaattttttgtagagacaggcgtctctctgtgtatcccaggctgctcatgaactcctggcctcaaaccaccttggtctcccaaagtgctgggattatagatgtgagccattgtgcccatccatagttgtcttttaagtcaaatagagaagaataaagttacaaacgtctttacatttgtaatatcttttatatttgcccatgtaattatctttactggcgttctttatttgtttgtgcttacttcagttgctgtcaagtgttctttcatttcaagctgaaggactcccttcagtgtttcttacagaacaggtctcttagtgatgacttctctgaattgtatttaataatgtcttaatttagctttcatttttgaaggataattttgatggtatggaatagtattggttggcattctttatcttttaacacaatatggtatcccctagcctttatggtttctgataagctgttaatcttactgaggatcccttgtatgtgatgaatggttattctcttgctttcaggatttctctgtctttatctttcagctgtttggctgtataagtgtggatccctttgagtttttcttacttggagtttgatgcgcttattggatctgtagattaatatttttcatctaatttgggaaatttttgcccattattttttccaatattctttgtgtccctttctctgtgtcttctcttcctgagacccccattggtacacattatggtgtttcacaggatctctgaagcttcgttcatttttcttcagtctttttctttctgttctagactgggtaatctcaattgacctgtcttcaagttcattgattgtttcttctgcctgctcgaatgtgctcttggctcccttttcttttcagttatatttttcagctctatcatttttatttggttctttttaaagtaatttctatctctttgttgttaattttatttggtaaacattgttttcacaatttaattctttttttgagatggagtttcactcttgttgcccaggctggagtgcagtggcctgatctcagctcactacaacctctgcctcccaggttcaagcgattgtcctgcctcagcctcctgagtagctgggattacaggcatgcgccaccacgcttggttaattgtgtatttttgctagagacggggttttgctatgttgctcaggctggtctccaactcctgacctcaggtgatctgcccgcctcggcctctcaaagtgctgggattacaggcgtgagccactgtgcccagccactttatttctttagatacatattttttagttctttcaacatatttctgataactgaataaaaatctttgttgattaaatacaaggcatgggattcctctgaaattttctgttgacttcttttttccccgtatgtatggcttataattctctatttctttgcaagtgtcataatttcttttttgaaaactgaacatttaggaaacataatgtggctactgtggaaattagattctcctcctccttgtggtttgttgttgttgctgttttctaagtaccctttgtaaagtctgtattctttgtcatatgtggccactgaagtctctgttaggatagcttaatagttcatgattagactgagatttctttaaaagctttgacccaataaacctcccagcctatgccaactggttctgtgtgtgtgtgctggggcatgcgttcagtaccctggcaatttacatctttgttttagctttcacatcccacttgcacagggtctcaatgccagccagaaatgagaggtgttctcagagcttcctcgggcatccatataattgcacatacatgtggctttctaaattctcaggaatatgttggagcttttcaagaccccatgggcatgttatttcccagatttttcttttaattttattgtcagtcttttgcttgccctggctggtatcactgttttagatagctatgatgttaagtaattactgctgattgttttctacaaaaccccaggatagtgagttctgagtctggtaaaatataggctctgtgaatggggcttttcctgggagctgccagacaggtcaaaagtgagatttttctagagattggatttttggggaattccagacctattctacctgtccagtggatactagattactggttttcacagcaactgtctttgggcagcgtttggattttaagtttatgatagagctaaggagaaactgaaaggtcaagggcaagttcaaatgccacaaagtttacttctcttactgaaaatcaaccttaacaaaaaaacaaaaactctcctgggattgttccaagccttccatgaatttccaaattacttagctcaagctgctataacaaaatattatagactgggtggcttaaacaacagacattttttcttggttttggagacatagaagtccaggataaaggtgtcagcagatttggttcctagtgagggcccttttcctggctttgtcattgtatcctcacatggtagagagagcaaggtctctggtctttcccccactccatttcacgcctccccattttttcttaagtacatttaatctcatcacgaggactgtaccctcctgatctcatctaaacctaattacctctcatagtccccagctccaaataccatcagaatagtacgcagggctttgatgtaagaacacaattcagtacatggcaccagaattattaaaaagttggttttgacaattttgactcgtgttctcattgctttaacggagtagcaggttttcttaaagttcttattctgccattctagaagtgctttctataaatcagctttagaacattttcatccctccaataagatccttcatgcccatttatagttaatcctaattcccatcctcagtatagttgtttttaagttcttctctgttaaatttttctgaaggccacattaaaaagtgtaaacttgttataaaagttagataactgagtgaccagctgaattatcttacaaaccaatgactttcaaatatttgtttgtttccaagcattttagcatgagaggtggaaggaacctgtgactctgttaactattttgatgtacgcacaatctgtcttctttccattgactttattaatttagcatgctttaatctttgtatcatttgagaggatggtaaagattttgattagctttagtctttcataaggatgggtgtgttattatatttctagggtaaccactaaaagtatagtaacaaaaggtaccacttactacagtaatagaggaaaaaattcaaaaaagaacaaccaaaatagaattgggaaattgttttattaactgtctgatctttttcagctttggtgatggaataagttaagaatttgttggccgggtgcagtggctcactcttgtaatcccagcactttgggaggccgaggcgggtgaatcacctgaggtcaggagttcaagatcagcctggtcaacatggtgaaaccccatctctactaaaaatacaaaaattagctgggcgtggtggcacatgcctgtagttctagctactcgggaggctgagacaggagaatcacttgaacctgaaaggcagaggttgcagtgagccaagatcacgccactgaactccagcttgggcgactagagtgagactccatctcaaaaaaaaaaaaaaaagcttcttggccgggttcagtcttaaacaggctaatacagagtgtggaatgaaggaatactctccggttactattatgagactttcataatcttgatacttaaacctaataagaccagtatgaaatggaaaattacaagctagttacactcattagcacagacacaaggatcctaaaactgaacctcaaagtatagagaaaggattattgatctggaattagaattactctcgaatataggatgattaaatttagtagagtatatcagttaagagcatggactttgtagcctgattgccttggtttgaatcctgcttttaccattcattagcttgaggtgtatttcttacttctattccttgtccgttaattggggtaataatggtatcacctcacagggtttttctgatgattgaatggttaaaatatgtaaagtgtttaggatagtgtctgaatactggagcctattggtgttagatataatcaatatgattataaaataaactactgtaatctaccatgttaacagaataaagaagaaagctatatgatatcccaatagacaaaggaaaagcattaaaataattgcattagtgattaaaaatgtaataaaataggttagaagggagcctataaacatgaaaaacttacatcatgtattttatttaatgatgatagatttaaaatattccttttgagattctatcattgcttcctttcacagggcttaatttcagcaaggccaaaaataagagaaagaaaggaaggaaggtacaaggattagaaaggaagagagaaaactgatgttatttgcaaaataatatatggttaaaatattggaattaatatgaaagttttcacagaattactgattacaaaatcaatatacaaaaagcagttgcaggaaatggcagttccttaaaaagaatatgatactgcaattccattcctaagcatgtaatcaaaagaaataaaaataacatgtagatgcaaagacttggatgtgaatgtttatagctgcattattgataatagtcaaaaagtggaaacaattcaagtgtccatcagtgagtgaatggataaacaaaatgtgttatattcatgcgatgaagtactactcagcaataaaaagtaatgaactactgatatgatataatatggatgaaccttataaatgttatgctaaatgaatctatacatactatattggtcccatttatataaaatgtccaggaagtacaaatctatagagacagcaggctacttacttaataattacctggggctgagggttgagtagggattgattgcatatggctatgaaggatatttttgggttataaaaatgttctaaaactggttatggtgatgatcgcacaactctataaatttactaaagatcatttaattgtatacagttgacactcgataacacaggtttaaactgtatgagtccacctacatgtggatttttttcagccaacttcaatagaaagtacaatatttgtgggatgtgaaacccatgtatgtggagggcctacttttcttatgtgggagttccatggggctcactttgggacttgagtatactctgattttggtataggcagagagtcctggaaacaatccctcagatataccacgggatgactatacttaataccccaattatttcctccctttcatcctgatctgactacataaatccttaaaccccctttttgggggagtcagggaggagttgataggtaaaggttaagaatttgggtctgtgagtatgtgggcaatatagacgggagggatcatgagtgaaatagatattgagagaacctgtccaccatatgatttataaacagtgtattttgagagaatgagtttattcacatagaccctctcaaccttctttattcatttacacaaagagcccccttgctctgaaaaaatacagtcagttaggaactatttgatctagtttacctcatcttcccttttagccactcataatccaatgtgacagtatacacaaacatacttgtttatcctaataaaagattgtaaataagttagaaaaggtaaatacacaatggaactcattttttaaagcagtgatatttttggagaagagaaagcttttttaaaattataaaatcaggctgggcgcagtggctcatgcttataatcccagcactttgggaggccgaggtgggtggatcacttgaggccaggagttagagaccagcctggccaacatggtgaaaccctgtctctactaaaaatacgaaaattagccgggcgtggtggcgggtgcttgtagtaccagttactcgggaggctgaggcaggagaatcgcttaaacccgggaggcggatgttgcagtgagcggagatggcaccatcgcacttcagcctgggcgacaagagtgaaactccgtctcaaaacaaaagaaaacaaaaaattataaaatcagtatttgaatttatcttttataatttagatttctaaaatgttttactgtcttcaaagtcagtatattcctgtacttaaacatgtgttatgttggctgggtgcagtgactcacgcctgtaatcccagcactttgggaggctaaggcaggaagatcacttgagcttagaagttcaagaccagcctgggcaacgtagaaagacttcgtctctaaaaaaagtgagccatgcatggtgatgtgcacctatacccccagctatttgaaaggctgaggtggaaggatcgcttgattccaggagatcaaggctgcagtcagctatgatggcgccactgcactccagcctgggtgacgaagtaggaccctgtcccaaaaaaaaccaaaaaaacagcactttattgcttgtgatttatgtaacaacaatatgtttaacattttttcttttatgtttccttgtgaatttttcaaaaatattaattttatttgagacagtcagactttttcctgtaattacattgttttattcttgaaatagctaagaagtaattttattagtaaatcatttaaaaataaatcattagttattgtgttacttgagggactttggctgtgttattatttctgtttgttcaggaagccgcctaagtcatatgtgtactgttcaatgaattaccacaaacttttttcactcctgtgtaactatcacctagcttaagaaatagatacagtgaatttgaaagttgcaaggattgtcaaagcaaaggcaggaaggagctaaggaaggggtcacttaaggattcctctttggcctatagagaaatatccttctgtatttttaaatgtatttatatgccatgctatttcaaaaaactgttgtattttcttcttgctttgtcgtcaatggatttaaattatttattgtgtatttgatgtaggaatacggttggacagaatgaactgaagattacaagtgatcaagtgataaattcaggattgatttttgaagataaaccgaaaccttccaaacagtcacttcagtcttaccaagaggctttgcagcagcaggtattgattcatttactcatttactgttgaacctcttaagtgtaagcatggtggtcccttagagctcagagtgtggccggggaggggaaaaaaaacagttaattataattcaaaatgctgagttttgaagtggatacagtaaaacgctgttggaagcataagatagggaaaataattgcctggggcagttgggagagcttcacacagtagttgatatttaagctgcatgttgtgcaatgactacgttacaagttgctggtgtatacagagaatggaattggggtggaagaaggggctggagagttagttaggttgttctagcagattgtgaaggactagctaataaggggttttcagtttcatctggttatgggcagctgaaggaaggaaattttaggccaagaaaagtatgaaaggattgtttgctttaagcagatttatattttatgaagataattggttgtgatttggacaattgggaagagattggcagagaaattatttagtagatagtccagtaaggaggtgatgaggccctgaaccagatggggacgttggggaagacatctaagagacaattctcaggtttcattgacaggactcagatatagggaatgagaacagagggtttgaagatgattcctaggagaataatgaggctataaaccaaaatggggaatacaggtagtagttcatgtttacagaggaggataatgggttctttcgtagtttgtaatatttgcagagaatttaagagtaactatcaaatgtatggggttctttgtgggaattcccttaccatctgagaggaccctgggactctaacttacttacttttctatagaattacacttggatttcttttaaaagtacttttgttcaacttttacatgggcaactttcttgaaagatagatttttaaaattacagaattaccaaccttttttgtatgttaggattctacaaataaaagactgaattttaaattcagaatctgtttttgcatgagcatattaaaaacaccactgacaaaactagatttttcaactctagaggtctatttgatgtgtgtgatgacttctttggctatgctggagcaaaaggttgcttaaatttactgtgcatatggttatgagtttaaaagtgactttccaaaatgtagacacttgtttattgcctatctgtatgtctctacagaacaaccctgcgcttatacttagtgatgataagaatgcatttgttttttgtgcttaatacagctttacagaagtattgcaggtttagttccagaccacagcaataaagcaaatatcacaatgaaatgattcacatgaattttttggtttcccagtgcatgcagagttatctttacactatactgtggtctattaaggtgcaacatgtcttaaacaagctacgtaaacttaatttaaaaatactgtattgctaaaaaaatttagcaaatcataatccttttgctggtggaaagtcttgcctcaatgttgatggctgctgactgatcagggtggcagttgctgaagattgggtggctgtggcaatttcttaaaatgagacaacagtgaaatttgctgcatcaattgactcctccattcatgagagatttctctgtaggatacgatgctgtttgataccattttatccacagtagaccttctttcaaagtttggagtcctctcaaaaccctgctgatgctttatcaacttagtttatataatgttctaaatctttgttgtcatctcaacagtgttcacaacatctttaccaagagtagactccatctcaagagaccactttctttgctcattcataagaagcaactcctcatccattaaaattttatcatgagattgcagcagttctctcaagtcttccatgcctcacttctaattccagttctcttgctatttcttccacatctgcagtttcttctaccactgaagtcttgaatccctcgaagtcatccatgaatcatccattagggtcaacttctttcaaacttctgatactgttgatattttgacttccttccatgactcacaaatgttcttgatggcatctggaatggtaaactctctccagagggctttcagtttagatttcccagatccatcagaggaattactctctgtggcaactatagctttatgaaacgtatttcctgaacagtaagaattcagtgtcaaaattactccatgagttaatgggctaaagaatggatattgtattagcaagcatgacaacaacattaaccttcttgtatatctagctcttggttgaccaggtgcgttgtcaatgagcagtaatattttgaaaggaatctcttttttttagtagtaggtctcaacagtggacttaaaatactcagtaaaccattcttgaaacagttgtgcagcaatacaggctttgttgtttcctttctagagcacaggtagagtagatttagcatcatctttttttttttttttttttttttttaaagacggagtctcacactgtcacccatgctggagtgcagtggtgcgatcttagctcactgcaagctccgcctcctgggttcatgccattctcctgcctcagcttcccgaatagctgggactataggcgcctgccaccatgcccggctaatttttattttgtattttcagtagagacggggtttcaccatgttagccaggatggtctcgatctcctgacctcgtgatccacctgcctcggcctcccagagtgctgggattacagttgtgagccaccgtgcccggctgatttagcatcattcttaagggccctaaggttttcagaatggtatattagcattggcttcaacttaaagtcaccagctgcattagcttctaatgagagagtcagcctgtcctttgaagcttgaaaccagacattgacttctctttactagctatgaaagtcttcttttaatacaaggctgttttgtctccattgaatatctgttgtttagtggaaccaccttcatcagttatctgatctagactttctgggtgacttgttgcagcttcttcatcagcatttgctgcctcatgttgtacttttttatttttatttttattttgagacaaagtcgcactctgttgcccagcctaggctggagtacagtggcacgatctcggctcactgcaacctccacctcagcctcccgagtagctgagactacaggtgcccactaccacgcccagctaatttttattttttatttttttttgtatttttagtagaggtggggtttcaccatgttggtcagggtggtcttgaactcctgatctcaagtgatccgcccaccttggcctcccaaagttttgggattacaggtgtgagcccagcccatgttgtacttttatgttatagagatggcagctttccctcaacttcatgaaccaacctctgctaacttgcaagttttcttctgcagcttcctcacttctctcagccttcatagaattgaagaaagttagggccttgctctggtttaggctttggcttaagggaatgctgggctggtttgatcttctatttagaccactaaaactttctctataacagcaataaggctgtttcactttcttatcattcatatgtttactggagtggcacttttaattttcttcaagaatttttcctgtgcatttacaactgggcaaagtgtttatttaacataagaggcctagctttcagcctgtctatgcatttgacaagcctttcccactaagcatagtcatttctagcttttgatttaaagtgagagatgtgactctttcattcactcaaacacttacatgccattgtagggttattatttggcctaatttcagtattctatcagggaaaagagagacccaaagagagggaaagagacaggggaacggctgattggtagaatagtcagaatacatatgacatttatccattaaatttgccatcttatgtgtgtgtgattcatggcgccccaaaacaattataatagtaacactaaagatcagcaatcacagatcaccataacagatataataataatttaaaaagtttgaaatattgtgagaattaccaaaatgtgacacagagacatgaaattagcccatgccattggaaaaatggtactgatagacttcctcaatgcagagttgccacaaaccttcgatttgtaaaaaatgcaatatctgtggccaggcgtggtggctcacgcctgtaatcccagcactttgggaggccaaggtgggtggatcagaggtcaggagattgagaccatcctggctaatgcggtgaaaccccgtctctactaaaaatacaaaaaataactgggcgtggtggcaggctcctgtagtcccagctactctggaggctggggcaggagaatggcgtgaacccgggaggcggagcttgcagtgagctgagatcacgccactgcactccagcttgggtgacagagcgagactccgtctcaaaaaaaaaaaaaaaaaaaaaaaaaaatgcaatgtccgcaaagcacaataaaattcagcacaataaaatgaggtatgcctgtatttaaagttgccaagcattccccagagagagttgatcctccgacctctgaattctgggaatagagtttgcctagggaaagtaggtctggtaaggttgagggtagactttgtggctgggcattccccttgaaaggatagatgaaaaaggaacgtagggagatctgatggtcccatggaactggcagggttagagagggaatggctcaggtagacactaggggagggaaggaggagttggttgagtctgaagtaccttagtggctagaaagtcatttggtgtatatagaggaacaggggctatgtattctagccattgaattatttttatttttaatgttattatttaaagacagtgtcttgcataatgttgcccaagctgaagtacagtggcatgatcttggctgactacaaactccacctcctgggttcaagtgattcttgtgcctcagacacccaagtagctgggattacacatgtgcgcaaccacacccagctaatttttgtatttttagtagagatggggttttgcatgttggccaggctggtcttgaactcttgaccttaagtgatctgcccaccttggcctccataggcatgagccacgacacctgacctaaagtatttttacattgagtattacatatatttgtgattttaacctttgtaggggggtacactggggaaaaaaaaaaaagcaaatttttttgcttgttttctaatacaaaaaataacatctggtattactaacttcttgtatcagaatacttgtcagcgtttattttaaatatatcttatgttgtcaagattcgggaaagagaagaaagaaggaagaaagaacgtgaagaaaaagaagaatatgaagctaaattagaagctgaaatgagaacatataatccctggggaaaaggtggaggtggtgctcctctcagggatgcaaaaggaaatctgataagtacgttatttctactgacttgtttttaaaataagctaaattatttttaactttttaaaagattggggagtagaaaaaagtaggaatcatagcctctatagcaacgcatgtatgtaacttaatgcatatgaggtattttaagagtaaatataataacagaggctagaaagcatttcttcttcagaatactatccatttgtttttattataaatatttcatcctccgatgttgataacccagttgcagagaaaagctcatgttagttgataagtttttactgaaactggtacttagaatattttgttccctcataaaaatgataaaacccatattacaatttaaaaaaaataaactagtaagatgtcttagaaataaaggatgtaaaacagttttgggaggggattttgtgtttaatttatctatgcaatatacctgctaattgcaagaattcctttgggaaaaagaagacatgatcatagaaactttctagcaagtttcataatttgttgatttatctttcaattatgtactctcaaaaatgtttgatctagtaatcacacaacaaatacttcgaaagagtggctttatacaacttgttatatacagttgtctgttggtaaccatgggacattggttccatgatctcctgtgaatacccaaatccatggatgctcaagttcctgatataaaattggtaaagtgttcgcatataacctacacacatcttcctgtatactttaagtcatctctagattacttgtaatacctaatacagtgaaaatgctatgtaaatagttgtaatcttgtattaattagggaacaatgacaagaaaaaaagacttttcacatgttcagtgcagatgcaagcatccatttttttttgttttttaatgtttttgaattgtggttgattgaatccacagatgtggaacccgcagttacaaagggctgttgtatatattaggatggtctttgtttagcgtttagttaagcagaataaaagtagatcaaagatacacacttcatgttctttaggtgttatgtattgtaggaatagatgagtgatagaatcggaagattggatgttgagttagaattctcgtgtgttgcaaaaattttctcccattctgtaggttgcctgttcactctgatggtagtttcttttgccatgcagaagctctttagtttaattagatcccatttgtcaattttggcttttgttgccattgcttttggtgttttagacatgaagtccttgcccatgcctatgtcctgaatggtattgcctaggttttcttctagggtttttatggttttagatctaacatttaagtctttaatccatcttgaattaatttttgtttaaggtgtaaggaaggtatccagtttcagctttctgcatatggctagccagttttcccagcaccatttattaaatagggaatcctttccccatttcttatttttgtcaggtttgtcaaagatcagatagttgtagatgtgcggcattaccagaatctacaatgaactcaaacaaatttagaagaaaaaaacaaccccatcaaaaagtaggcaaaggatatgaacagacacttctcaaacgaagacatttatgcaaccaacagacacatgaaaaaatgctcatcatcactggccatcagagaaatgcaaatcaaaaccacaatgagataccatctcacaccagttagaatggcgatcattaaaaagtcaggaaacaacaggtgctggagaggatgtggagaaataggaacacttttacactgttggtgggactgtaaactagttcaaccattgtggaagtcagtgtggcgattcctcagggatctagaactagaaataccatttgacccagccatcccattactgggtatatacccaaaggattataaaacatgctgctataaagacacatgcacatgtatgtttattgcagcactgttcacaatagcaaagacttggaaccaagccaaatgtccaacaatgatagactggattaagaaaatgtggcacatatacaccatggaatactatgcagccataaaaaaggctgagttcatgtcctttgcagggacatggatgaagctggaaaccatcattctcagcaaactattgcaaggacaaaaaaccaaacaccgcatgttctcactcataggtgggaattgaacaatgagaacacatggacacaggaaggggaacatcacacaccggggcctgttgtggggtgaggggagcggggagggatagcactaggagaaatacctaatgttaaatgatgagttaatgggtgcagcacaccaacatggcacatgtatacatatgcaacaaacctgcacgttgtgcacacgtaccctaaaatttaaagtatagtaataaaagaattcttatgtattatgcctttgcttgttaaatattggtttttttgaagatatatttgaggcccactttaatttattttaatttaattaattaattttttcgagacagagtttcactctgtcacccaggctggagtgcaatggcaccatcttggctcactgcaacctctgcctccaggttcaagcaattctcctgcctcagcctcccaagtaactgggatttataggcatgcaccaccacacccggctaatttttgtatttttattagagacggggtttcaccatgttggtcaggctggtctcaaactcctgacctcaggtgtcccacccacctcagcctcccaaagtgctgggattacaggtgtgagccactgtgcccagcctactttaattttaatagctctttttttcttcccaaaagatttgttcctttcctatcttcacctcatgaataattttctcacagttttgaaagagtgaaactcttattactttctttatcaatgaaatgattttagatgatgcctagctaacatttcttattttaataggtaagtgtttacttgaaaatatattagaaaaacactagttttccatttatgaatagtgctataatattttcttttaaactacaggtattaaagtgaaggcattagtccaggcatttaatggaaagtgctgtaataataaacaaacccaaattcttagaagcttaaggcctctcttgttaggcatccacttttgtcccactctgatgctgctgtttgggtggttctcctccaagaagtgactcagggatccattgtttcattccttcattttagagtccttttcttcttgtccagggacaaattgaggattttgttggggcctggcctggatgtggaggaagatcatttttgccttcattccattgttcagacctagttataggttctaacctaactgcttgggaggctgggaagtttaactttctttatgctcagaagaaggacatgggattaatagccatatgggcaatctttgctacagtaaatttaaattataaattgatagaagttaactagttaccatgaaaaatgtgcttaactgagtgaaacattggaaaacattgggatagagcagttttctaaaatcttacctctaagattatttctagttcaaacaatacaattattgtgttctgtatgcctttaattggtggaagtgagtaggataaatttgggttattgagttataaaacattattttagaattgcttgacctaatgagcatggagaaaatgtttccacattattttagaattgcgtgacctaatgagcatggagaaaatgcttcttagatttcaatttttaatagtaatgtttagttggcttatttaatgccgtcttcatgccatgaaatagaaaaggcatactattttatcaaatacagtataactcttttaatgatattttcaagcaagtaaactcatgacttaaagagtatcagtttattttgtatgtggatgctacattttatctttatttttattttttgagatggagtttcgctcttttgcccaggccggagtgcaatgatgcaatctcagttcactgcaacctctgcctcccgggttcaagcagttctcctgcctcagccttctgagtagctgggattacaggcatgtgccaccacgcccccctaattttgtgtatttagtaaagatggggtttcaccatgttggtggtcttgaactcctgacctgaggtgatccatccacctcggcctcccaaagtgctaggattacagacatgagcgactgcacccagtgtagctactacattttagagaaggcgggaacattacatttgaaatatgtagtatagagcagtgtgatgactaagaccacataacgtctgttcattatcttggctaactttaattctgctgctgacttttctaattactcctgttctttttttgatcttttattccaaagaaattaataaaattgaatcttaacactgcacccttatcttacctaagaagatctcattataaggcatagtagttactaatgaaatataaaaatgtgttattcatgcaactttaaagtatcaccccttttaaagtaaatatttctcattttaattatttgtacagtattttattctgttgtctttctcagttctttatttattaaagttctttattcaggtttttatttgaaactttacatgaaactgtccatgtcaaatgttaaaacgtatacaccaaaagaaaaatgtcaataaaaataaattaaaagataaaattaaaaaccactttgaaaaatggtatctcatagttccaattgattaacaggatgattagttagtcagttctcttacttactcgtccacccatgccaatctgtgatctcgtttctggcatgaaaatattgccttttttctgacatttgtgttttagcatagtgtttctgagattcatccatgttgttacatatgtcagtagcttattttttttattactgaatagtattacattttctgaaggtatcacagttgtttatccatttaccagttgatagatatttgggctgtttacagttcaaggctattataaataaagctgttagaaacattcacttacagatctttgtgtgaacataaatttttatttcttttgggtaagtgcctaggaatagaattgctgggttgaatagtaagtgtttaactttgtaagaaactgccagaacattctccaattttgttttgtcattttgcattcctatcagaaaagtatgaggtttctagttgctctgaattttcatcagcacttgaaattatgcatctttaaacttttagttattttattgaaagtgcagtgatacctcatttaaaaaaagctttttctattgtgaaattaagacctaaaagagttgcaaagatggtgtagagagtatccttcaccttgtttcccctgacgttaacgtcttagataatcatggcacaatgatcaaaattagaaattaacctagatacagtgccgataattaagttacataccttgttcgaattttaccagttttttttttcttttcctaatgtccttattgtattttaggctctggtccaggatcctataatgcatttagttcatgtctctttagtctcctccaatctgtgaaattcctctttctcagtctttctgtctctctctgttccattgctctatatttctatccttttgcccgtatcagagtctcttgattactatagctttgtagtaagttttgaaattgaaaagtttgagtcctccagctttgttcttttttttcaagatcttttgacaactcaacttcttcgcatattttactatcactatagtaatgtagtaatattattatttagtaataagttatagtaagtaaataatgttatagtaagtaattattactattactattactttgtcatgtcaagcatggtggcattttcattgggattccattaactttatagataatattgaaacagccagcatcttaataatattgagcctcttgatccatgagtgggcagtgtatatccatttattgcttctagttaatttctctcagcaatattttgtagtttttggtggcagatcttgtgtatattttgttaattgtttccctaaatatttcatgtggtttgaagctattttaaaatgttacattaaaaaatttttaattcatttgttcattgatggtctatagaaatacaggtaaattttttatattgtctgtagtctgtgtgcttgctactgtctgtagtctgtgtggttgctaaactcacttgttagttttagtagtttttttgtagattctttgatttttaatgtaggcaatcatagcatctgtcagtagagttagttttacttatttctttccaatctgatgccttctatttattttaattgccttttacactgtttaagaactccagtacagtgttaagaattcatgagcgcagacatccttgtcttgtctctgatttcagatggaaagcaatctttcaccattaagttagctgtaggcttttagttgatttttcttttatcccattgaggatgttctattccttgtttgcttagaggtttcattgtgagtgtatgttgaattttgtcaggtgcttttctgcatctattgagatgataatgtggtttctttacccttctgacctatggtaaattacattgattgatttttgaatattcagccaatcttgcattcctgggaaaaaccaagctgtattattgtcttttatacgtgttgtagaatttgatttgctagtattttgttagagatttttgcatctaggctcataagatattctggttttttatttctttataatgttgtctggttttggtgtcagggtaattctggcctgataacatgaattgggaaatgttttttcttttgttttttgagacagagtcttgctctgtcgcagaagctggagtacagtgacataatcacggctcactgtagcctcgacctcctaggccgaagcaattctgccacctcaactttctgagtagctgggactacagtcatgtaccaccatacctggctaattttttttattttttgtagaaacagggtctcactatgtttatgttgcctaggctggtctcgaactcctgagctcaagtgatcctcccaccttggcctcccaaagtgctgggaatacataggtgtgagccacatcgcctagctgggaaatgttttttctgtgtttagaattcaccagtgaaggctgggtgtggcggctcacgcctgtaatcccagcacattgggaggctgaggcaggtggatcacaaggtcaagagatcgagaccattttagccaacatggtgaaaccctatctctactaaaaaaaaaaaaaaaaaattagctgtgtgtggtggtgtgctcctgtggtcccagctactcaggaagctgagacaggagaatcatttgaacccaggaggtggaggttgcagtgagccaagattgcgtcactgccagagcgggactccatctcaaaaaaaaaaaaaaaaagcattcaccagtgaagccatctgggtggggaatcttctttttgggaaagttttaaactatgacttcactttatttaatagataaagagacattcagtttatttcttatgtgagctttggttatttgaatcattcaaggaaattattcattttatttatttatttattggcataatgttgttcataatatttcttttttattctaatgtttgtaggatctgtggtgatggcttctcattcattcctgatatttgtaatttgtatattttcttaatctgtctggctggatgtttatcaactttatggatcttttcatagaatcagctttagttttcattgattttttttctctgcttttcttcttgtttcagtgattttgctcttatctttactatttgcttcctttagtttgctttgtgcttacttttctcccttttctaatttctttcttttttttttgtttttgttttgagacagagtctctctgtgtcgcccaggttggagtgcagtggcacaatctcggctcactgcaacctccgcctcccgggttcaagtgattctcctgcctcagccttccaagtatctgggactgactacaggcacacaccaccacacctggctaatttttgtatttttagtagagacggggtttcaccatactggccaggctggtctcgaactcctgaggtgatctgcccacctcagcctccgaaagtgctgggattacaggcatgagccaccgtgcccagcccccttttctaattttttaatgtcgatgcttagactatgatttgagaccttacttattttctgtgcatttaagtgtgctacacatttccctctgagtactgttttagctgtacatcacaaatttttatgtgttgttttaattttcattcagttttctgattttcattgtgacttttctttgacccccattagttatttggaagtggacttaaaaattttccaagtatcaggggattttcctgagagctttcttttattcaattctagtttgtattctgttttgtaagagaatatacttttcttttttttttttttttttgagacaaggtctcactctgtcacccaggctgtaatgcaatggcacggtcatgcctcactgcagtctcaacctccctggctaaagtgatcttcccgcctcagctcccccaagtagcaaggactacagacacatgctaccatgcccagctaattacaaaattttttttagagacagggtctcacttttttgcccagctggtctcaaactcctggcctcaaatgatcctcccacctcagcctcccgaagtgttgagattacaggcatgagccactgcgcccagctggagagaatatacttttaatgacttcagtgtttttaagtttgtgagatttgttttatgagccatcagttagaattttactctataagtaagtgtatatattttaaattaggttaattttgatatatgtattgttagtagtgctagggttgggaattttgcttagctctctgaattaggtcattataaaagagtttctgtgtcagccatgaattgctgaataatcctgggtttatagtaacatttaacatatctcagcccttcacaaaatatattttgatatgtattttccaccaaagtataaagagtagcagctaacttgtgaagttaattaaaattaatttttttataatgagctaattcactcagtgaggagcacgtaagtgctcctaattttatattgaatgttatgatgatttacatttaaaataaagtcctatctttgcagttgacaaattacactcttgaccaaagtgccttttttaattttcgttttttagctgatttcaaatcatttattttaccatctcacagaaagacagaaaaggagtggccagttgccaaatcatttttcccaataaaaagcaatatggatttggtttgcttgctaaatctgatagtcttaaatcttaataattatgtactctgatgaaattaattttctcttaatataaatatgttgaatattattccagttgagaagtccatatataatcaacaataaattataatgtgttatcgaagtttgcttacatatagggtatctcctaatgtatggtttgtgcaggtgactatcaaactaagattgcattccctaagcactcactagtttggcaacacagctgtagattatttcaagaatatctatctgccttgccagtccttggcacttgggaattttcttgcagtcacctttttctgtggtttcacccagtcccttctctttgcattttttctatttatttcttctttctacctctgaacatgcttaggtcacttgtattaaaacacagacaaatgcttcctttaccatataaaacacattcaaaaagtagtccatgcttgttgctgtcacttcttaccaccctcttattggctatttttccatagtataacatctagcttgtacccccgcgccccaccaccccatgccacattgtcaacaaaaagcctgatgacctaatttcaatttaatgatttttactcatcttttatcttctttgaactggcttgacagttcctttttttctctaagtcctttgtatcctccgagatgctgtccagacttcagctaatattttttggatgtgcattatgaactagagttagactctgctaggtttgtgagcatgatctttcttctaaggactgtcatctgaccttgtgtgtttctcatcccttcatccattctcttccatgtcatctcttttactcctgtgttactctttaggtcttccctacagattgatctttaaatctttttctttgccctcaaccatttttatttttattttttttgagacagtctcactctgtcacccagcctgaagtgcagtggtgtaattttgactcactgcaacctgcacccccccggcttaagtgatcctcccacctcagccccccaagtagctgggactacaggtacatgccatcatgcccagctaatttttgtattttcagtagaaatgggatttcaccatgttgcccaggatggtcttaaactcctgagctcaagtaatccaccctctttggcctcccaaagtgctgggattataggtgtgagccaccacgcccggccagactaatatattaatcccacttctgtaacaaccacaactgcctccattaccttctacagaacaaaattgagagccattgacatgtgttttaggatattgaagaataggtatccattctatggtttccagtcttatttgccattgctctattacatgtgctttatgctctagtctagctggactactttaatgttgccagaacactcatcatgctttacccacttggagtgctttctcacattgttctatttctctattatgctttcctacttatcttcatctgtgaagctcctatacattttccaagtccaagctgccctaaatattgtaacagaatgtgaaccttcctgattctgaactcccattctcttttgtagcatttatgtattacttgccatgttctatctggaattctaattgtgattcatgttcaaaatacattcttgaacataacaggcttcctgataaatacttcttatatccaggtttaagttcactttcagtgctgccatactgttgcagttttttggtttgtttgttttatggaaaacaggtactttttattttattaaagctttaagttctgtaatcattcagttctgtttttgagattggttgtttgacccaattctaggtgctcagatttttgctgtgtgtattagatatctattctatgtaatgaattaacccaaaacttggtgttttagcatgataaacagttattatcttgcggttctgagggttagaaatttgtgagtggtttagttgggtggttctgtctcaggctccctcataatgttggagtccaagatgttgaccatggcagtagtcatctgaggcttgatggggactgtaagattcattttcaatatggctccctcacatggctcaggaggccttagttccttgtcatatgggcctctccatagggctcccttagtgtccttatggtatggcagttggctttcttcagagtgaatgatccatagataagcaaggtggaaataatttcttttatgaggtagcctcagaagtcatataccattatttctgcaatatgctagtcataagaagtgagttattaactctggacaccactgaaggggaatggaatttagctttaccctttgagggaggattgccaagtaatttgtgaatatattttaaaactccactccacataattatgtgttattaggagaccgatgacaggtaaattacactatgagttgttttaaattgttgctatattttttctatattaaagaaattctaagttctgaagtaacatagatactgttaatatggtttttatgttttgttaaagatttatgtgtccttaatttatctactaattgagattatttttaaggattattttttgaaaatcttaaaagttttgataattttgtttctcttttcagggcaccaacatatcattgaattattcccaactttgtcctattgtttttctttctgacttcctattttaagaaaatatattttgcatgccaattacagaaatgtgtttattgaaataaatggcttattttttcctctcagctgatttgaataggatgcacagacaaaatatagatgcctaccataacccagatgcaagaacatatgaagataaaagggctgttgtatctctagacccaaatttagccacttcaaatgctgagaacctagaagatgctgcaaataaaagctcaggtttttaatcacttttttttttttttttttttttttacatttctgaaattgttcagtaacatttctgttctgtgactaagttcttattgggatcttgagaatttggctatcctgatacaggaaacataacacactattcataaagtgccttttcttcatagttactttgaaaaaaggtgaatagggaaaggttacttcttcctactgtgtttcttctcagctttgtaacttgctgtgtatcctttagctgctgctaacatttttattttgctagtgggggacatttcttaatatcaaacactctttttacacacatacacaatttgcatcttatatccatagctgtttgaattagtgaaacagtatcattgtgatatgataaattgtacagggaaattcattttttacttgttttagtaatcatttaccctcccttgtaaaacaacagtgtacaaagaaatgaagcaatgttgtttttttttttgtgagatggagtctcactttgttatcccaggctggagtgcagtggcataatctcagctcactgcaacctccacctcctgggttcaagcagttctctacctcagcctcccaagtagctggaatcacaggtacccaccaccacacctggctaatttttgtatttttagtaggtatggggtttcaccatttagccaggctggtctcgaacttctgaccttgtgatccatccgcctccacctcccaaagtgccgggattacaggcgtgagccatcgcctggttacatgcctcttaactacttatctttgatttactattaatatcctttaatcaattctgaaagatgaaaattattcaattatctttttttgacataccaggaaaagttgtcaggtatgttaaattgtgttatatatttaaaaataaaatttaatacagcacctcacactatattttgatgcctataaaactggccatttattcattacaaaattctactttgtgctttcacagaagttttgattttagattagaaaagaacttttcattaggaagttctaaaatatttgtgactgatcatgtagtcttttttgtttttaacccttatttttggctaaacagataagtgaagtggggagctgtgattagagtcatagccctgcatctttcaaggctttgatggtagcacacttatctgtagcctttttgaacagtttaagagatggattatttaccgttttcatgggcagcttgtaccagtgttttctaattatgagaaaatgctttctttgttctacaatatattttatcggatccagttttgatttttagagcactaaaattggaacctttgattttgacaatattattgatttggctcttttaatttgtaatagtgtgtggtaagaacatcacaacaccttttcatattattgctgctaagagaattttgacttatttctgatatttttctcatttgctgctgcttctagtagtctgtattgagatctcattgccatacagagtctttctctacccttttcttccatacctggtattgtttgtagttctggctcagcctagaactttcgctatcttagtaataacactttttagccatctagctttgcacaccaagcaaaaacaccagaaaatcaacagttcccatgatcccttcccaaaagcataagcctgatgattaaacatgcacagcaaaatttgttgcctatagcctttctgtaccactgccaggtttttatgctgatattgttgccaagatgttctgttttaagaattgagtaaaaaaaaaaccataaaatgtttaaaacttccttttttttgtgaattgaaattcccaaattagacttttcttccctaagaatgaattaattggctgggtgcagtggctcacgcctgtaatcccagcactttgggaggctgaggcaggcggatcatgaggccaggagatcgagaccatcctggcctacatggtgaaaccccgtctctactaaaaatacaaaaattagctgggcgtggtggcatgtgcctgtagtcccagctacttgggaggctgaggcaggagaattgcttgaacccgggaataggaggttgcagtgagctgagatcacgccactgcactccagcctggtgacagagtgagactccatctcaaaaaaaaaaaaaaaaaaaagaattaattaatctaaaataaactttctcaatacaagaaatgattcaaagccacctaattttgtgctatgccatatatatgtgtatgagtgcatgtatgtgtatgtatgtacacacagacacacatatctttgcatatatgtagcatttgatattttaaaagcctgaaggaacttgaatatagctgaaaattgaatgttacaacatgtgtttaagtttccttatcctctaatattttatcttcattaggtttgtttctgatgccctttataatgttcattattttttcttttattttatggtttttagatgagctatggcttatgaagtctaatacgaatttggcttaaatttatttttttggcttattatcatgccaagatacatttctgctttctttgtatatagcaagtgtttccctatgattttccttttatagtttattcatttctaaaaggacttctcttgtctgtctctaataatatttcttctctaattgccccaaaggtttagaataggagtgagcatcacggtgaaacatgctactcaagtttgttttgctaatcagcttttccaccacagcataaaatttaaaagagccttcaaggtgtatatttagtttgttttcagtgggaaaattttctagagggaaaaagtattcataatgtttaagtattgatttggctttctgccagtctgttcaaataagcattaataaatttaaatacaaaagcaaaatagacctgagtggtagctgaactgcaaagcaatttgcctatacaaaactacatgcgagaaatacatgctttaggctgggcacgctggctcacgcctgtaatcccagcacttttggaggccgaggcgggcggatcatctgaggtcaggagttagagaccagcctggccaatgtgacgaaatcccgtctcaactaaaaatacaaaaaaaaattagccaggcatggtggcacacgcctgtagtcccagctacttgggaggctgaagcaggagaatagcttgaacctgggaggcagaggttgcagtgagccgagatcatgccactgcactccagcctgggtgacagagcaagactctgtctcaaaaaacaaaaaaagaaatacatgctttagtttaatggtataaagaatgagtcagaaactcaaaaataatataaaaagttatgtgaggcttaaatttaaatgtcattttttcccatctgcattcaaagagactctaagggtataattgtttttcgaattgcttttatgaaataattttttccattccaagaatatatgatactatttataggtaatatatactaaaaaatttttgttcatgtttatatctcattaagttgagagttttaaaaataaaaacgattacaataattaagatgcattctaatttgttaaatatgtttttcaaagctgactttctattctgtcatttaaactattgggaagcattttgaaattactgatttttaaaaacggttttagaaaattttaaatatatgttacataatacattttaatatgttattaagcaatattcttaagtaaaggatattcacatactgaagaatgtaaatatgtcctttttttctttataaattctattttaaagcctttgttgcaatgagggttgtttaagctgttagcttttatgtttcctttgtatctttcagatattatttgatttttttaactgttaattttattttagtattaccatttttctttctcttactactgttcatctgatcttcagattctaatctcaaccttccccttctgattttaatctttggactttttttttttttaaaaatgaatttattagcaaactgttcattctttaactgttaaattttctaagcattggctaatagtatgtttttgcaaaatatttctttcaaggtcatatgcaaacacagagctctccttttgctcggggaaatgtatttggtgagcctccaactgaacttcagattaaacagcaagaattatacaagaattttcttcgtttccaggtgaaatgctatttgatcagtttcaaagtttcatgagattttaataaacaaaacttgcaaagattttctccaggataaatactaaattctaaaatgccatactgttatctaaaatatctaatttatatcagatcagatatcagtagtacaaaagttatttcatttcaaggaaataaacagatgtattaagtatagtagttgacttaatcttttattttattaaataattaattttttttatttttttgagacggagtcttgctctgtctacccaggctagggtgtagtggtgagatcttcgctcactgcaacctccgcctcctggctttaagtgattctcctgcctcagcctcctgagtagctgggactacaggtgcctgccaccacgcccggctaattttttgtatttttagtggagacagggtttcaccgtattagccaggatggtcttgatctcctgacctcgtgatctgcctaccttggcctctcaaagtgctgggattacaggcgtgagccgccacacctgaccaatttttgtatttttaatagagacgggatgtcaccatcttggccaggctggtctcgaactactgacctcaagtgatctgcctgctttggtcccccgaagtgctgggattacaggtgtaagccaccacgcccagcctaagtcattaattttaaatcaaagaatgctgagattttaaaaactgatttactaatatattcatctattaggcagagaatgcatctttctagatatttgtaagttattagaaaatcaatagattttttccaaatgatttgatattattacagattgtaaataaataaaaattagatttaagataatcacagtttacaattatttgccccatttatgtacataagtaaatggcatttaacatagtagaactgcccagactattcgcaaaggaagacacttgaacatccagtgtttatgaagcaaacagacttactcccatactgggggtaccctgggctgagtcctagggatggagcctgagatgaatgtgagatacttgctcatgagggactcacagtttcttctttccctacctccctccccttcacactcacacttagataccagtgtcagattaatcttatggcctggttaatcctcctttgatatgacttttcacctgctattcttctttactcaaaatctggtggtagcttttctttgcctacagaaattatctcaactcttgaacctaacatttaaggttttataatctaattccaaactcttaaatagatgccctcaaacatatcttctttttaatcctaattattcttgactcttaaataaggcagtgacgtaatggatatagcctttaaggatgattgatattaggctgggtgtggtggctcacacctctaatgccagcactttgggaggccaaggtgggcagatctcttgagcacaggagtttgagactagcctgggcaacatgatgaaaccccatttctacaaaaaattagccaggcattgtagtgtgtgcctgtcaccccagctactcgggaggctgaggtgggaggattgcttgagcccaggaggcaaaggttgcagtgagccaagatatgccactttattcttgcctgggtgacagagtgaaaaaaggatgattgatgtgacatcactgtttaagatacaataatagaggattaaaaagagtggaagcagggatattttactagtgtgggtgacagtggaaatgggtggaaagtgctttttaaggttcagcagaaacaatatagatattaaatgtgagaaactggtatcagaggtcccaatattgtgcactcaagtcaggtagcagcaagttgagggttcagagtccctgttgaacgtaaaggaccgtgtggtatattgaccatgacagcaggtcataatttaagtacctcctctaatgcttagcagttcttatcatggtctaaggtagaattcagccaaaaaacaatcttacaattgtatagacttttattgtttttgagatacttttacatatagtgtctcatcaaacctcagatttctctgagagaggttttattatctctgtttaataacatacaactaatacacagactaacaggcttgcccagggtgtcacagctagcaaattgtgaggccattgcttgaacccaagtctccagacttcaagtgtaatatctatggatatcagacttctatttataggattcactaggaagtctttacctctagaaaaagtatggtaatgggggaagctttaactattttagtttcaaccttcagttcttccaccctgtcaaccctcaatttatctgtgaatggattgctttcagatgatgattttttaatttttctttcagcagcctcttcaaaatctcttctcccacctcaaacaaaacctaatatgtaattctaagaaaatgtaaaatagatcaatggtatttattattactgtcaacaatataatgtcagataaaaagtatccaaaacttttgttaaaaaaaatattatgaaatgttcaaatctgtgcacaaagatggtaagaaattagcctgaggtctgtacaagtaagttccacagttagctcaagttaatgcatcagaagtcttcatgctgttaaaatttggtgaatattaataacacttgtgaatgtttgacatttttaaccacagctttaaaaatagttaacaaataaaatatttttaagaactctgaagcatttttgtgttatgtaattggaaaaccatgacaggaagatagctttccctgctttccagaccagaaacctgttgaacaactgtctagcattcctgttggcactgagctttggatccattaggtgtatgatccattaatagcttaaaaattggtattctttgattttgatggaaaagtgacccctgtgaatgtgatttttttttccatggagtaggaagaagggggaattgagtattgaatatgaaattttgatgaattataaatgatgttttctttaggcatattggacttgaagaagtgattgcatgcaaattgctaactaaaagtactaaatattaggcttatgcatatttaataatgttgtgagaaagaagtgttggaaaaagccctagtatataaaatcataggatgtgttagaagattaaagttcttttttttttttaaagacagagtctcattctgtcgcccaggctggagtgcagtggtgcaatctcggctcactgcaacctctgcctcctgggttcaagtgattctcctgtctcagcctcctgagtagctgggattacaggcacacaccaccacgcctggctaatttttgtatttttagtagagacggggttacaccatgttggccaggctggtttcgaactcctgacctcaggtgagccaccgcgcctggccagattaaagttcttgtagctcaaaaattaatagcactagatagagcaaccttgaagctagaggaagtacagacaagaaaaacaaaaatatgctgagtagtatgatccatacctaaggataactaaaatctgttgataactttaaaccagagacatgaatacctggttcccatgctgctgttcttccctgcctcattcatcgggcgtgtggactatctatctcttagggccttctttccttcaaatcttaggctctagagtactcaacgctgcagactccaggtagcattcaagatgaaacttaattgtgagtccttgtgacctaaatcctcctccacctaatagttttagttctttctccattaacctctatagttaggaaataacaaagggcatttgggagaaatggctcttgcattaaaaaatgattgaatactaaaatactaatttcactgttattttagaataatcaattccaagaattttgacacataatagcagcaatcactatagaataatataatcatgaattagttgcttagaaccttctatataggaggacttttatgttccttacattgtttcactttaattctttaagcactcctttgagatgtaggcgttaataactgtgtttaccagaaaaaagagaaaactgaggacaagcaagtttcttaaggtcacacggtctgtttggtggaactggaatttaactcaaagcttttaacagtacagtaaatcatgtagcctccctgaaaatacaggagactgaaaaatttaggaacatgcaaaaagagggtacaagtgttgagtttatatactatcaggaaaaaaataagtgatattctaacttttcaatagttttacaagataaataactaagtttaattctttagattgaggaaaagaaacaaagagaggaagcagagcgagagagactgagaattgcagaagaaaaagaagaaagacggcttgcagaacagagggcacgaattcagcaggagtatgaagaggaacaggaaaagaaaagagagaaagaggaggaggtacatcttttttccctattgtattttactacttagtctgaaggtgaaatctttgacttgaaaaggtatttcttacttataaaggagaacagtgttggagtacatttagaaaatatcagatcaatatacattctttggatattattttattaaggtgaaagggtaatttaagaaaggagataagtgatgactttaaaaatatagatgtaggctgactgaagactttataaaagatgcctaatattttatttttaagcagacaacttatgttaaagaacaccatatcatgtcatctatatctttatctcattttatcagataaataaggcagcacatttttgaatgtactatagaaggaatatatggaatgcatatttctctttttattttaaagcaaaggctaaaaaatgaagagcatattcggttagctgaagaaagacaaaaagaagcagaaagaaagaagaaagaagaagaagaaaaatataacctgcaacttcagcactactgtgaaagagacaatttgattggggaagaaacaaaggtaagtttcagacaaaaatgtcaatcaaacccatagtttaactcactttcactgtgagagttgtacagttgttagaaaaggggagaaagaggaggaggtgcttttgttcctgttctgtcttactgtttagtctgggcacaatgtactgaactttctgtaggaggtactgtcactgtgctttgttggtattttctgtccattgaaggtaatggatttacttacttgagccattcttagtctcattcccatggtgtatgcggtgccacccaagaatatggtctgcagacagtacaacatgaactgtttgttatggttcatgacaagactaatacagaaagtgagagtggtttatatatatatatatatgtattctttttttttttttttttttttttttttttgagacataatctcgctctgttgcccaggctctggagtgcagtggcacaattttggctcactgcacctccacttcctgggttcaagcagttctcctgcctcagcctctcaagtagctgggactacaggcacacgccatcatgcccagctaatttttgtatttttagcagagacggggtttcaccatgttggccagactggtctcaaactcctgacctcagatgatccacccacctctgcctcccagagtgctgagattacaggagtgagccaccacgcccggccttctctctctttctttctttctttctttctttttctttctttctttctttctttctttctttctttctttctttctttctttctttctttctttctttctttcctttccttccttccttccttccttccttccttctttcttttcttttcttttcttttcttttcttttcttttcttttcttttcttttcttttcttttcttttcttttctttttctttttctttttctttctttttgttttaagagaccaggtcttgctatgttgcccaggctgatctcaaatttttgggctcaagttatcctcctgcctcagcctcccaaagtggtgggattgcaggtgtgagccaccacaccctgcctcacagataattttttattgtaaaattcatcatttaagaatttaaggtcgaggcaggcggatcacttgaggccaggagatcgagaccagcctgggcaacatggtgaaaccccgtctctataacaaatacaaaaattagctgggcgtggtggcaggcacctgtagtcccagctactcaggaggctgaggcaagagaatcgcctgaacttgggaggcggaggttgcagtgagccgtgactgcactgtggcactccagcctgggtgacagagcgagactccatctcaaaaaaaaaaaaaaaagaattaaacagaattgttagtttcccataattatatttcttgtaatttcttatgttttttaaaaatgctattttttaaggaatatatacttttatgatattataatttaattgtaaagtaccataaagttttaaatcagctttatcccatttaatgcatttgcctttctgaaattaacattgctatcattttctttcatttatgtatgtctgatatatatatatatttttgtctattccttcagttttacctttgtgtcaccatattttttatttagttagcttctatctttagtttgttgaatttttaaaatcctaatctgagttataatctttttatttttatttatttatttatttatttagaaatagagactcgctttgttgcccaggctggagtgcagtggtgcaatctcggctcactgcaacttccgcctcccaggttcaagtgattctcctgccctagcctccccagtagctggaattacaggtgcaaactaccacacctggctaatttttattagagacggggtttcaccatgttggccaggctggtcttgaactcctgtcctcaggtgacctgcctgcttggcctcccaaagtgctgggattatagacatgagccactgcacctggcctaatcttttaaaatagggatatctaaatccatttatgtttatcaaaactaatgtctttgcattaattgcatttctgacttttttgtgtttttcttccttgatagctttttggtcttttgttatgtgtactatggcttgtttgctccatcctctacagggatttagaatgtctatgttgtatttacaatgaagtttttggactataaggtttaatacactataaactgaaatatagaaccccatcgtgatcttgaaaagtccctcatccatgatgctgttagtgattagatctagattttcgaggttgatttgtattgctttccagaaggattttgttatttaatttttttgtattgtcatggtacctttttattattaaagatgattctttagttttgttatattttttcttttttgttgctttacttgtgtttgttgattttttaaatcctaatctgacagtcatactgttttaataaagatgtctaaatccatttatgtttatcataaccaacatgtttgatcttatgtaattgaatttctgacttttgtagaaagcattttattaaataaaagcaataacaatctaaacttcttagatgactttcttaactataaggggtgtgtgtgtgtgtatatatgtgtgtgagtgtgatgaagcaaatatgctcttaaattttttaaatttttcagcacatgagacagccttctcctatagttcctgctcttcagaacaaaattgcaagcaaactccaaagacctccttcagttgacagcatcatacgttcctttattcatgtatgtacttttgtttttatttgttcatcctagctcagttattttggattgggggatcgaatgaaattttctttttcattatatttggataggttaaattttttcagatctgaaatataggtgatatctacagtaatttgcctgctgcttcgattgtaactgatagtgcttggtgccctaaagtttcttttgacaaaccataatttagcccctcaagctaggtagctgtagatatgctcattgagtctgttatactttagattgaactacaaggaaaagagaacatggaaaatgttctaagattgatcctcaaggtgatgcttgaagaatatgcaggaatttgccttgaagaggagggtgagggattatcagcttgtggaaagtcgtggagagcaatgtaagctcatggcacatgtggagaatcttccatggtgtggtctggcctgatgatgcttgtgcattaaggcagcagaggaggtggaggtcagaacatgtgtggcatgctgtacggagtgctaagagctttgattttgttccataggctggtagattccagacaggctaattagcagaaggtaaagaaatgtgtcagaagaacatgtttctgaattccaccctttgagattctgatttagtaggtctgtggtagataatgcataggaattcattgtaatatttaagtaggggaatgacatggccacttttgtataatgtttttttaggcaatggtgtggagataagttttggaggtggggcaagactaaacatggagataagatgcttttgcacaagtccagatgtgagactgaggacccaaacaaaggcagtgacaccaagaactgtgaaggtgtgacagctttatgatacatttaagagacatagtagtactatttgttgagtgtgtggtgggtaggagtctatgataactttcaagtttttggtgagggttacatagagtaggcagttgaaaatatgaattgtggcagcagaatgagttctggactcgatttgtagttctggacgccatcaacatattggtgcttgttaaattagtgccattgtctacgatgagtgtctacaagagaagtaaaggaggctgagaatagaatactgggaaattaccaacatttgagaagcagtgaaaggaatggacagagggtgagagaggatggcagtgacggcagttgcgactggccaagtaaaatgcccactgaatgtgtcacttgggggtcacttgatgactttggtgaaggcagtattgttggagtgatgggtgtgaaagcaaaggccatagctgtgtgttgagaagtgaatgagagtaggcagtagacccaaaagtactgcatttactgttctttaaggaagctcagctgtgaagggaaggacagaatggacaggagacagtgagcaatgaaggatgaggtaaaatttttttttaagaaagggagaggtttttacacataggctgagaggaaggtgcttggagagaggaagttggaaaaaagaataatcggaggagaatgggagtcaattatcagatacagagtacaggtgaagggattctgtttgggtagaggcaaggacacttccatcgtgatgagaaggaagaatagatttacatggtagatacactctagaatagatataaaaggtggatatactctaccttgggtagagtatagctgggtaagttttggaggtaggatagtgtggagtttggtttcctttacatataaatacttcaaaaaattactcccttcaagcttctgtgtagggaagacatactgaacatgtctttgtcattattgttgaacaggaaagttccatgtccagggcacagtcacccccggtacctgccaggaaaaatcagctccgtgcagaaggtagagttaactactaaacctgttacctagagtatttctctttttaacttttcattttgaaataattataaactcatagaaaattgcagaaacagtatagagcggttaggtgctgtgtacccattctccaactttcccctggggtaacatcttagatagtatagtctcatagccaggaagtggacattgatgtggtccacagaccatcagattttaccagtttttacatgcatttatgtatgtgtatttctgtgcatttttatcatgcacagtttgtgcgactaccactgcaatcaagatacagaactgttccatcaccgtaaaggaacttccttgggcctctcctttatagttgcactcccccaagaatatcgcttctgaaattcctatattataaaaaatgtacttgtgggtcctaatgacgttcacaattatgatccatgtatgtgtgtatatataaaatgttaaaatatctttcataaaattgtctctctgagcagtttcactttattattagtcaggttgtgttttaatgtttagtcttttgttcttattcctgtcttgtgttttacttatcaatgggaatttgcagaggagaaaaaaaatgtaattatggaattatcagaaatgagaaaacagcttcgtagtgaagagaggcgtctacaagagcgattgctacacatggacagtgatgatgaaattcctatcaggcaagtttagaattgcagtttttgtgttcgcttgagttcttttatcttacttcacctatccagtaattttgtagtttgggaacaggactaattcatcttacttaaaatctccttactttccttttctttgtcttttacaaaatcagctgtagaaatttagttctcaaggggattcatgtaggaatggaaatttccgggttggaataattacagacagtagttgcattttagaactgttttttatattttccattaataacgtagctttctgaaatactttttttcaacaaaatcacgtacgggctaccgaacatttctgatcatttttgccaggagtcataaatttcatgaagcagtgttcttcaaacttcagtttgcactgttttagtaggttgtaaaatcaacatagtgggtaactaccacattttctttctttctctttttaaaaataaactttctattttggggtaattttgattataaaaaagttgcaggctgggtgcagttgctcacgcctgtaatcccagcacttttgggaggccaaggtgggcggatcacgaggtcaggagatcgagaccatcctgtctaacacagtgaaaccccgtctctactaaaaatacaaaaaattaactgggtgtggtggcacgcccctgtggtcccagctactcaggaggctgaggcaggagaatggcgtgaacccaggaggcggaggttgcagtgagccgagatcacaccactgcactccagcctaggtgacagagtgagactctgtctcacgaagaaaagttgcaaacaatacagagagtttctgtacacccttcatccagttttccctattgttaacatcttatattaccatggtatgtttgtcacaactcagaggctgacattagaacattactatgaactaaatttgagactctttggatttctccagttttctactaatgttctccttctgttcatgggccccatacaagatgtaccacattgcatttagttgtcatgtctcccagtctcctcgggtctgggacagtttaccagtcttctgttgtttttcttgtgaaagtctagatgggcactggccaggtatcctgtagaatgcctcctcctccagtctggatttgactgatgttttctgatgattagactgggattaagggtttctggaaagaagagcacaggcattgttctgacatcacatcatcacattgtatcaggggtacatgatatccacatgatacctctggaaatgttaaccttggttaaagtagtgtttgccaggattctccactagaaagttaactattctttggtcacaaatgactaaatctagcgcacctgcaagagtgagaagggggtggaattaagcttcatctcttggagcaggggttacctatatacagtttttagaattcttccataagaaagacttgtgtcttcttccatttatttatttattcaatcgtttatttattactgtcatctcatgtatatttatcatatactttgggttataagccagtgctacattattttatttcacaaattgttccaactttggccattgggagctctttcaggttggctcccgtgtctctttgacatgtccccatccttttgttttttgaagacttctttccagatgcctcaggatcatcttgtatttcccctgccccatccctagaatcagctatttctccaaggagccctggttccttttggagaatgtatttagaaaccagataagctgggtctgcttattgctgggtgtcactgcttctaggccctctggataatatatgtatgttatactaagtcataaatataaacatatctataattgttcctatgtctatttgtatacatattaagtttatgctgatgtctgactgtaatccagtatgtggtaggattttaacatagcacgttaatttgactacttatggtttgtttagatttttgtttgtattctccaggaatattgaaacaaggtaaacaaggtgaggaaatttcaaggtacagattggcttgataatgaaatgttaatccaaggtggtaattttcagtgattcaataattctcccatagtaggtcaatacgttccaagcaattgagaggtagtgttttttttctatatttacttttacagtgttataaatgccttaactgtgcagctttccaacttctaaacatgcatatttaattcagtttaacggtttttttttttttttaattgatcattcttgggtgtttctcgcagagggggattttgtagggtcataggacaatagtggagggaaggtcagcagataaacaagtgaacacaggtctctggttttcctaggcagaggaccctgcggccttccgcagtgtttgtgtccctgggtacttgagattagggagtggtgatgactcttaaccagcatgctgccttcaagcatctgtttaacaaagcacatcttgcaccgcccttaatccatttaaccctgagtggacacagcacatgtttcagagagcaccgggttgggggtaaggtcatagatcaacagcatcccaaggcagaagaatttttcttagtacagaacaaaatggagtctcctatgtctacttctttctacacagacacagcaacaatctgatttctgtatcttttccccacatttcccccttttctatttgacaaaaccgcaatcatcatcatggcccgttctcaatgagctgttgggtacacctcccagacggggtggcggctgggcagaggggctcctcacttcccagaaggggcggccgggcagaggcacccccacctcccggatggggcggcggctgggcggaggctgccccccacctcccacccggacggggcagctggccgggcgggggctgccccccacctccctcctggacggggcggctggccgggcgggggctgccccccacctcccggatggggcggctgctgggcggaggggctcctcacttcccagacggggcagctgccgggcggaggggctcctcacttctcagacggggcggctgctgggcggaggggctcctcacttctcagacggggcagctgccgggcggaggggctcctcacttctcagacagggcggccgggcagagacgctcctcacctcccagacagggttgcggccgggcagaggcgctcctcacatcccagatggggtggcggggcagaggcgctccccacatctcagacgatgggcagccgggcagagacgctcctcacttcctaaacgggatggcggctgggaagaggtgctcctcacttcccagactgggcagccgggcagaggggctcctcacatcccagacgatgggtggccaggcagagatgctcctcacttcccagacggggtggcggccgggcagaggctgcaatcttggcactttgggaggccaaggcaggcggctgggaggtggaggttgtagccagccgagatcacgccactgcattccagcctgggcaacattgagcactgagtgaacgagactccgtctgcaatcccggcacctcgggaggccgaggctggcagatcactcgtggttaggagctggagaccagcctggccaacacagcgaaaccccgtttccaccaaaaaagtacgaaaactagtcaggcgtggtggcgcgcgcctataatcgcaggcacttggcaggctgaggcaggagaatcaggcagggaggttgcagtgagccgagatggcagcagtacagtccagcttcggctcggcatcagagggagaccgtggaaagagagggagagggaggccgtgggggagacgggagagggggagggggagggggagagggagagggagacctaacggttttttgacattaatttttcttttcattaataaattcttttggcaagccaatatgatttaagaaagagtactcgagcagcgcctcaattttctcgcttgaaaattatacatgataatttctaccctttgagaatctagtgaagaataaataaatgtatgtatttgaaataaataaataaatatatgtatttgtgactcttaagttctaacttaagttataaaacatgttacatttatcatcatttagcaagaattggttaaatacatttactttggaataattttaatacatattctgattaaagacatctcagagttggttctttattgcaatttcatgaatatatgtacaaaaggaatcttgtattcactaaataatttgccatattcaactcctattatgtgctaggctcaaaacaaatgtgatgtggctcacatgtgaagatttagtaacctacttcctaacttatcagtgtataactattagcattaatggaaactagacagcagtccaatttaatggtctcttggatgtctttttagtattttgcattatagtaaatctccatagagttcctttcaccttaagtattagaggtctctgtcagccttgaccagagtcattttgtggccccagtgaatgctcccctgcaaaagggaaactccattagagcaggggcattgtctgtggggatcccagctatcttgtcttggtgcttagggaagatttaatgataaagaaatgatgggaggagtctgactaagcctcataatgaccatagcttagagctccattttcaaaaatagaggagacctagtgctgactgaagcagcagtaggtattttattttattttattttattttcaggactagaaacaccatccctcttttatcatcactccctcaaagccctggcagaaaacacccttactacctgctatctattaatttcttaggtaccacaggaatcagttaactagttaggttatcaagttccttgtaaagtccattgtaaagttaatgttgggtcctctgaataatgcccatattgaactacgtattagtaccatatttctgtttttatttttatttttttgagacggagtctcgctctgtcacccaggctggaggcatgatcttcggctcactgcaacctctgcctcccgggttcaagtgtttctcctgcctcagcctcctgagtagctgggattacaagtgcccacccccacgcacggctaatttttgtatttttagtagagacagggtttcaccatgttggtcaggctggtctcaaattcttgacctcaggtgatccacccgcctcggcctcccaaagtgctgggattacaggtgtgagccaccgtgcccggccagtaccatatttctttttatatttttggagacagagtctctttctgtcacctaggctggagtgcagtggcatgatcttggctcacagcaacctccgcctcctgattcaagtgattctagtgcctcagcctcccaagtaggtgggactacaggtgcaggctaccacacctgctaatttttgcattttttagtagagacgtggtttttccatattgcccaggctggtctcgaactcctgagttcaagcaatacgtcggcttctcaaagtgctgggattataggcgtgagccacagggccctgcctattaccatatttctatgtgtgatttgtgtcttaggctgaggggaaggtaatttattgattatctaatgcatgtcaggtactatactaggtacttaacagtatagcatttatctcaattctgaccggatatggtggctcacccctgtaatcccagcactttgggagactgaggcggatggatcacctgaggtcaggagttcgagaccagcctgaccaacgtggcaaaatcctgtctctactaaaaatacaaaaaaaaaaaaaaaaattagccgagtgtggtggtgcgtgcctgtagtcccagctacttgggaggctgaggcaggagaattgcttgaactgggaagtggaggttgcagtgagctgagattgtgccactgcattccagcctgggcaacagagcaggactctttcaaaaaaaaatttttttatcttaattctgttgttcaccgtaagactataaggggtagacatctgcattttacagatgatggaatcgaggtcaaactgctaataaataacagagctggtctttgaatctcagtttctctgacctcaaagactgtgatcttcatactccatgaacattttattttattttttccatgaacattttaaagtaaggctgaatcattctattgtaataaggtatcttgcatctgaggattttgaaaaatttcaataacgttataaatatgctatattttaaggtaaaggatggaactaatagagctgttcgaataatttatttatttatttatttttgagacggcttcttgctctgtcacccaggctggagtgcagttgcactatctcggctcactgcaagctccacctccttggttcacgccgttctcctgcctcagcctcctgagtagctgggactacaggcatgcgccaccccacccggctaattttttgtatttttagtagagatggggtttcaccgtgttagccaggatggtcttgatctcctgacctcgtgatccgcccgcctcggcctcccaaagtgctgggattacaggcatgagctactgtgcccggccaattttttttttttttttaagagacggggggccgggtgcagtggctcatgcacgcctgtaatcccagcactttgggaggccgaggtgagcagatcacgaggtcaagagatagagaccgtcctggccaacatggtgaaaccccatctttactaaaaatacagaaaaatcagctgggcctagtggtgcacgcctgtagtcccagctactcaggaggctgaggcaggagaattgcttaaacccgggaggaggaggctgcagtgagctgagatcacgccactgcactccagcctggcaagagagcgagactccacctcaaaaaaagagacagggtctccctctgttgtccaggctggagtgcagtggcatgatcacagcttattgtagccttggcctcctgggctcaatcaatcctctcatctcagcagtagccaggactacaggcacacactatcatgcttgactaattttgttgttgttgttgagatggaatcttgctctgtcacccaagctggagtgcagtggcgtgatcttggctcaccacagcctcctcctcctgggttcaagcaattctcatgcctcagcctcccgagtaggtggtactacaggcacacaccaccacgcccaactaatatttgtatttttagtagagacagggtttcaccattttggccaggctggtctcaaactcctgacctcaggtgatttgcctgccttggcctcccaaagtgctgggattacaggtgtgagccaccatgcctggccaacttttttttcttttttgagatggagtcttgctctgtcacccaggccggagtgcagtggtgtgatctcagctcactgcaacctccacctcttgggttcaagtgattctgctgcctcagcctcccgagtagctgggactacaggtgtgcgccatcacacccagctaatttttgtatttttagtagacatggggtttctccacgttggcccagtctggtctcgaactcctgacctcaggtgatccacctgtcttggcctcccaaagtgctgggattataggcatgagacaccatgcctggcctcataattttttttttttttttttttttgtagcgagggggtcttgctttataggccaggctggtattgaactcctgatttcaagcagtcctcctgtctgcctcccaaagtgctgggattacaagtgtgagccacagcacctgtcctagagtaattttttaataatatgatgtggtgaaaaagaccaaatttcttttacagtgaattagatgtgaactcacctatttttcctgtgaagcacatattatgatttgtcatttatctataggaaaaaggaaaggaatcccatggatatatttgatatggctagacatcggttgcaagctcctgtcagaagacagtcccctaagggcttagacgctgccacttttcagaatgttcatgattttaatgagctgaaagatagaggtgagtagattgctgctcttttaaagatgtagcagaagtgttctacccatatttaaatatctataaagatctttgtaccctttttctaaagtggaattttatctatggtatgtattttagttaaaatgaaatgaaacttatgtattctctaggtcttcagttaaccagtctggtagatgaagctttagtttgactaactgctttcttttggagagcatacagtgttaaagtctggaatggatgagatcgcatagactagtacgaagaatggaacttggcatttaatggaggatggacagacaaagatgagctcatgaaaaatactgaggagaagccagagagactggaggagaagcaggagaatgtaggatcctgaaacctgaggggaaggagtatcaaggagacaggatcatgtaaggtgaataccggaaaatgtcagttggatgaggtcattggtgacctcagctagagctttttaagtggaatgattgccgattaactttggaatgaggattgactaggaggcaagatgttggagacaataggcataagacttttagaagacccttggctgggaaagggaagggaaggagagggatcaggagctggaagagtccttagaatgtgaacgtgaggagctatgcaggagaaagaggttcaggctctaggagagggagagtgattgttgaagtgaaatctaggggatttgagggaagagttaggagaagctttgatgtagccacttagggctaatggaagagaaagtttagtaaggaaacgagatttccagggtacatgaggcctgggagatggagaatgtgtggaggaaccaaatgtgtgttgtgtaattttcctttaggcatattcagcagagcaggtgttggagcagaaggggcagattatgggatgtgtggtcgtatgacgtaggccagaaaactggaatttaggctttttatccttttgaaaatactatctgtttattatagcaaattttcaaaatacagaaagatagtaagaaggaaaaatcactttagtcaaactacctatatgtaagtaccattatcattttggatgttttctagtctttctgagcataattaaaagaaaaaaaaagataaattgtgttatttatttaattttctctattgtttttcacctagatttacacgtattatcaattacgtatactgttattttttatgctatcaaatattgattacttactatctgccaggcattgtgttaacccagtgggtctcatgaggagtttggtctgaagtcaaaactgtttgtattataaactaagacattatttgtctttttcattctcattctctcatgtgtatatagattggccagagactacatgacatgtaatgatttcatctctttgaagctagcaaaatgtgtccttgtgtattcttgtgttttaggaatctcttagttttaatttctaatatggcgtgtgtgtgtgtgacatacataagtaaagctctttggggtcctcaatttttaagagtgtaaaaaagatcttgagaccaaaaaggtttaagccatagaattgggctgttcatttccctgtgttactacatcttgccctcattcacccatgacttggtggttggtattgtttttttaatgagtttggaagcagtgaagccagggaccaatccaagtttatgtgtccagaaacttctgttaacttctgaaaatggctgttaaccattttcactattttgttcttttgataatttctgatcataaagctttatacatatttaggaccataaaactacatatatatttaggatcatttctttatattccagcagtgtaattagtgagtcaaagggaataatattttcaaggctttttatatgtatgaactgtatgtttcttctcaagattaaaaaatttttattcttggccaggcacagtggctaatgcctgtaatcccagcactttgagaggccgaggcgtgtggatcacgaggtcaggagttcaagaccagcctggccaacatagtgaaacctcgtctctactaaaaactacaagaaaaattagccgggcatagtggtgggtgcttgtagtcccagctacttgggagactgaggcaggagaatggcatgaacccaggaggcagagctggcagtgagccaagaccgtgccactgcactccagcctgggcgacagagcaagactccgtctcaagaaaaaaaaaaaaaaagaaatggcattccccctcaagttccagccagtctacatttatcttgctttctgcatgatatttgtaaggactaaaatattaattggccagtaacattattttttcacgtttccagtatattttagagatcagccgtgattacagtgtctcatggctgccttagtcatagccatgtgaccatctgcttggatatacctgcacgtagtctgtgttctgggtggcatcctggcagggctaggacaggtagagatggacaatgcaacatccactgcttgttctggggtattccttatgttggtaagtttgtgaaaagacacttattaaagaatattaatttcatattctttagttttgtggctattttactgtcctttgactttagtgatgtttcactatttctatcatttccttgattttgaaattaggttactcatgttacttacagtgaagttttacaaaatcccatttgaaaacaacatttaacttagttatataacatattttttataccagattcagaaacacgagttgatctgaaatttatgtacctggatcctccaagagatcatcacaccttagagattcagcagcaagccctgctaagagagcagcagaagaggctgaacagaataaaaatgcaggaaggtgccaaaggtaagaaataatcattgctgtgtcaaatagtatcagcacgctgtttttccgtaggctttctgcatctcttctattgatttcattcccaggcatcctcctttcactggcagccccatgctcacagggtccgtttggtctgtagtaccagaaaagaacaagtatgagagagagctctgagtggctccactagggtggtgtattcatgcatgagaggggcccagtcattcactgtagccaggaggactgaatactttgaccaggccaggtgacgtctgcatcaggaactaggaaccaaaggaaggagtgtcaggcagacatatcagtgccctgtcatgatgtgtcgggcatttgcctactgtgccatgtcaggcatttgtctactgtggtgtgagtgtgtttaagttttgatgtggcgtaaaatctgtaaagcatcagactggactatgaatatgttttcgtataatcaactaactgaaagatacttagtggttactaggagtgcaggtactggcctatatccaggggatatggtgatgagtgacatatgctgctgctcttgaggaggttatattttgttggagaagtgtgatgctaaagaagtacaactgtgatgaatatcgcacagaagaaatctaggatgctgttgggttggggtgggtgggcacctagaagcagagtggggctagttgtctcagagagcactgatgggccctgacgatagccaggtgtactgcatggccttcccatctgtatttcaccagccttcaggccatcgaggttaaccatggaaaatgagtaatgaaaacccaacaatcagataacaagagtggaagggatgctcctgctagttatttttaagaaaagttaagaccctatcttgggaggctggtctggcttgcagaatctgaggaagattttttgacttcatgagatagcatcacaggagtaagtgatgcagcagtttaggcccagatcataggtcaagacttcaataaacatttgtatagggattgtcgtcccttcatctggtacagaatttttaataacagcctcatagccctgtgacagaataagcctaattctaggataagcagtaggtatatcatctggagagaggagagaagcaagtgcattcttcaacctttgtacccagtctggtggcatttttctttagtctcaaaatgaagatctgatcttgtgggattttggcagcttagactgattagcccacaagtagtccccatgtggatacaggtacattttagcactgaaggtatctatctcccacagcagccactccccaacttccagtagacactatgaagacctaattcataggaatatgacctcactggccaggcgtggtggctcacacctgtaatcccagcgctttgggaggctgaagtgggcggatcatgaggtcaggagttcaagaccagtctggccaacatagtgaaacccccgtctctactaaaaatacagaaattagctgggcatggaggcgtgtgcctgtagtcccagctactccggagcctgagtcaggagaattgcttgaacccaggaggtggaggttgcagagagccaagatcgtgccactgcactccagcttgggcaacagagtgagacttagtctcaaaaaaaaaaaaaaaaaaaaaaagaatatggcctcactataaacaatcacaaacatgtctattaaaatatctgagaaggaatacaggctatcattcgcagcttgtttattttcaaaggcagtatctaaaaagggcaaaatgtactattcacaggaacacataggaaggctggtcatattggagaggctttgggatacctgatccaagatctttgcctctggaactaagtgcctggaattgagcttatttcagttccatgtgagggagcccctgtttaactccatgcaacaactttctacagattgtagaaatctgacaagatggtgaaggatcctgcattgatcattttctttttctgttggcattagttttacatttgcaatgattttacttgttatgttcattcatgtgaatgggagaattttatgcagctagaatggatgcagggctatgttttttaataagtgatatctttaaaatactctgaagtgtgatagttgaaaagtaatttccagtagagagctagtcaaaaaagatattctaaaatttaatttatatagtaagcattttctgaccttttaatttgcttttgttctccattgactacagttgacttagatgccatcccaagtgctaaagtacgagagcaaagaatggtaagcaaccagttacaatttttcaagttagtttttgggggattaaaaatctttaggcatatgatgatcaagtaattcaaattttgaattattcaggaatattgaattaagaacgtaagtcttatcagtaaagtggatagcttgagaagtgttagtgtaatatatatagaaaacatattgtaatggctaagaacaagattctagcactaggctgttccagtgagtctatttttagctgcgtgacttagggcaagttatttaatctctttatgcctcagcttcctaatctgtaaaatgaggataatagtacataaattaatatttgcaaggtacttagagacaggcctggcatataagttttatgtaagtgtttattaaataaataaaaatagctcaagtgctgttgtgagaactgagataatatattaaaagcccttacagcagtcctggcccattatgagtgcagtgtgagtgtttgctgtcattaccatgagcagtagtgggagtaggagtctgttatggaagtagtgttgaggtctacaaagaaaataagcaaaggaagggaacagagaatgataacacccacctgtatcctgaggggggtactttttgtgcaagactgaataaagggacaggatgagctcttttcaatcaacaaatatttattatttcctatggacaagaaactgttctaggtgccggggtataggagtaaacaaaagggacaaaaatccctgtcctgtgacaggttacattccagaaggagggagagacagtaatcaaataaatcaatagttttttgaatcatggtgctgtggagaagacaacagcagagaaggcagctggaggatcctgggtgggagggtttatagttggaaatacagtgggcatgggggctcactgggtaggcaacatttgagtaaggacatcagggaggtgtctatgggaaatgtgggggaacttctggaggaagaacattccaggaagaggccccagtggaagttggcctagtgcatgtaaggagcagtgggagagccatgagcaagggccagttgggcacatggggcagggggtgacgaggggaggcagcagggccttgggggccattctgggactttgcctttgacacttgtgcatgtgatgggaagctgccaaggtctttaagtggaggagtgacatgatctgcttgaggtttttacttgatccactgactgctgtgcattttgactgagtgggacaggaggctattgtagtaatttaggcaagagacaagctcactttctgattaaagaatgcagtgcatcattgtaattcattgccttaaaaattaatggacagctctttgctggagtgtcctactgaagcccagattatctggtaagaaggtgcagggaggtggagttggatgactttaggttccttctgacatgttggttattattctgtactgcaaaattctctatatgtaaatttaagttttctctaatttgggagctcattataataagcccaatcttagcattttttttcgttactatactatatgctccactatatctgtgctgcatcattgtggcaattgctgtcacatagggctgtcataatctgagagtatacccctctctctcccatgacactgtgatctactccagagcagaaactcttaattcatctttgtatccccagttcctagcatgaaagaaatagtaagtgggctatacaggtttatggaaattcggatgaatgaatcttggcagtggcttaaagacttaatgtttaattggggtctttgcttcatactgtattatattttccatcagtcataatgtgatccttttatttgacttcaaccataaaggggcaggaaggagtggagctagggagtaaatgtgttagcttgtagaatctgtagcctggagagagactgtcttctgttgctatcaccgtcttcgtaggaattgtgtgtgttaaggctttccagtattttctgagcattggaatgtagtcagtcctacctctacccatcctctgcttttagggagaacagtgtggaaacttgtgcctcttcttagtataaatttgttgtttttgtacacaaaactaataaaaatagtcattgaaacatgtttcttttagcccagagatgacactagtgatttcttgaaaaactcattattggaatctgatagtgcttttattggtgagtatatttattttattaaggctatattgtttaaatattaaacctttctccacacttaaaaaccagtactgtattccttgttgtacaaggtagtaaaaaaaaaaaaaggaatattcttttttctgttttaatcagatatgccttggaaagttttcaaaatcagaattactgaaatgaactttaaaagtcttaggaatagttgacaaacctgtacatgaatgttcgtaacagcctcatttctaatgccaaatgctggaatcagcccagatgtccttcagtagatgaatggttaaaaaaactctggtacatccatgccatggaataccacttagcaataaaaaggaacaaagttttgaaacttggatgactcttcagggaaatagtctgagcaaaaaagacaatcccaataagttacatactactgtatgattcaatttacataacatttttgaaattacaaaattaagaaattgagaacagattagtggttgccaggggttgagggatagggagaggtgtatatggttataaaagggcaagaagagggatccttgtggtttgggaactgttttaacaacttgtttgcaggggtagatacatacatgtaaatgggaaataaaataataataatagatcttaatacacacataaaaacacacaaatgagtattggtaagatggtaaatttgaataagatctgtggattgtatcagtatcgatatcctggttgtgagattatacttgagttttgcaaaatgttaccattgggggaaactggacaaagtgtataaggaatctctactatttcttatacctgtgtaccttaattattttaatctatttatagttctcttaatatttcagtcaaaaaagtcataagacttttatttagtcttcagaagataagtaaaggtaccatgggatcttcttttttttttaaagtagtatacacttacgattatgtactctgatcatgagtgtttctgctatcctagggccatcagggaatgatctagtctacatattagttgtatttcaggccaattactttagattttcatgtgataaaattccaaattaacttatatttttctcttaatggttttttttttgttgttgctgtttttgagagagggtcttgctctgtcgcccaggctggagtgcagcagcacaatcattgctcactacagcctcaaattcctggactcaagtgctcctcccatctcagcctccccagtagctgggactacagcatgcaccacgatacctggttatcttttttatttttttgtagagatgaggtctccctatgttgcccaggctggtctcaaacacctggactcaagggatcctcctgcctcagcctcccaaattgctgggattacaggcatgagccactgtacctggccatttttttttttttttttttttttaatgaatttttcctttccaaggaagatgcactgcggagagaaggaaagataaaaccagcaggagacagggatgggaagattgcttgtcagggaaatgagaccttccttcctaacagtgaagatggtctgggccactcaagatggtgtgttggagtattgcatgacactagagcaaagatacagcagtatttatggttaacagtcactgcaaatgctgcataagtaagtcatggctgtgttaaccactgctctaaggaatgtaaagctgatggtttcagtgcattattttaaaaaatagggtttttaaaattgtaaaatacacataaacataacatttaccattttaaccattttaaagtgtacattgactggcattaagtatttctattgtgcaaccaccactatcatccatctccagaattcatcttgaaaatagaaactcttcatatgaaacagtaattccccattgccctctccctccagcccctggcagccaacattgtactttccatctccataaatttgactactctaggacctcatgtaagtggaatcatacagtatctatcctttgatgactggcttatttcacttcacataacatctttgaggtttatccatgttatagcatgtgtcagattttctttttttaccccttagagacagggtcacccttgccacccaggctggagtgcagtggtgtgatcatggctcactgcagccttgacctccctgtgctcagatgattctcctacctcagcctcccaagtagctgagactacaggcacacactaccatgcctgaataatttttgtattttttgtagagacagggtttcaccatgctgcccaggttggtcgcgaactcttgagcttaagtgatcctcctgcggcctcccaaagtgccaaagtgctgagattacaggtgtgagctaccacacccagccagatttcccctttttttttttatgctgtgaataatattccattgtatgtgtgtaccacgttttgtttatccaatcatctgtcagtagacacttgagttgcttccaccttttggctgttgtgaataatgctcctatgaataggtgtacaattatctgttggagtcactgctttcagttcttttgggtatacactaagagatagcatttgctagatcatatagtaattctatttttaattatttgaagactcaccacattgttttccacagcagctgtaccattttacattcctaccagcagtgcacaaaagttccgatttctctacatccttaacacttgttactttgttttttgaatagtagcaatccttacgggtgtgacgtggcatctcattgtggttttgacttacatttctgtaataattagtgatgttggacatctttacatgtgcttattgactaattgtacatcatttttgaagaaatacctatttaagacctttgctaatttttaaaatcagagtttttttgttattgagttgtgggagttctttattatctattctggatattaccccttatcagatacatgatttgcaaatgttttctgcatagtgggttgccttttcactgtgttgattgtgtcctttgatacataggagcttttaattttgatacagtccaatttatcttttcttttgttgcctgtgcttttggtgtcacatctaagacatcgttgccaaatccaataccatgaagctttcctcatatgcttgcttctaagagttttatctataggtttagctcttaatgtttagatgcctaaccacagagtgtcaaaatacatgtcagaaagcaaaagaatggcaaggagaaatagatgaatccactgttacagttggagatttttaacacctctctatcagaaatggacagagacagaaaatcagtaaggacgtagttgagttcagcaacaccatcaaccaactggatataatggatgtcgaaagacaacttcattaacaacagcagaacccatattcttctcagggtcacatggaacattcaccaggacagattacaatctgggcaagaaaacaaaccttaacagatgtaaaagaagataaatcacacaatatctgtccccagaccacaatggaaataaactagaaatcaataacagaaagatagctggaaaaatctccaaatactttggagattaaatgccacatttctaaataacgcataggtcagagaaaaaatatgaaaatacattttaaaatactttgatctaaatgaaaatgaaaatacaacttctcaatttgtaggaggtagcagaaataatgcttgtctttctttctactttcctaatgtatgcattcagttaaatgtaaaatgccaaactctaaaactcacagaagataccaacagaaaatctagacgaccttggatatggtgatgacttttagataaaaaaccaaagccacaatttatgaaagaaataattgataagccagactatgtaaaaaattgggaattttttttttttttttttttttttttttagacaaagtcttgctgttgtccccaggctggagcgtgatggcgtgatcttggctcactgcaacctccgcctcccgggttcaagcgattctcctgactcagtctcccaagtagttgggattacaggcgcctgccaccacgcctggctaatttttgtatttttagtagagacggggtttcaccgtgttggccaggctggtctcgaactcctgacctcaggtgatcccccggccttggcctcccaaagtgctgggattataggcgtgagccactgcgcccggccaaaaattggtaaatttttaaggtgcttaaatttataggattgactgtgcatacatgaagaaagtagaaagatctaaaatcagtattctaagcttccacataagaaaattagaaaataattaaatccaaagtaagcagaagaagagaaataaaaattggagcagaaatcaatgaaattgaaaacaggaaataaatagagaaaatcaatgaaaccaagagttatttctgagaagatcagtaagcctctagccaagctaataaaagagaagacacaaattactaataccagaaacagggcatatctagctgggcatggtggctcacacctgtaatcccagtactttgggaggctgaggtgggcggatcacctgaagtcaggagttcaagaccagcctggtcaacatctctactaaaaatataaagattagctgggcatggtggtgtgtgcctgtagtcccagctatctgggaggctgaggcaggagaatcacttgaaccaggaggtggaggttacagtgagctgaaatcgtgccactgcactccagcctgcatgacagagtgagattctgtctaaaaaaataataataaaaaaatataataataataataataataataaaggttggggggcatatcactacaggtcccatgaacgttaaaaacagtcggccgggcacggtggctcaagcctgtaatcccagcactttgggaggccgaggagggcggatcacaaggtcaggagattgagaccatcctggctaacacggtgaaatcatgtctctactaaaaatacaaaaaaaaaaaaaaaaaaaaaaaggtggtgggcacctataagtcccagctgctcgggaggctgaggcaggagaatggcgtgaacccgggaggcggagcttgcagtgagctgagatcgcaccactgcactccagcctgggcgacagagcaagactccgtctcaaaaaaaaaaaaacaaaaacaaacaaacaaacaaacaaaaaacacaacatagtccaagagcctggtgtgattccgttctgcatggctgttctcttgagaagtggttgtttatctccgtccaccttctttcccacctaagtgcatgccaccagccaatggaagatttgatgagccctgaggccccagaactatcttttcggttgtgaactaaaggccgacaaagattatcactttaagatggataatgatgaaaatgagcaccagttatcttaaagaacgttcagtttaggggctggtgctggtgcaaaggatgaattgcacattattgaagcagaggcaatgaattacaaaggcagtccaattaaagtaacactggcaactttgaaaatgtacagccaatggtttcccttgggggctttgaaataacatcaccagtggtctgtcggttgatgtgtgcttcagggccagtgcatattagttgacagcaattagtagctgtggaggaagatgcagagtcagaagatgaagaggaggatgtgaaactcttgaagtatatctggaaagcagtctacccctggaggtggtagcaaggttccaaagaaaaaagtaaaacttgctgctgctgaagatgatgaagatgatgatgatgagtttgatgatgaggaagctgaagaaaaagcaccagtgaagaaatctatacaagatactccagccagaaatgcataaaagtcaaatcagaatggaaaagactcaaaagcatcatcaacaccaagatcaaaaggacaagaatccttcaaaaaaacaggaaaaaactcctaaaacaccaaaaggacctagttctgtaggtcctttgcacttaaagcaaaaatgcaagcaagtataggaaaaggtggttctcttcccaaagtagaagccaagttcattaattatgtgaagaattgcttctggatgattgatcaggaggctattcaagatctctggcagtggaggaagtctctttaggaaaatagtttaaacaatttgttaaaaattttccatcatttcatttctgtaacagttgatatctggctgtcctttttataatgcagagtgagaactttccctactgtgtttgataaatgttgtccaggttccattgccaagaatgtgttgtccaaaatacctgtttagtttttaaagatgcaactccaccctttgcttggttttaaatatgtatggaatgttatgataggccatagtagtagtggtggtcagacatggaaatggtggggagacaaaaatatacatgtgaaataaacctcactgttttaaattaaaaaaaaaaaaaaaaagtccaagaataccatgaacaactctatgcccacaaatctgataacctaaagtctaccacccatttatggtaactcagcaaacttggaatagagggggaacttctgcaacttgataaagaacatctacaaaagtcctacagctaacatcataatgatgagaaactagaagctttcctgctaagatcaggatgtcctttctcaccactgattaacatcatactggaagtcctagcttaatattagcagtaaggcagaaaaggaaataaaaggtgtgattggaaagggagaaatagaattgtttttcttcacagatgacatgattgtctatagaaaatctgaaggaatcaactaaaaaatgcctggaactagtaagcagttataatcaagttgtgggatacaagatgaatatataaaagtcagtcactttacaatatgccagcaatgtacaagtgaaatttgaaattaaaaattaaaaacacaataccacttacattagcattcccccaaggaatactgaggtataaatctatctatcatctatctatctatctatctatctatctatctatctatctatctaatctatctatctagaactgcctgaggaaaactacaaaactgatgaaattgaaggactactaaataaatggagatatatttcatgaccatgcacaggatgactcagtattgtcaagatgtcaggtcttctcaacttgatctatagattcagtacaatcccaataaaaatcccagcaagttattatgtggataacaacaaactgattctaaagttcatttggaaaggcaaaagatccagaatagccagcacaatgtttaaagagaagagttggaggactctcacagctgacttcaagagttatgataaagttataataaacaagacagtgtggcattggtgaaagaacagacaaatagaccagttgaatggaatatggagcccagaaatagactcatgcagcctgggcacagtggctcacacctgtagttctggaactttgggaggctacttgaggccaggagtttgagaccagcctgggcaacaaaacaacaccttgtctctacaaaaaaaatattttaaattagccgatgtggtggcacacacctgaagtcctagctatttgggaggctgaggtgggaggattacttgagcctggaagttcaaggctgccgtgagctatgatcacgccactaaactccagcctgggcaacaaagaaagaccttgtctcaaaaaaagaaagaaatagactcacgcaaatacagtcagctgatctctgacagaggaccaaaggcagtactgacaaaggaccaaaggcagtattatgatggagaaaagatagtcttctctacaaataatgctgggacaacaggacatctgcatgtgaaaaaataaacatagatcttacgcccttcacaaaaattaactcaaagtcgatcttacatctaaatgtaaaatgctaaattgtaaaactcatagatgataacaacagaaaatctagatgaccttgggtatggtgatgacttttagatacaaaaccaaaggcacaattcataaaagaaataattgataagccggactttgtaaaaatttaaaacctgctctgctctataaaagacactgttaattaagagaatgagaagacaggacagagactgtaagaaattatttgcaaaagacatgtcagataaaggactgttatccaaaatacacaaagaaatcttaaaactcaacaataagaaaacaaaatacctgattaaaagattcagcaagacttgcaccacacatcaccatacagataacaagacaaaggatgctactgagagacaggactagctggatttcaaatctaggccgactaagaattcctaagcctagctgggaaggtgactgcacccacctttaaacacagggcttgtaactcagctcacacccaaccaatcaggtagtaaagagggctcactaaaatacaaattaggctaaagcaggaggtaaagaaatagtgaaatcatatatcgcctgagagcacagggggagggacaatgatcgggatataaaccccaggcatttgagctgggagtggcaacccgttttgggtcccctcccattgtatgggaactctattttcattctattaaatcttggaactgcatgctcttctggtccatgtttgttacggctcgagctgagctttcgcttgctgtccaccagtgctgtttgccgccgttgcagacctgccactgacttccacccctccggatctggcaggatgtcctctacacttctgatccagcggggtggcacccactgctgctcccaatcaggctaaaggcttgccattgttcctgcacggctaagtgcccgggtttgtcctaatcgagctgaacactagtcactgggttccacggttctcttctgtgacccacggcttctaatagagctttaacattcaccgcatggcccaagattccattccttggaatctgtgaggccaagaaccccaggtcagagaacaagaggcttgccgccatcttggaagcggccctccaccatcttgggagttctaagaacaaggacccgcctggtaacacattaaagaatgtaaattaaaatgagataccaccacatacctgctagaatggccagcattcaaaacactgacaccaaatgctggcaaggttatggagcaataggaactctcattcattgctggtgggcatgcaaaattgtagtcaattttggaagacagtatggcagcttcttacaaaaataagcatattcttaccatacagttcagcgtatacactccttggtatttgcctaagggagctgaaaacttgtccataaagaaactggcacacagatacttatagcacctttattcataattgctaaaacttggaagcagccaagatgtctttcagtaggtgaatggataaagtgtggtacatccagacaatgcaatatttttcagcactaaaacaaaatgagctactaaaccatgaaaaggcatggaaggacccaaaacttattttagaattatagaaagccccatatcttattcaataaaagttattcctatttttaaaaacccatacagtatacatttggaaaatctgaatatcaattatatgttaaacaatgatagtgttgtataaatgttaaattttctgaatgttataattagatttttgcagtgtaggagccagtccttgttcttatgaggataaacactgaaatattgagagacaaaatgccatgatgtcaccaacttattggtgtagcaaagaggcttggcaataacatcatccccccaaatatatatagaaattggcaaagtaactaatggtgattctaagtatttgtattattctaacttttctttaggtataatttttttcaaaggagttgcggaggttaccgtagatgttgtaggctatttgtccatgtcaaattagctaccgatccactagaatgattataagcaaaaagaccgacaataccaagtgttggtgaggatgtggggaaattggaaccctcttacaatgtaaaatgtaaacaggttggtagttcctcaaaatgcagagtagagttaaccataatacccagcaatttcatttctggttctataacccaaagaaatgagaagatatgtccacacacaaaaacttgaatgtgaatgttcatagcagtgttattcataattgctagcagctagcaaatgtccatctactggtaaatgcatagacaaaatatgacgtatccatatgatggagtattattcagcagtaaaatgtaataaacaacttaaacatggcacagcatagatgaatctcaaacaccttattgctaagtgaaaagacaaaagattaagttgtagaattccatttatgtttggtgttaggtaaggtaaatctgttgaaacagagccgtgtttgcccggggccagcaggtggggagtgattgccagtgtgcacaaaggagctgtttaaggtgatgaaaatgttctactttaaagtgatgattgtacaactctgtaaatttactaaaaaaatcaccgaactgtgtatgtacatacattgagtgtgtttcatggtattgtaagcaaaatcttagtaattaaaaggctcttggtttagctctgggtaagatttgaagcagtattaagactccttctgcttttcggggtcctcttaggggcttacggtgagacatatcctgccattgaagatgacgtcctccctccaccatcacagttgccctctgcacgggagcgcaggaggaacaaatggaaaggactagacattgtatgtatgagacttttctcccccttttcaacttagaagaatgagaggtctgggttctgacctgtgctaaatctgtgtggcccaataaagagcacttgcttgaaattcagacatgggtctgaatctaggctctgccttgactggatgaccttgggtagctattgaattctgctgctttggcttcttccagataataatagtattttcttgtctcctggggtggctgtaagtagctcctcatcccaaccttccttcttctcctgcagaatatatggatttcagagaggcacaagaaggaactgatgtcatttattgaaaagcttcataataacctaattctgtgatataggcatcaccttcatttcggtcaaatgacttgccaaggtcacatgggcaagaaggctgagattcaaacccatgttctcctcactctgctccccagctttacaatatagccagtaaaaagtagaggctttggagtttatgtcccagcaatgtcacctccttgttgagtaggcagcttgggcaatttcttaaactctgtgtgtgtttccttatatatgacgtgaagatgcagttatatgtgaagcatttagcactgagccaagtatgcagagacctcaccaagtaacagatgttgctattagcgttattatatgtacagcattaccaggtgaaaatagctttgctttttgccttaggcaaccaccagtctactttggtttctatagatgtgccttttctggacatttcgtataaatgagatcatacactgtatgattatttgtgactggatttgtctttcttttgaaggtcattcatgttgtagcatgtgccagtactgaagcctctttagtgttgaataattttccactgtattagtatcccacattttgtttatccatttaacaatagatatttgggttgttttcactttttagctagtatggatactattaatgttcatgtagaagtttctgatgtttttattactctcgaatatatatacctagaaggaaattgttgggttatatggacactttgtatttagcattttgaggaagtaccagacttttccaaagtggctgtaccattttaccttcccatcatccactgagggttgtaatttctgtatatcctggccatcacttagtgtcttttgattttagccatctattgagtgtaaagtggtgtcatggtggttttgagttgcatttctgtaatgatattgaacatcttttcatggtttattagccagttgtatattttcttaggagatatgtctattcaaatcctttgctgatttgtttttttttttgttttttttttttgatacagagtcctgctctgtcacctaggctggattgcagtggcgtgatctcagtgcactgcaccctctgccccagtggggttcaagggattctcctgcctcagcctcccaagtagctgggattacaggtgcatgccaacacgcctggctaagttttgtatttttagtagagttggggtttcgccatgttggccaggctggtcttgaactcctaacctcgggtgatccacctgcctcggcctcccagagtgctaggattacaggcatgagccaccgcgcccagccctttgtccattttcaaattgaattgtctttttattgagttgtaagagttcttttacattctcactacaagtctagttatcaatgtgtgattttcagatcttttttcccattctgtatctttttaactttcttgatggtgttctttgaagcacagaagtttttaattttgatgaggtccaactcatcactctttcttgggcttttggtgtcttaattaagaaaccattgccaaccacaagatcatgaagatttacttgttttctttcagtttgttcttaattgtaggtccatgatacactttaatttttgcacagggtgtgaggtgcaggggtccaagtccattcttttgcatgtggccatccagttgttctagcagcatttgtttaaagactgttctcccactgcattttgttaactccgtccataaacgtaaggatttatttctatattcttcttaatcttccattgatctacatgtcttttcttatgtcagtaccacactgtcttgattatagctggactaagcccctgctgcttcagttttttccttttgtgtcctataattctcaagctttatcctgactggcagcatttctgtcatcacaaatgttactccttatccttgagagtcatctgagcttgcatggataagcataggagccataatatacgtgctctatattttcatgttttattttgttcatcacagtgtacatttgagggcaagaggatgttttgatttgctggtttttttctttttttttgagatagagtctctgtctcccaggctggagtccagtggcacaatctcagctcactgcagcctccacctcctgcctcagccacccaagtagccggggactacaggcgcctgccaccatgcccagctaatttgtatttttagtagagatggggtttcaccatgtttgccaggctggtcttgaactcctgacttcaggtgatctgcccacctcggcttcccaaagtgctgggatcacaggtgataggcaccatgcctggccctgattcactgatttgtgaacatattttgtgttaatgactttctgaagttctgttttctaactacaggatagcagtcgtcctaatgtagcaccagatggtctctctctaaaatctatatccagtgtaaatgttgatgagcttagagtgagaaatgaggaacgaatgcgaagactgaatgaatttcacaataaacctattaatacaggtaaatgaccaagtgtaatggcctatagtagaatcctgtatgaacttttaaactttcttactcaaggctttcactaacgtctgagggatagatggaatgagtttgaagacctttgagttgtatggcccaagacatagtaactattgagcaaaaccagacctcaggatgcagtttgcatcagattttctctatcagagagggtgcccattttagagtggagtctaaacaggtaaaatagtttttgcttattaaacatatccaggctttgctttcagcaaagaaaatgctatatgataatagtaatcactttactaaagtaaaacattattagaaattagcctaaagactttgagttctttaacacttatgctgtatatttgcagtactacaaagaaaatttttaccttcttctttggctttccacaccatggacaaagtctcagaagtcaaataaagctagtcgtctcctcattatgagtgcatttttgtgacttgcaggttaaagctagtcatagagcacaaggcaggatggttccttagacacctaacaagctaccctgccagccctacaccacccttttctataccagtgctattagtcaccgggataatgggacactttcatattggtaataataatagttttagcaaattactggagtggtctatttgggaaatactctttagtctgttaatctacattacaataatctgttaagatttttttagatcctacctttaatactgtgttaatttaaaactgtactcatatactatctatctagcagtcaaggtgtggtgtgttctaatggtggtaattccacaccaaacacaaagcagacatggttaattgatgggacagtaggaaaggatgtctttccagctataaggcattttcttttagacccaacaaactgaattaatatttaacaggaatatatttgagggaagatagcattttaagaatctttttcagaaggtttttaatgtctacactgttttttaacattgtcctttcaaacaggagctttttgttattatgtggattgactgcacataccaatccttcacagaccaggagaattaaaaaaaaaaaaaagaatatgatatcacagggtaggaagacagattttcctattattatacctaataataaataaaagtaaaatacagatagaagttgcgtacaatcaatcagattcaattaaagaatgaagcaagagctacctcttcattgactggacacggccttgttagattaggtgttttaagaatggaagtaatctcatgccaactagtgttttcccaaaataacttaataatttccttatagcagtgttgtaggttgaagagtattccccaaaccttgctttaaaaaaaataaaaagaaaaaagaaagaaattttatgtgtagccattaggcttctcctgaggtaacagttacaaaataagactacctacattcctcctgttgactttgttttatggagaggtgcctttgatatgcttagaatccctctggttgctagtgccatggagtcagcttactcagttgatcattttttgttttacaaaattggcctttgtgggcccactctcctccctctaaaatagggtggggtggggtgagtctaaccaaaacaaacaaacagtagagttcaggatatgagactgtggggaaatgctgagttgtaatgagttggactacaagagacctgcgcttatgtctcctgcctgccacctgtgttacctgagccacgtgtcccttgcctcctgtagatgatgagagttcactggttgaccctgatgacatcatgaaacacataggggatgacggatcaaactctgtagcaactgagccctggctccgccctggcacttcagaaacgctgaaacgtttcatggcagagcagctgaaccaggagcagcagcagattcctggaaaaccaggcactttcacttggcagggcctgtcgactgcacatggttaaaataaacctgtactggacccagtagtgccttttaaggtgaaaggaatggtaaatctgtacctttaatatgtcctacttttggcccctacctgaaagttactttttttccatcatctgtatataaaattatttttatcatgatgtatattatgtacataaataaaaggccatgattattgatttatataatagaattgtatagattatttttgcacagttttgtcataaattagggtggtaatgaactggattgaactactatatgtgcattatattgaattctgcttgtcattaagataaggtgaataagtgtcttaaacgtcctgtaaaaccggactcccctttgttacatgcacattttccattgttacctcgatgcaaaagaattcatttagtaggtacatctattgtagctgtgattattccagtttctgtgtgatgcaatcaaatgtcctattaattaattattatttcatgtcatttgtagctactgatacagcagaaatgaagggaactgtaattacttgtatttttgtaagccatacgttaaatgtttgttacatcatctttctgcttctatttttatgccaatgaaggcatttgtcttgttactaattacatgatgtaactacttcttgatataaataaatttttattttaattactaaaa

SEQ ID NO: 15525 - DNA, 94609 bp, Homo sapiens
aacctcttcggtccgcgacgatcctctagagcactgtgtgtctccccggacgcgagcccgctcccctgagtaagagtcagccagccgcggatggggagcgtgagtggcgaggtgtggcctggggtggtgtaggttgagggtggagggtcctggggctgcattcgctgccccggagcgggggcaggggcagtggctccctcggggcgtaggtctcgaggcaactaggccggcgacgtgccagagttacaggctctggaatctgggggtgggggtggggtttcttgtcggcagggggtctcgtggcggctgggtgcggtgggggaggtgcccgagttaagggtgtggagagttgggatttcgccgccgtgaggccggcatcggtgactacgagttatgagggttgggggcgggagttctgtgagcaggggtcttgcagctgccggggtcggggaggttccctggttacacggtccggattcctgggccactgcggtcgctgctgcccgcggtgttgttgatagctggttgcctgacgacgcttcctagtcagccacctccagggcccgggggcgagcggttccttggttcccatgcgccttctctccccaacggccaggccccccctgctccgtcaagcctccccgagcgcctttcttgcccctcggtgcttgttattgttaacgtgggagcgcttgtgcgcactgctttgctagtaaaacttatttaatcttcaccgtagctcgtagctcgtactgttgtgaccgtatttccccccgtgattgcccgactgcttgagcttgaacctcttgtttctaactgccttgattttaggaatcttatgtgggactcaaatccagttgtcagtacatgttattaatgggactcatcttttgagagaggctagctctcaagattgtaggattaagacgcttaactaggattgcggggaagactaaattctgaagtaaaccatcacctactttccaaacaccttggaaaatgcaggggcttaaaagcaaccgataggaatttataaaaagcctaaattaggctttattctgtgtgaaggaatgacttgtaatgttgacaagctccatggaagctattgaggtattttcttttctccatatcattcttctccctaggaggtcgctagctttctggtgattaaatgtctgctgaaatgctccacaaggatcaagtttttttgtttgtttgttttgttttgtttttggagacagggtctcgctctgttgtacaggctggagtgcagtggcattagtagagaagggggtttcaccttgttggccaggctggtctcgaactcctgacctcaagtgatccgtttgcctcggcttcccaaagtgctggaattacggccctgagccattgtgcccgttcaagtttgggtcttctgccagatggccgcctgggagggagtgggtgagtttagacagagtaaattgaaacaggctactttcggtacagtttttctcagatgaagctttcagacaaatatgaattaactgttacacatttgagcagatttcagattatccttttaacatcattctgacttaggttctgatgtactttcctgagtggcaggcaagggtgtttgagcaagtgtttcagcaatttggcataacccaaaggctaatttatgctactgccgttaatcaccattaagggtgtattattaatagctactgaaagacttcaacatggttttatatatttattcactctctctttgtatcctgtctcccagcctccctctctttcccccagcaacagtatttacatcttagcaatatttagggaaatttgtcaaaattttggtgtacccatgggaggaagttgctcatgtggatgccatctgccaggaggaagatggagaacctttcattcggtagatggatctctggatggatgagaagtgagaaacattgtcctggtcactttgtccctccctttcttctaaagctctttcactggcccctccccccaccgcacatgttatcacactttgacacctgttctaggtcctgttcccctactctagggtctctttttccagacaaaactcttctcccacagccttaatgattattttaaacactgctagatctttatttccagcctgggttctattctgagttgtagacattttcagattgatttcttcgtatctccggtgtatccattatggatatctcacattcagctcctaaacccctgtcagcctctgtagcagggggcattatcttgtccaaatttgaggacaagaatcatgtttatatatatacatatatatacacacacacatatatacacacatatatatttgttttttgtttgtttgtttgtttgttttttgagacagagtctcactctgttacccatgctggagtgcagtggtgtgatctcggctcactgcaacctctgcttcccattttcaagcaatggttctgcctcctgctacacccagctaatttttttattcgtagtaaagatggggttttgtcatgttggccagcctggtctcaaactcctgacctcaagcgatccgcccgtcttggcctcccaaagtgctgggattacaggcgtgagccacggtgcccagccacattttatatttttgactacgccagcctctagcacaatgtcatgctttaggagggaagtcattttccatttctcatgctcccatagtggggaggaaatttgtactccactccttgagagggaaaaggataggagcaacattttcccatctttttgtgactgatggatttgggagaaggaattgggcaaactcagttttaactgggttctgtttgtttattggatttgactagacttagcagaatgggtatgctctggtctgcttatatctatatgataagcataaagagccaaaggttaaggtttagagatgttggtgtggattatgataaccaagtatcaattattgattatttaaatctcagcatactttacgtttgcaggctctgttttttttgtttgtttgtttgtttgttttggtttttgagacaagagtctcgctctgtcacctaggctggagtgcagtggcacgatctcagctcactgcaagctctgcctcccaggttcactccattctcctgcctcagccttctgagtagctggaactacaggcgcctgccaccaagcctggctaattttttgtacttttagtagagacggggtttcaccgtgttagccaggatggtcttgatctcctgacctcgtgatccgcccgcctcggcctcccaaagtgttgggattacaggtgtgagccacaacgcgcggctgcaggctctgtttttaagaggtaaatcttcatatatgcaaagactgtaaagatacaaccataaacaataaaagaattgatctgttgatttcttttttttttttttttgacagagtattgctctgtcatcgaggctgtagtacagtggcgtgatctgggctcactacagcctctgcttcctgggttcaagcaattctcctgcctcagcctcctgagtagctgggactacagaggtgtgccaccatgcctggctaatttttgtatttttagtggagatgggttttgctgtgttagccagactggtctcaaactcctaacctcaggtgatccactctccttggcttcccacagtgctgggattacaggcatgggccactgcgcctggcctgatctgttgatttctaagtgttaggttctctgtcataatttttatatgcattattttcttttttcttcataatatactagaataaatgatatttctgttttatagattaggcatagagcagttaaggaacatgcttgaggtcattcatgttgagatcaataagtgatagaagtatatttcaaactcagttctttcaattaaactattttcctgaaaactgtttatcatctacatactatgtacacagctactggagaaataatacttggccatgatgtcttgaaaaaagttgtgagtgactttatattgtagagtgtcatatataaataatctcatttaggtttctttcagctgatttatttttggcaacttaatccttaaattataaactttcttactctatattgtacctatgccatatttattaacccagtctctgtgattcaccaagtaattcttgaataattgtgtagttgaaatatgttttctgtaagttaccacatgcttttaggagtgagaaaaagaaaagtggccgtgatatctagaaactggtattgctagaaactagcctggcattcacagtaactttgtgtttttctgttgaagataaactattgtacagaatgtcaacatcagataaggccgctctgtgtctatgatggatcaagacaaaaacattccatcagtgtctccaaacacagacaaaacgtaaatattgtccaagaaccgagataccaaacattccctttcccagctgatgtgaatgactactgcttgtttaccagttacagcattagcctccccctatattttagatttattgagtggtaccatcatagaattaaccccacttctaacagtgttcaatcctgagcaaagctccacttcctcaaattaagccttcccccaaatcacccaacacatataagtcttttccaataccctcttaccacgataccacagggttccccatggtgtgtgttctccgtgcattccttaatgcaatgagtagtacatccaacttaactgtggtagttttcctggtgttctttggctggagatcattaccaggagaaagctcattagtgtctttgactctttaatattaaagtcattataatctaatcagattagatacaggaaaaatttagaaatgattagaaatgtacttatatctcggataaatcttatgttttagttatggcatatgctatatttactatggttgtttaaaagtatgttttatttgtactttttgtacttttgattactgtaagttaaaatcagttctataatttataatgttaaataattacagtaaagagaaagataagcatctataaattcaagagggagatctttcaaagcctggttagaacaacatgtaaatgaacatgttaaattaataattgttattaggtggtatggaaaccttagttccatgtgaaggtggcatgttactgttttttttttctttttagataaatgacatttcttttttttcttttctttcttttttttttttttgagatggagtctcactctgttgcccagactggagtgcagtggcatgatctcggctcactgcaacttccacctgcctggttcaagcgattctcctgcctcagtgtcccccggtagttgggattacaggtatataccaccatgcctggctaatttttgtatttttagtagagacggggtttcgccatattggccaggctggtctcgaactcctgacctcaggtgatccacctgcctcacactcccaaagtgctgggattacaggcgtgagccaccgcccccaacctagataaatgacatttctgtttaaattctgtgcaaaattctatagcaaaatatatgcgttatctcatcattttattcctatcagacatagaatatttagggaagattagaggattttgaggattgattgttttaaacatgaaaacttgtttgctgttgagttcagaatttttactaggaaaaatctttcgtgactattagcaaattaaaaatggctgaaataagtcgggacggtggctcacacctgtaatcccagcactttgggaggccgaggcaggcggatcacgaggtcaggagattgagaccatcctggctaacacagtgaaaccctgtctctactaataatacaaaaaaattagctgggcatggtggtgggcacctgtaatctcagctactcgggaggctgaggcaggagaatggcatgaccccgggaggtggagcttgcagtgagccgagatcgcgccactgcactccagcctaggtgacagagcgagactccatctcaaaaaaaaaaaaaaaaagctgaaataagctgagtgtggttgctggcagttataatcccagtgattctggtggccaacatggaggatcacttgagcttagcagttcaaagttacaatgaactatgatcgtgccactgcacactagcctgggcagcagagcgagacctcatctctaaaaaacaaaaaacaacaaaagaaattggccagaatttatcaacttttgttgatttgaagtatattttgctaaaactatatatgtaaatatatatatatatatatatttctatttttagtgtttttttttgagatggggtcttgctctgttgcccaggctggagtacagtggcatgctcataagctcactgtagccttgatctcctgggctcaagtgatccaatcctcctgcctcagcttccccaatagctgggactacaggatgcaccactatgcctggctaattttatttttatttttagtagagacaagatcttactatgttgcccaggctggtcttgacctcctgcgctcaagtgatcccacctcagcctctcagagtgctgggattacaagtgtgagccaccaagcccagcctacggctatgttttaaaatcagtgtttcttttggcattacataatggcgtgaagtttacattaggtactgtttacctgttataagtttcaacatattcttttaggtaaagcctgcttttctacaatgatatatatatatattttacaaattattattgtcccaaacattaagttcaggggatactttttttctttaacttgcttgcatttgatattgtttaccagttctattttgtacctctttcctcttttcctcaactaattatgctgattgggtttgtttcatatccctgttttaattattatttaattattccctctgttttttttttttcccccagcttcaattcttctgtcactccctcaagtgaacattggctgttgtttagttctgggtcatctctctttttccctccctgtgctcatttactgtggcttcaactgttacctttaaaatacatagttaatgtagttcattttcttgaatttgaatcttgaatttctaaccgtctactgtaaatttccagtagcacatcttactagctccaacttaacatatgtaaaccaaacctttctaaatcttccaacttgctctgacttacttctgtccaagattctatccacatttagcttccaggccttaaaactttgatcattagtggcttcttttttgtctacgtacccaattagatgctaactttaatgggactttggaagatgtgtttggaaaaaaattctaggttaaatgaagaaaggttagtcttttcaaaaaatggtgctggaatactctattcatatgcaaaaaagttgagccttgacacttacagatttgcaaaaattaactttgaatggatcacagacttaaatgtaagagaaaaaactaaaaacttctaaaaggaaacataaaagaaaatatttgtgatcttgggttaggcaaagattttttttagctgggcgtggtggctcacacctgtgatctcagcactttgggaggccaaggcaggtggatcacaaggtcaggagattgagaccatcttgagaccatcctggctaacacggtgaaatcccgtctctacaaaaaatacaaaaaattagccaggtgtggtggcgggcgcctgtagtcccagctgctcaggaggctgaggcaggagaattgtttgaacccaagaggcggaggctgcagtgagattgcgctactgcactccagcctgggcgacagagcaagactctgtctcaaaaaaaaaaaagattttttttagataggacacaaaaagtacaaacaaatttaaaaattgataaattggacttgataaaaattataaactttcactgttaaaaatatatcaagaaaacttacaaaccacagattggcagaaaatatttttacaaagcaagttttgtaaaatattgctttgtaaaaataaagcaagtttaataaatgacttttatcaagtgtatataaagaaatcttacaattcaatggtaataaaacaacctgctgggcttggtggctcatgcctgtagttggaacactttgggaggccgaggcaggaggatcacttgagtccaggaattgaaggggtaacattgagctatgatcataccactccagcctgggcaacgtagtgagatcctgtgtctgcaataaacaaacaaatgaaaaaactagctggggatggtggtgcttgcctatagtcctagctgttcaggaggctgaggtgggaggattgcttgagcccaggagttcaaggctgaaggtgtactatgatggcaacactgtactctctagcctgtgaaacaacgagagagcctgtctcaaaaaaaaaaaaaaaaaaaaagaaagaaagaaaagctaattttaacaaaagggcagatttgagtagatactttcccaatgattatatgtatggtaaaaaaatagatgaaaagatgctcaacatcatagttatcagagaaatgcagattaaaacactcagagagataaccactaaataaatacacaatagaatgactaagataaaaatgactgaaaatatcacgccctggcaaggatgtgtagaaattgcaattgtcattacaacccacatacattcttatacattggaatgtaaatatggtactttgtactttgaggaacagtttagcagttcaggaattagacaacatcttgaccatataataaaaaataacatcactaacaaggggcaggtaaatatcacgtgccttctctttgtgacaccttaaaatttcacctaatatttctggtgagaatgcataatctaaatttagtcattaagaaacatcaggcacaccctagatgagggatgttctattgaaaaggatgttctgttacacaggattcttttacctgtgtaaattggtaaaagacaaagaaagatggtagagatagatattccaaattaaagaaggcaaaagagatatagcagtgaaatgcaatcagtacctaacttagatgggatcccgaattagaaagagaaaaataggctgtaaaggctgctattgagtcagttgacaaaagtggaatatggacaatagattaaaaaatcagtgttacaaaagttgataattatgttgaggttatataagaaaataacccaattcttaagacacacacactgaagagcttaggggcaaagggctatgatatatatactttattctctgaataattttagaaaaaattgtgtttgtgtgtatggagagaatgaccttgtgtgcacaagcaaaggatgaagcaagtggagccaaatcttaatagggaattaataaagactctttgtgtgttcttggtattattactgtaacttctctgtaggtcagaaattatctcccaatatttaaaaaaaactttttttttgaagtgctttggcttaaggatttaaagagctttttgtttgcttgccttcgttttttgccggagagggagtgtatatggagggtggtggtagtttttcattttctttttatttcagatattttaaagtatattgtaggctttttggggaagctgggagaggcagtaggcaggcatatttatgatcaatcttaagtttgaatttctcaatttgataagtgagattgaaaactaaatgtggactaagcctacatgttgataattaggctaaaaatactgtgatatagatacgctcactgaaatttttttttaaagaatctgcaaaatggctgataatttggatgaatttattgaagagcaaaaagccagattggccgaagacaaagcagagttggaaagtgatccaccttacatggaaatgaaggtaaatttaataattttctttgaacatgttttattataattgtctatggagattactcctgtgtaaatacaaaacatcctcttctatgagtgagaatcttctgttttgtagtatgctgtcattctaggagcctgactccagacaagattgcagtaattttgaatgcagtttttcttttgtggtggtttatatctcacagtgtttctcttatctcttgttgaagaattatttggttataaaatgattatgagaccagttctattacaaagaacttccacaacataaacagaatagttgtaaaagcaagtttatagtctatgtgaaaaaattcaatttaattagtttaaaaagtttttttgaaatctgaaaaagtgaatttattaatttattttgtactatttgtgtttcttaatataaatttcttaaaataattgcttttttttttttgagatagaatctcgctctgttggccaggcaggactgcaatggtgtgatctcagctcgccacaacctccgcctcccaggctcaagtgattcttctgcctcagcctcatgagtagctgggactacaggtgcccgccactatgcctggctaatttttgtatttttagtagagttgagatttcactatgttggccaggctggtcttgaactcctgaccttgagatccacccacctcggcctcccaaaatgctgagattacaggcatgagccagtgtgcccggcctaaaataattgtttcttaaagcaatgtcttaaaggctttcttaaagctttccttgtttaggtgaaactgatttatccatttagcaaatacttactgagattgtgttaggtattatgctaagctctgagaatgcagcactgattagagtgttgtggcaccttctcagggctcagtgtatgtaataagatacagcatgtagtttaatctgtgccatatggttcatcataatgacagtaaccatatatattggtttgttcaagatgatcctggtttacctgttgtccagtgtttttttctggtttagcatttgtcctggacaaaggtaccttggctgagatgataaataatatagataccctgattacaattttactcacatggctaacatttattgagtactagctatggacaaggcatattcttaagaggttatatttcacagtaatctatgaggtaagtgctgttattgtaattttccagatgagtaaactgaggcaagttaagtaatgagactaaggcagtagagttggtggaactaggctttgacccctggcagcctggcttcagtgcttgtcctcggaaccaacataataggttgcctttcttccagataacctgtcatgtaccaggaatgccaaggactttatatgtatcattttatttaatcataatatccctgttaagcaggtgaattttttttgttttatggattaagaaagtgaagctcacaggagttaagtaatttgtccaggtccacacagtggtggattcaggagtggaacctttatgcagctccagagtctatctcttaaccactctccagtagttaggaccagcttacggctttggagttacatgatttggagtacatagctttaaagacagttttgttataatttctaacattaatttgtacataaataattttaagtcttagttcaagtatcacctgctcagtgaggccttatagtcccccagcatttctgggcctccttactttaatctgcttttttttttttccataaccacttcctgccactatctacatatcacataatctaatcatgtgttgagttcattatgtgtccccccaatagtttataagcttcatgatggcagaaattcttctattttttaaaactcttatactttcaatgcttgacaaaatgtttggcacttaatgggaactcagtaaatatttgttggtaagtgaatgagttaaatattagaatatctattataaaattaaaatacctttggctaattcctcaaaccttacacttaatttcttctatgatgtactgtgtaatttcatcaagctgtttaattaaaatttgagatgagttgtatatttcatggttttttttttcctcttgcttttgtaaacattatgtctctttcagggaaagttgtcagcgaagctttctgaaaacagtaagatactgatctctatggctaaggaaaacataccaccaaatagtcaacagaccaggggttccttaggtatgtcattagatgtgctaaacttattttaagatatccttagtgggctcttctgaaagaggtttgtcttgtcagaaaaaaagatttatttggaatcctagtagtttttctttctggaatcttacgtaagtcaatatggtctacatatgaaatagaactcatactgaaaactttgtacttgttttatgtgatactgcattggttatgatttatggaacttatagaagaaggtgtgtataacataacttaaaaattgaaaactttgaaaggaatttgtgtgtgtgagagagagagagaagagaaacttttatttgttgattgaaaatggtgaacttgcttatttaaaaattaaagaaatatgcttaaagggtacaaaatgctgtttggtgaaagactattttaattattgatgatcatgttggaattgtaaagaagttaatactgtagccatactaatgctttgattatggtatggtatgaaaatatttggaaactttttaccacattttggcttgttggtaggtatacattttaaaaaaagaaaatgtatgaatatgtaaaaatttttgtttatttattaaagacagggtctctctctctctctctctgtcactcaggctggagtgcagtggcatgatcatagttcagtgttatcttgaactcctgggttcaagcaatcctcctgccttggcctcccaaagtactacaattacaggcctgagccaccatgcccagtctgtatgaatatatataattttttttttttttcttcaaggctgagtctgaccctgtcgcccaggctggagtgcagtggcacgatctcggctcactgccgcctccacctcccaggttcaggcgattctcctgtctcagtctctcaagtagctgggattacaggcgcatgccaccacactcagctaattgtttatatttttggtagagacagggtttcgcagtgttggccaggctggtctcgaactcctgacctcaggtgatctgcctgcccgcctcggcctcccaaagctggggttacaggcgtgagccactgtgcccgacctgtatgaatattttcaatgtgcattttgtgatttattgatgatgacaaactttttcacaaaaagaaaatcaactatgataagttcatttgattaaagcattgttctcaaatggacagcttttcatggatgtaggtatactcctaaattgtttttgtgtgccagtggatacaaggggatgccggccaagaaactggatagtcagtaagctttgtctctgcattagacaaatagctcaaagtgagtgccctacttttaatatcagatagataactctttccattttgaatctcttataaattattaatatacagcattagtgaactaaagtattatatattggtaaaattttttaatctctaaggctctcaattttttttctgtgaaataagtttgattatcttccagccctacgtttttatgaatctaaattttaattattccaagagataatttttaaaaagtttaatagtaggttatctcaagcactaaggtcgctaaggttagacagaatcccttttaaattctagggttacagcttgctttggattgggctgtgatgcctttatgacctgtcaggagctacactttgtttccttatcttatgacatctatctcaaaaagtcgttatgggcgaaagttaaatacgtgaaaagatggctggcacgtaattggtacacaataaatattaatttctttttctccttaacatcttttttttttgagacaggatcttactttgtcgcccaggctggagtgcagtggcataatcttggctcactgcaacctccactgtccaggcttaagtgattcatcctccctcctcagcctccaagtagctgagaccacaggtgagcaccaccatgctggctaacttttttttatatacatatattttctgtagaggtggtgtttcgctatgttgcccaggctggtctggtctcgaactcgctagctcaagccatccgcctgcctcggcctcccaaagttctgggattacaggtgtgagccacttgtgcctggccttccatctttttaaaagtagtttttcgggctgggcgtggtggctcacacctgtaatcccaacactttgggaggctgaggccagcagatcacttgagatcaggagttcaagaccagcctggccaacatggtaaaaccccatctctactaaaaatacaaaaaaattagcccagcatggtggcgcaggcctataatcctagctacttgggaggctgaggtgggaggatcacttgaacctaggaggcggaggttgcagtgaccgagatcatgcccctgcactccagcctgggtgacagagagagactccatctcaataaaaaaaaagagtagttgtttgaattgtcttaggaattattctttgatcattacattcacatattatggagagttaacagtataactgaaagatggtgacctctgccttttcattaattggtgttacttcggcctctgacctaggctgacttctcatcttatacattccccgagtgtccatatctgctcacagggctttatttactgttagtgtgttcatgacttctgaatctgtatccccagtcccaggttctattgcgaacttgacccatatgtctgattttccattggacatctgtacttgtatggtcatgtatggcatgggctcaaaatcaaaatttgcaaaattaacttatactcttgtcaaactttctagtgctccccatctcactgagctggctgcctagtcatccttgattcctgtcttctcctgtctcctatatcaagcagttacacaagtctagttgattctaatgcataaatctcaagtaaggtcactctgctgtaatcccactgactttcttttatgaggcctctgttgtctgtcagatttttgtaaaagcttcctagtgtttttggtggttgttttgttttacagtctagccccgtgtatcaaatctctatgttttctatatatttgcataaaacaaatctgatcatattagtctctgcttcaaaccctttgatggcttctttttttcttatatgataaatttgccatcttaatacttctgctagattgggttggtcaatcctgtcatgtgcttctagaggatttgttctcctcttgaagagtagttttgaacttattcagcttctcttttgtaccacaatgacatgccaacttgcatcccgttgtatttccactgcctagcacagtgcgcagcacttactgcttggaaaagttgttttaaaccaacgggttaatgtccccattgcaaaaataaaaccaattctcttgggtgtgttgactttaattttcatggaatgcttcttccattgccatctgaaaccatttgatgcacatggaattttattaaagaacaatatataattgactaattttatactgcataagcatttagttactgacctcctgcctgattaattgtggctttaaaattcagtcaaatacatagtttctcacactgggaaaaatgtaaaattatttggcaactaagggttttccttaagtggtctcatttaggaattataaaaaacaggtctaatataggtcagatttggaaatgaggtattgacttaaagcactgtaacatcgtagtttgaataagtaattaagcatagtgtagtaatcagtgatatataaactggacatactcattttatccaatgaaaacaatctattgatagctcatagtacaactatcatacaacactatgattttataaattcttttctgttagatactgatgatattcatggttaattccatgtggctctttctaccaccatttatacctttcataaaaggatttgaggtagcgttacagtgacttctgacaccagctacctggagttggaccaaacttcacaggttaagggcataggcctccacaagactgccttcacttcagactccagctgcaagttcaagggtcaccaggacaccttcaggtctgaccatctggctataaatttgggggtttcccctatcccctcaagttcaataattcataagaatgactcacagaactcaagaaagtgctgtacttatggtcacagttttatagcataagtatacaaattagaaatagccaaaggttgagacacatagggtaaggtctgggacggtccaaacattaattatctgttagtctcagggagacattaccctcctagcacatcagtatgtgacaggatacagaatattgccaatcagcctcacctaagcctgagtgtccagagtttttactggattttccttatgtaggaatgattggttgaattgttgctccttggcttgatctccagccctgctgtattcattccccttaggcctggctgatgtcacatggcgcaaaggcccaaccctcaaatcacatggttggtttttctggcatgaccagctcccgtttttgtcttctctgtagcataaactctctaggggttcacaatgattcacttcgttagtataaactgttaggtatggtccaaggtacccactgtgaataataaagacattcccatcatctggtaaattttaaggtcaaacccactaggggctcacaatgatttacgttgttcgtgtaaactattaggtgtggtccaaggtgtccactgtgaataataaagacattcccattgtctggaaaattttaaggatttagaggttacctcccagaaactggagacaaaggattcaattttttttttcttttttcttttccaagccaattttttaattacacataggatgtacatgatttagttcatataagctaatgaaaaaatgtctttaataaggagtttgtcagaatactagtaatattaaattaagagaaagtcacctgaaagtgatctataaaagatcttttatctccctaaactgtttctaggcataatgtttgtgtttatttcattaaaagaaattcttactaacttattattgtttaacaaccattactggtattattaacaataatcaatattgttgaaatacttatattaatcatttaaatgctcccattaatcttttaaaaatgttttgatacaaatgtgtcaaggtcttaaaacatgtagtttctccccaccacccagtttttttaagggagaggatcttgctctgtcatccaggctcgtgtgcagtggcaccataatagcttactgcagcttaaaactcctgggctctggggatcttcctgcctcaacctctcgactagctaggactacaggctcaggccaccatgcctaatttttaaattttttgtagagatagagtcttggtatgttgccccggctggttttgaactcttgggttcaaacgatcctcccttctctggctcctaagtagttgagactataggtttgtgccactgcatctgtctagttgtagttttaattatttgttttgagatagagtctcgctctgttgcccaggctggagtgcagtggcgcgatctcggctcactgcaacctctgcctcctgggttcaagctattctcctgcctcagcctcctgagtagctgagattacaggtgcctgccaccacacccagctactttttttgtgcttttcatagagacagggtttcaccatcttggtcaggctggtctcgagctccttacctcaagtaatccacccaccttggcctcccaaagtgctgggattacaggcgtgacccacagcacccagccttgtagttttaattatcattcctctttgtcttaggtttatcctattgtaaactaaatcacagatactcttctacagtttttattcattttgtatgagtgaaatgggtccttgtagtgatacctttatagctgaaatttaagagtacagtgtctcctcaattagtcacatctccttgtaagtcacccattgtgtaaaggcctattattatttcctataatttgtcttttgattatttttacataatgctttttcatggtagtataataatgaaaagaaagtaaatgttctatggtaatttgtttcatagagtaattatgatgaatgctctgttagaaggtaaattaattatgaagaagttatatactttagtcttaagtattttatgtaagccacaactgttatagaaaccaaatacttctaattactatagttctgaagcataatgttaactatcttagggtcattgatgttatacttgatgaagtgacatcacttcaaatgaccctaaaatgacacaaatgctttacttgctgctagatccatcagaagacaacaggcacaataagtaagcctcaccgtgttccttagctcattaagtcaattgagatgctattgttaatgcatggtttaaaagaataggatatttacattgttctatacagttcctaattttatgtctgtgacttacctctaatgccataaaatgttggtacaagatgacaaaataagaattaaaaagttagtgttttctgttgactaaacattaaattaataaagttataaataactcagaaggcattatatattgttacttgtcaagacaattttacaatactatttgaattaatagtgaaaaacaaatactcttagtaaataaaaatttaacttaatatgaataataggccgggcgcagtggctgaggcctgtaatcccagcactttgggaggccaaggtgggcggatcatgaggtcaggagtttgagaccagcctggccaatatggtgaaaccccgcctccactaaaaatacaaaaattagccaggtgtggtggcaggtgcctgtaatcccagctacttgagaggctgaggcaggagaatcacttgaacctgggaggtggaggttgcagtgagccaagattgcgccactgcactccagcctgggcaacagagtgagactttgtctcaaaaaaaaaaaaaaaaaatatatatatatatatatatatatatgtatatatgaataataatgtaaatgaaaatgaattatgtttttctttccattcttccacataaacccccaagtagaattgaaaaacagcagtaaaagccaccttaaacttacactttttgtaaatttgtaaattgcttgttcctggatgggcaggtagtgtgttggcatcatcctggcagcattgttgtcttttactccttggcacaatagaacatccattgtgaccctgtgtgactagtgatatgtaactttggtaactacctctctctatgcagtcagaccgctaacaggagaaatggaatattaagtatagtatattgttccccctcaccttttctcatttcttcctctgtctcaggcactcattcatatattcatttgcagatttattcaatgaacattttcttgggttaaagttatgtgccagcattataaaattgaatagcgcatgggccttgccttcatagattttatagtttagttttatatatgatgttccattctgaacatgagaatcaaaactttctctccttaggcttaaattctgtatctttaaaaaaaggtttagattccttcaaaaggaaacagttcctttctaggatgatttaaaattccaagcatatggaatgctttagtttcttttggaagagagttagaagcatgtgtaagaggtgtccctaaggaatcctctgttataccctctatcatcaaggagttaaataggccagaaatgtttatcaagagaattccagtgttgatagcggtaagtggattttagtattctgtaagaatccataaacatccacttatgtttatattacactggccttttccctgcctgaaatgtttcagtgatgtagtaagcagtgatatgacacattcttgaaaagttcccatcattcagctacattgtgagaaataaggcacaaaatggtgatttttatatcagtttataaactacagtcaaattttatttcatctatagtgctcatagctgaatctttaaggaaagttttggccaggcgtggtggtgcatgcctgtagtcctagctactcgggaggctgagatgggaggattgcttgaggccaggaggttgaggctgcaatgtgccatgatcacgccactgcactcaagcctaggtaacagagcgagaccctgtctaaagagagagaaaaaaaaaaaagccaagttttattttgtttagaaatgataattttttaatactatagtattatgtgtatagtaggactaaaaaagggatgaagcttcagatctgaatactcatctaatgtctatgcttcttgacatagtattttattattgaaggtttgaaaagtatataatttgatttttgatagctttgttgagatataatttacacaccataacatttacctatttaaagtgtacaattcaatggtttttagtatatttacaagttgtacagtcatcattgtcatcatccctaaatgtaatttgatttttaaattttgtgtaaggaaatactactcaaattcgaagtttttcttcaaaaattaacatccatttacagagtttctgtttgggatgatgaaaaaattctggaaatggatagtgatgatggttgtacaacattgtaaatgtacttaatgccactgaattgaatgcttaaaatgattaaaatggtaggttttatattatatacattttaccacaataaaaattaatatccatttttatgaaatcagaagtggtttaactttagaagtttttaggaatttcatcctatctgaatgctctttgatacaaaaagaaaattaaaaaaaaaaaaagaaatgtgattctaagcaacacatggccctaataattttttctcagaaacatgttatattaaagatattcttgtatgctaaaaaaaatcatgttattagttttcctagactgaaaatgatgcattaaaattgttgttggtatttatttttatagaaattagtgtataattaagtgaagatgtaaagataattagtttttctttaattttgctgttcttgagaaagcaagatgccaaacaatgctggactacttgtcttaactggaggaaaaagtgaatataatgcacacatgcatataaatatgtatatgataatataaaagtatctgtttataggtgcattaaaaaattatctgcatggagacaagaaataacaatgtttgttgttctggacaggagaacagggtggctagggctcatggatgagaatgatatttttgataatatttttgattatctgaatgtattatctattgagacattttaagtaaaaaacttaccctaatcctactcttggaataagcataattctgttccttcttactgtgctttgttacaggaagtagaactttgagattggtttgaaaatgaattatactaagaagttgttttttttctaggaattgattatggattaagtttaccacttggagaagactatgaacggaagaaacataaattaaaagaagaattgcggcaagattacagacgttatcttactcaggtaatgagttctattaatgagttgggtttaatgtttcagaattcagctcctaaatttgttttcataaggtattagtcatatgtgttaatttttaggttttcagtggtactagcaaagtagtagtatagtcaaagttaagtggcatatatgacattggtagagaaaaaaatattgctgagaaccggtgccatagaatgatacagacttttgaccttttgactaaggcagtggattctaattttaagtgagatcgttaattatggtttttcatgttttctgtaaagttgtcatggtttgaagtagtccaatcatggtttcccactcttctacaccccccaactatgtattaaaatgacatatggagttctagttgctaattattttcctatgagccaagcttataaaattacatttaattatttagccactaaagcttttgttttatgatctcatgttttacttagcagaactcttgagtatttttgttaaattatataatggccaaagtaaggtttattgtaagttttaaatttaggttataaaattattttaaacaattatgatatttgttgtcatctcaaaatattctttagttttttactgctttatgtttgttccaagtgtacaaatgtctcttattctgatttacacatggagagaatgaactttgacttaatacactttgtcaatggtttgtttcccttgactttagggcattacacaagggaaaagaaaggtagggttgtctgcaatacgtcctccttcagttttttctttctttttttttttttttacgatctagaaggttgcaatcatttgcatttatgagattcaaaccaattaggaaaacgggttcatttgtgattttgagatgtttgaatggcaccattttgtattcttgcttttagcagatgacagcatacacattataattttccgttaatatagtcattacttttgattcctgctttgcatttgtgtttattgctttcttatgcattctttttgaatattctgcagttaagtctgttttcagcatgcaattttttatttctcaaattacactaatcacagtaagattaatagagtagtagaatatccaagatatttgaactacatgttgtgagaatttggattactctgtttttccaccaaaatctatagattgcattgtccatttatattggaaaacaaagagaaacagtttatggttttacaaaactggttttaaaaggaatctcacagattcaccattcaactaacatattttaaacacttattatgaagatatatcaggtatgcatcctgtcttcaagaggcttagaatttagttgtagagatagcattcatacgattcagaaagtggtaactacaagaaggatataatgatcaagatagtcctcatagtgggaatttctattttgtgaggcaatctagatttgggtgatctggagagagaatcgaagcgagaaagcttttcagatggaaagcatagagtaaaggaggacctagagggtagactttagctttgtatgaatgaggcatattaggtttaccagcctgactgggtcagagtatcattctttttgagagtagtaagaaataatgatgtatataggataggatcaaattagaaggcagtggatttttaacttgttatatgtaatagtcagtgatgagcatcatactttcttaaatagcttgtgaagagcatggtaactgtgttttaggacagttagttctgcatgtagagactctcattgtgttaaattgctgcccaacttcttaactgatttcctcgcgctaattttcacttcaccctccaagctattttccagaatgattcagtccctaacttatttaaatatgtcagtatcctctaactgcctccaggataaaaattcaaattccttagcatggcacatgtctttcgtgttccagcctgactccctgggcttatacctcattatcttccccttccctactttttcttattgggtggagttttcctctggtatcagatatctaccattttctcttgtaggttttgcattactccctaggtaagatttttaaaaaggatagtggtgggggacatgagaagaaattgccgtcatgaaagtacaaatctttaaattcaaagggatgtgaaggagttttttaagatttttttgtttgttttttggtttttttttgagacagagtcttgctctgtcgcccaggctggagtgcagtggtacgatcttggctgactgtaatctcagcctcctgggttcaagcgattcttttgcctcagctcccggagtagctggaactacaggcgtccaccaccatgcctggctaatttttttgtacttttagtagagacggggtttcaccatattggccaggctggtctcaaactcctgaccttgtgatctgcccacttcggcctcctaaagtgctgggattacaggcatgagccaccgcacccggccagtttttgagattattaagaatatagtcggccgggggcacggctgacgcctgtaatcccagtactttgggaggcagaggcgggcagatcacaaggtcaggaaatcgagaccatcctggctaacacgttgaaaccccgtctctactaaaaatacaaaaaaattagcctggcgtggtggcaggcgcctgtagtcccagctactcgggaggctgaggcaggagaatggcgtgaaccctggaggcggagcttgcagtgagccgagatcgcgccactgcactccagcctgggcgacagagtgagaatccgtctcaaaaaaaaaaaaaaagaatatagtcttgtagaggagcactatttccttaaaattagagagacagtcttttgttcacatttgagaaggtgggactggaagggaaagcaagagaaaaagaaaactacacagactatagggagctggctgcagcttcctggaccccctgaaatatgtatggtttccaagtcccactcatatctcttgtggcttccagacttggattgcatggatatttgagtttttaaaaaaaatcaaatcttttaattttgtcaagaagagttattaaaacaaacaactaccatcttttttcgtgttttaattaatttttttttcctgtgcccttcctgcccagagatggtttcctgtttttagaataaaagatgcttgaccatctaaacacagaaaagacatgttctcaggggaacagtttttaaattgagtcagttaattaatatccccagcccagacctccatcctgaacttcagagttttctagctggctgcataattcacattttcactttgaaatctacctgatatcttatgtagaccatgtccaaaagagaattcttgatttctgttcttcccaccctcatggctgataaacctgcactatccgtagcctgtccttttaatttcctttttgtcacagtaattattaccttctagcatgctgtataattactcctcattatgtttattatttctttttcattttccccagcttgaatgtatgcttttggaggacaggaatctttatctgtttttttcagtcccaaatgtatcagaaagtttgggcacatggtaggcactcagtatttattgaatgaatgaatgaatgaatgattaaaatttagctttttgaaaaaactcactatgttgttctttttttaagaattaaagtttttttggtagagacagggtaataaaaaaaagttttttttttgtttttttttttaaatactcaagctggtcttgaactcttgggctcaagtgtccctcctgccttggcctcccaaagtgctgggattacagacatgagccaccactccctgcctatgttgttgttattgtttattcttttcattttattgaaaatttcaaacatcattcttgacccatgtttggaatgggaaattgcccagtgaaggagtgaggatgttaaatctatcttcctggttggaactatgaatgggtttttcatgcatttataactctacaaaataattaggtttatagtgtacttcagtatataggaggtaaaatcactcagggatctggtcatgtgtcttattttttccttgtcaggtaagtttagagttccatacagccaactttcaaattagcttttgtagcacaactcatttgtaaattcagatttaatgacactttatttatttatttttgagacagattctcactctgtcacccaggctagagtgcggtggtgctgatcttggcttgctgcaacctccgctttttgggttcaggtgattctcctgcctcagcctcccaagtagctgggactacaggtgcgcggccccaagcccggctaattttttgtgtttttagtagagggggtttcgccttgttgcccaggctggtccgaactcctgagctcaagtgatctgcctgcctcaacctcccaacctgctaggattacaggtatgagccaccctgcctggccagatttaatgaaactttattaatcacttagttttgctaattactatctttccataatgttttgaatacaacgctattgtagttaatacgttgttttgcggttatttgcttacatgtctgtttctgctactgaattgtaaatcccttgaatatagggaaaatatatttgtatccctaccatctgaaaatagtacctgcatagtattagatggttgctaattgcttgtttaatgaataaataaaaggcatggaattaggcaggttgacaattattgattgattttatccttataacctagtgatgtgtagatggcattatttctgttttatagacaaggaaactgaaatgaagtgaagtaaattattccaaagtatttgactgctaagtaacagtaccagaaagttggagatcatatgtatttttttaccaattggggatcatgtgtattttttttttccagttctttgtatttgctttacagctttcaaagcgattttatattttttgtcctccttcatccttataccagctttggtaggtaggcagagcaggtactattctcattttgcagaagaagaaagtgtctgtcagaaaagttaagtgacttccccattgttacacaactgataagtgcttgggctagttgtagatcctaggtcttttgactgctagtctaatgctgcctctactacactgcattacttaaatgcttaatgaacaagattggaggaacacataaacaacattcatagtttatatctattggcatttcagtagatattcactcacataattataggaaaaatagaaaaaaaacttgtggcatgcattaagatatttgtgaggaagtttaaatttgccttgagaacaaaaagacagtagagcactgataatgaagagtacatgcttagaagacgaaattgggaaattttttttcatgcttctaatcatcttgaatcaatagacgtatatattgcacatgaaaattaaggcctgattttccctttcagggagttgttgattggaagaaaattctcttttttccaaatgcttttggtatggtctatatagatttgtagtttctgtcttcattccatttcattcatttgctctgcataatataatactagtttagaatatagaatgcaaagacacatttatgcaacatattttataaaggcaattaggtaatatatttttttaatgtgtatatatacagaaaaattttctatctacgagtgaaacagatccatctactttgggagtttctcttcctattggtgagaggttatctgctaaggtaggtggataggagtagttattgtgggtaccagttttccgaggcatcaaaatcattaaagaacatactgctgatttaaatgcaaatggaagatcacatcatttccccacacttgaatatatttctatttcaaaaatccgtggagtcatatttatgctgtttaaaaaaattttcttgaacacaacatttgtaaccatataattttatatttctttaatatgttgattcttttgctgtattcagttatacttaactgaatattcagaattcatttttttcagcattgatttctgactataaagtttatgctatgtaacacagttattggaataagtggatgtgaaattatagtgagcttttatatagggtgagggtaagggttctttgaatgtgtgattctgacactccattaatacacgtccatattccttagagatgaaagtaataaagcactgtacacctcttgtagtgactcaggtctcaccagagtatatcagagatcatgaaatagtatataagacaaaatggacagttaataaatttcaaaagacagacctagtttctttttttttgagacgaagtatcaccccgttgcccaggctggagggcagtggcggggtcttggctcactgcaacctccacctccccagttcaagcgattctcctgcatcagcctcctgagtagctggaggcaggattacaggcccctgccaccaagccccgctaattttttgtgtttttagtagagatggtgtttcacaatgtaggccaggctggtctcgagctcctgacctcgtgatccacccgcctcagcctcccaaagtactggcattacaggcgtgagccaccgctcccagctgacctagtttctttagtacttttttagattgtgttgttttagcgacacgggagtattaaaatttaagaacattttttaatcatatatttatgttttaacagaacatttcattataatattttataatctgtgataatttttctttttaagtttaaaatataaaggatcattttttaaccttggaaagcaaatggttagcagcaggtgcttcaggggagtgggttgggcattaggagagggaggtgtccctgagaaggaaagaaggaaggtaaccccatcatatctctttggaaacatgctaatgacagatctcctggcaaacacaatcatcatatttactagtgggagagatttatctctgaatgcttttggcagaatacacctggtttgtctaggattgctgttgggaatcaaacctggaatctatggatttatgtggcatggctctttggaaaatgtcatctaagctctgttaactattggagtgtaaaatggagatgtttcatgaacgaagcaactcccttctgttagagacctcatgtattaatggaccaaagcatgtagtcatgcatattctcatgtgacaagaaagacctggggagctgtatgtgtgtcctcaaacctcttccgacttctcccatgcctttcagtgacatctgtccttgaaattattagtaaagcttgattctgggtaagagttctgatatgtatgattcagatttgacattctgataggacattgagggatttttttttcctgaagttgaattttaacattgccttttgatttttattttaaggaaaggttgaaacttgaacgtaacaaagaatacaatcagtttctcaggggtaaggaagaatccagtgaaaagttcaggcaggtggaaaagagtactgaggtaggttttgcttttgaattaaatctgtactactactaccacaggttgaatattttgtacttgaaaagctttttctattttagacattttacttttttttgtaaatacttgcaaaattaagccaaattaaaccaaacacaggacatttaaatatttagttttggaagttattttatctcatattgaagaacttttaacatttaattggggagatttaattttagagatcagttttgttaagtgattttcatttatttttaaaaatttaaatgagtttttatgatgacaattcctagctatgtttgtttttttcaaaatttaaggatcaattagccggacatggtggcaggtgcctgtaatcccaactacttgggaggctgaggcaggagaatcgcttgaacctgggaggcagaggttgcagtgagccaagattgcctcactgcactccagcctgggtgacagagcgagacctggtctgaaaaaaaaaaaaaaaaaaaaaaaaaaggatgattgatgtatctggggccaaaacatttaccactttctatatcctttgtgttgagaatttaatttgaaatattttgaagtaatatctcctgggataggaatttgcatttagtttatcctctcttttttttttttttttttttgagacggagtcttgctctgtcacccaggctggaatgcagtggcacaatgtcagctcactgcaacctccacttcctggcttcaggcgattctcctgcctcagcctctggagtagctgggattacaggtgcctgccaccacgcctggctaatttttgtatttttagtagagttggggtttcagcatgttggtcaggctggtcttgaactcctgaccttgtgatccgcctgcctcggcctcccaaagtgctgggattacaggcgtgagccaccaggccctgccacagaaaggtaaaattttcttgaaatttttttttctaaaaaaatatatgggtgattaatgttgcctaggctggtcttgaactcccaggctcaagcaatccactggcctccacctagaatttttatgtaataagcttttcataaactgcacaatttgatgggttttagaatatgtaaaccacaatcaagataacgagcgtatcctgtatcccccaaagtggttctgggaccctttggaatctgtgtgtcctcactgtcctccactcattcccatactgtctccagatcttcctgacctgacttctatcaccctagactagtttacatttgatcatttactataaatggatcatacaggatatactagttttggagatatggcttctttcactcggtatgattattttgaggttcatttgtgttgttgaatgtatggatgattcattccgttttgttgcatagtaatgttccattgcatggctgtatcagcttgtttatccattcccctgttgatggacatttgagttatttctggtttttgctattacaagtaaagctcatgtgaacattaatgtaaaaacgtatatatatataaatatatgggtgattaaataaacatcagagttgaaatgatagactaagtataaattgagggtttaattaccttataagagatagtttcttgtcaagttttgtttcttttttcttttttaattgaacagcccaagagtcagagaaataaaaaacctattggtcaagttaagcctgatctaacttcacaaatacagacatcttgtgaaaattcagagggtcctagaaaagatgtcttaactccttcagaggcatatgaagaacttctgaaccaaagacgactagaggaggacagataccgacaactagatgatgaaatcgaattaaggaatagaagaattattaaaaaagcaaatgaagaagtgggcatttccaacctaaaacatcaaaggtttgcaagcaaggctggcattccagatagaagatttcacagatttaatgaggatcgtgtttttgatagacggtatcatagaccagaccaagatcctgaagtaagtgaagaaatggatgagaggtttagatatgaaagtgattttgatagaagactttcgagagtgtatacaaatgacaggtatttacaacttcatttttattttatttgcttaatatagcaaattaattgttaatatttgctgttgttactttttatcattatactagggagaagcagttttgatttatcataattaattctaagatgctgtcagttttaagatgcatcattattttatgtcccactgaggggaaaaagaaaacactcaaggtgggggccctgttgtaaagttggaaaactgaaaggctacaccctttatgtaaaagtatgtgaattggaagtagtcattcccacagaaagggacagagaggaaatgtccacatcccaaccttggcagtgagtagagagtaaagatacaaacaaccttccttgagaatttgaagtgtaaattagtaatgattcaagttcacagtccgaattcatactgccagtagcgtccaaagaaaccttgaggcaagaattcagagttttctcaattcatagtgctcttggatgaggggaaaaataactctgcaataacttgacataaaaccaggtcattggctgttctgacttccaatattaaaatgtggccaggcatggtggctcatgcctgtaatcccagcactttgggaggccgaggcgggcggatcgcgaggtaaggaggttgagaccagcctgaccaacagggtgaaaccctgtctctactaaaaatacaaaaattagccaggcatggaggtgcgcatctgtaatcccagctactcagaaggctggggcaggagaatcacttgaacccgggaggcagaggttgcagtgagcagagatcacgccactgcgctccagcctgggcggtaaggtgagactctgtctccaaaaaaaaaaaaagtgtggctgggggttgtgcctcacgcttgtaatccctgcagtttgggaggccaaggcaggcagatcacttgaggtcaggagtttgagaccaaactgaccaacatggtgaaaccccatctctactaaaaatacaaaaattagccaggcgtggtgggacgtgcctgtaatcccagctactcgggaggctgaggcaggagaatcgcttgaacctgggaggcagaggttgcagtgagccgagattgtgccactgaactccagcctgggcgacagagcgagactctgtctcaacaacaacaataaaaataaatgaataaaataaaacgtgtgaaaaaaggataccttaaaatagatgaaatacaatttattcctgtagtcataagttttttcagtcagattttcagatggttttcagttcctttgaatgtttttgtgacactatttataatttcttaactgctacaatgaggttttattgttgtatttatcatacattgatacttgccatagtttaacctaacttgttttggagataggaatacctcagggtctcatatttgtcattgacttgtttacttgacaagtgttaatacattttgagtagcttttgggacctgctttatttgctagtccaaatagattagtttttaagtattttagaaaatgttttcggggtagtgctgtacattcaatattctaactattaattacaatacaaagcttttacagttctttgtcttctacattctgtagctgttatgtcctcacacaatatttttaatatttaccttgatttaggtaatttgaatgaaggattagaatttggaaatggcaattatagtttctctgatctgaatctaattgtttatacttcagaaaattctccaaatcctataatgttatatttgaaaatgcttatatgtaaggtaattaaaggctgactaaactaaaataattcagttggggaactgcaagtaatctttgactcttggtgataatgtctcctttgtacatgagaacttcttttccctttatggtgtttgtttacgtttagggtgaatgtaatgcatacccttttaagtttggaattttaagaaacataatggttgcttctttgtttttttttaatctattacttttataattatatcctgtgataattttatacatgaactaacaaatgaatatcattctatttgagaactctcatatcttcttatgtatcccaaaataaaatgaactccttcaatataaacttttccaaatactatttaagaatagattaaacatgaggttgagtgagaataattcttgttaaatactttaaagtgtttcttcaatatataaatcatatttttatttcgtttttatataaactctgacatctccaagtgttttttcttatgtgtctctttaacaatttaatttaaaatgggatttctttatttcagatttatagattccttatttccagcaaaaaaaaaaaaaagaccagtcattcagtagtttataaatagactggtttaggagaaatgactgtatttgtgaaaattttgagactaaagaaatgtggaactgagtttcatctcttgctccaagcatttattcttaacatactatgcaatcttgatcagaagttcttgacaaaaaataattataatgtattatgagaagtgcacagttaattttccttcattcttctaagttttctttggtcttttttttttttttcctttcctaaaagtcagcatctggtaaattctagttttggtttataataattttttatttttggtttcaatttttctctaccctataaacgtttacttttttttcatataccataattattaatgaaatatttccccatacttaaatatgggaaagctaaaacttttctcagaaaatgatgttgccttcctaaactcatatcatgaaatcactgacagcattcttaattaacaaggtggttaacactgtaattgatagttgcattctgtgtgtgtatgtgtgttgtttatttatgcatatttaccaattcaagtaaaatttatcatgttttaggagctttctaaagtagaatgtaatagcatgtcttaagatactttgaaatttataagctctatttaaatatagtaatcctagtcttatttattaacttgaactgtagaagttaatattttactttattatcttttactttaaccaatgttaatgaataaaagaagttttacttcttaatacccaaagaaaccaggtacagagtagatggggttgataatagaaaacactgctaccaaagtaaatataaaaattgggaaagaatggaaaacaaagagaaaaatgattgtccacagttaacatctcagagtgtttcattagcttctttttttttttttaaagattaacatgtgttcatttttaggataaacttggcctgtaccctatacctggtttctttgggtattacgatttttacctgatcaactagagttgttgactcttgtcttcaaggaaatagggagaaaaatatttttttcatttaaaataccttttttttttagttagtaggatggtgaaaccattttgcagttattttattccctcaatcatatctgatttgcatttcaaagttatgagttctgtccctttgtgacaaaacccaacatgttaaggtgtggtaagtgaacttatatattaaaagccatagaatatttagatagattttctatggctataccaccctggaatgtgcctgatcttgtttgatgttggaaactaagtaggcttggacctggttagtaatttggtgggagagtatttagatagattacttttgggtcacaaggatagtcttaatctggtactctcacagtgaaacataaaggggttccagggacaaactgaacctaaacagaactcctgaactttgattagaatcaaatggttcttagacatttagtgagtgcattacttttggatattatcatctgtctgttttcctttaatgttgagatgattgaatagagatgtagccgtggtaaaaccactgctgattcttactagttgctttcttcagagaggactttttttgttcagaaaaggttacaacaataaattgtaagaccataaaagctgttttaagtgaactaacagagctagttctgggtgattaaatgctaaatttattagaaatataaaggccaatttagtaaatgaaggaaatgccataaaaattgtagggatattttaatagagaataaggtggctaacttaccaaactatagtttgtcttttcagcttaatttcccttcaaggtttcttttttttaggtcttacattggtaatttaaaaaaaattataaaatctgtatttgtaaacagtaattcttccttgacttaaaaaagataaacaaatcatatgtcatttcataaaattgaatagtatccctaagattttattatctttttagtgaaatgcttatttctgctcttttttagcctcttaaacatttttcggtcttgatcttataattattggtgacagagtggacttttataatcttgttaatgatttttttcttcaatgaaaggtataccttagaacatctttcatatgtgctgctcactaggaaatcttttgattttgctgtagattttagcaaagagaccttaaccttatacataaataaaatcatttcttaaattaatttaggatgaactttgaaaatgacctcttgtgtttatggtgtttgctttactatctatatacactgaagagactgtaaaagattttttagtgtggataccttgggtgcagtggtggtataaagataagctagaattattaatctaaatattatcttcagaaaacttaactaataattaaggaagccacaagccctatgttaattttagaaaaagcttttgtatatttaactggcctttaattctgggaccccaagttatgcttttaagaatttgtaactttaaatttctatttaatttttttcttttttttttgagacagggtcttactctgttgctcaggctggagtgcagtggtacagtcttggctcactgcaacctctgccttccaggctcaaacagtcctcccactttagcctcccaagtagctgggactataggcatgagccgccgtgcccggcctctgttaaaaaaatttgtaataaagatttctttattattaaagaatatatatatatatataaataaagattatttttatatgtaatttttttttggcctagatacctctttactacaccagtgaatttactttttgtgttgtgtcatgggttctcaagaaaacctctaggttgggtgatttgctaggaggatccataaggactttgggtatagttgtagtcacagttataatttattacagcaaaatgatacaatgcaaaatcagcaaaggtaaaaggcacatggaacaaagtttgaaggaaaccaggcacaagcttccaaggggtctctcccagtggtgtcacacaggagatgcttaattcctccagcattgaattgtaacaatataaggaaatgtctgccaggaaagcgattagacacttggtgcccaaggtttttattgtgggatggttacgtaggcaccctgtacctggcatgtaccaaaattccagacttcctgaagaaaagcaaatgtttagcataaactatagtttgtgtaaacagtttaagcacagtgagctgctcttatcagttctgccagtggttgtaactctcccaaaatctatattcccaggtgccagccaagggtcaactgtacagtcaggattttctgaggataggcagtctcaggcctgctctgttaacgcttttctgcattatatataaatatccagtataattaaatctggttgcctggcagtgttaattacaaatttgaatttgagtttgtatttacctgtttgttaagtggtagaagtagggaatgacactaaactgatgtgtcattcacacatcagaatgtgtgtatgtgatctgtgatcgattaaaaaatggaagccattcatgcgttatgccatgtcatagttactaagattaaaattccaaatagtgttttctccacagatgatattgacagtggcttgtatgatggaaacaagggaagaaagaattttatatgctggttctgtggagagtgagaagtttctttttttttccggaaaattgccatttttcttaatccaataatgaaattcacctaaaatactgaatactgctttaacaaccatatttctttgtaatagtcctcttgagaaagacaatatagttgggtaactcaacagccatgtaaagaaactttgaaatgcttatgaaatgctgattttcacggatgccaataagtgttggtgtaaaaagtcatgttggttttatggtatgagaaattaagctaaaaataaaatcagtgtttgccaaatggaaaaaagattgattgaaaaacattttttcattattattttccaaaaaggtttttaaagaagaaaacagaaaacatgctaatctttctttttgttgtttatgacctcgtaagtaaagttagctaatcattttctctgtttatattttccattcacctatcagtaacatttattctttcctgtgatttacagtgttagcaaatgtcatggtttgttatattttatttaatttattgataagactgctgctgtatttttaagttaaaaaggttatgacaggtcgcggtggctcatgcttgtaatcccagcactttgggaggccaaggcgggagatcacaaggttaggagatcgagactatcctggccaacatggtgaaaccctgtctctactaaaatacaaaaaattagccaggtatggtggtgcgcgcctatagtcccagctacttgggaggctgaggcaggggaatcacttgaacccaggaggtggaggttgcagtgagccgagattgtgccactgcactccagcctggcgacacagcaagactccgtctcaaaaaaaaagaaggttatacgtacaatgaaataattcacagactctatgaattttgatttaaaaaatgttctcattttgaattttgactataatctttgtgagtgcagggactgtgtccgaatacccagtaggtgttcagttattcacttttaaattgaatgataaaaaagtgttagtatatttgtagttttaaaaataaaaatttatagcaagtacattaaaataacataatctttttagaaaagattattacgtttaaactcttagtgtctcattaaccagcagatcatacaaattctatttaattttataatgcatttatagtaaaacttcattataacactttgttccttttaatgttgccaacatcaaatgtaaaaacaccaaactgttataagaaggtccactgtatgtggcacatgctttataagctaatgtgtttttaaggatgcacaggaacaaacgagggaatatgcctcctatggaacatgatggggatgttatagaacagtcaaacataagaatttcatctgctgaaaataaaaggtacagtatgtaatataaattctctgctttagtcattacattgtgaaacagaatgtgcctaaaactggctaactgaaaaagtagaaagatacagtaaattaacagccttccttcttagtgagaagtgaattaaaggaaaagaaaggtggggaggtagtactaaatgaaaatcgatagtactttacagcattcttttaaagaacaagttttggttataaagtgtgccaaggtgttctgaagaagtccctatcattacaaagtatgtaaatttgtttgaaataataaaagaaataagtataatttaatggactaaaaatcaacttaaaatatcttagagtcatggtgatgcaacttgactggaaataaattgaaaatgtggccgggcctggtggctcatgcctgtaatcccagcattttgggaagccgatgcaggcggatcacttgaggtcaggagttcaagaccagcctggtctggccaacatggtgaaacccagtctctactgaaaatacaaaaaaaaaaaagaaaaagaaaagaaaaaattagccaggcgtggcaatccctgtaatccctggtaatccctgtaatcccagctactcgggaggctgaggcaggagaatggcgtgaacccaggaggcggagcttgcagtgagccgagatcgcaccactgcactccagtctgggcaacagagcaagactccctctcaaaaaaaaaaaaaaaaaaaaaaaattggaaatgttcctgtggtgtgaatttttctttcaaaagtttatttttgattttcagtttatcaagtagatagcttttatgcctactttgtaaaattagtgctcatatatttctgtcatgttgaaaggaaattgtatgtattttatatttatgttctctttctacttacagttttttatcattttggtggcattcctgtgtcgtacataaggataaatgattttgaatctatagtatacagtgaagataatgtcatatgtcaagaaagatgtctatttttttctaagaaaagtaatatataaacactgcttgcaataagataatttgctgttttgttctaattgattaagtttcctttgaggatttttttccccttgtttctgtcttccaagaaaggtttttttttttttttcttttttgagacagagtctcgctttgttgtccatgctggagtgcagtgacatattatagctcactgaaaccttgactttacaggctcaagtgaccctcccaccacagcctctggagtagttgggactacaggcatgtgccactatgcctggctagttttttaaaaaatttttttgtagagtcaggatctctgttgtccaggctggtcttgaactcccaaactcatggtgggattacaggcatgagccattgcgcatggccaggaaggagtgtttttagggatgatcttttctaagtatgtgcatagatcactctttcttttcctttttttttattttttatttacgtgcactttttttctttttctttttcttcttttttgagacagagtctcactctgtcacccagactggagtgcagcggcacgatctcagctcactgcaatctctgcctcctgggttcaagtgattctcctgcctcggcctcccgagtagctgggattagaggcgtgtgtcaccacgcctggctaatttttttgtatttttagtagtgatgggatttcaccatgttagccaggctggtctcgaactcctgacctcaggtaattcgcccgccttggcctcccaaaatgctgggattacaggcatgagccactgctcccggtcttacatgcacatatatatatatatatattttttttttttttttttttttttttactggggtagctgtttttttatgaaaaaggatttttttttttttttttttcgagacagagtcttgttctgtcacccgggctggagtacagtggcaggatcttggctcactgtaccctctgccttccaggttcaagtgattctcctacctctgcctcccaagtagctgggattataggcgtgtgccaccatgtccagctaatttctgtatttttagtagagatgaggttttactgtgatagccaggctggtctcaagctccagacctcaagcgatctgcctgccttggcctcccagggtgctgtaatacaggtgttagccaccacgcccagcctgaaaaagattttatttgagaacctatacagccagtgaagcaagctgaatgtttttgtttttgtttttgtttttgatatgtgtctcactcttgttgcccaggctggagcacaatgatgctatcttggctcattgcaacctctgcttcctggtttcaagtgattctcctgtgtcagcctcctgagtagctgggattacaggcctccaccactgcactcagctaatttttttgtattttttattagagacggggtttcaccatattggccaggctggtttccaactcctgacctcaggcaatccacccacgtaggcctcccaaagtgctggaattacaggtgtgagccaccatgcctggccaaattattattaattttttaagcctgaatacattggagttgcactgtataaagagatagaatgccatgattttaccttaaccttaaaaatttgtaaatattttaatgtccatagtactttgaaaggctaataattcatagctacattttactctgaaattttgcttcctgaaaattatctggattttaatttactctttttctctgtctttttttctttagtgctccagacaatgaaacatccaaatctgctaatcaagatacctgtagtccttttgcagggatgctctttggtaggcacaaaacttccaactagttgcgcttgtatagagtgtcttataatccttttttaagtgagaactcagtgttgtaattaatactatttttactaatagtagaaaatatttgtaagtgcttactttacactaggtactattctaatcatttaacatatatagctctgtataattttattttgtatttttaaaattttatgtatcttcttatttttactcatgatgttcatgaacacatctatgtataattttaaagctaaattatttagtgatgtgctttccgtaggtgataatgaaattattagtttcagtaatcttttttttttgcaaaatggattgatcattaccaatcagtaatgagcttttaattccatattttattagcactctgttgcagtgtggctgtttcttttctgcttttaaaaagtattttgttttatttatgatagttttttccttaattcttctttctagtttctttagctagtacaaaactgctgtgtattttagtttcttttctccaaattaaacctttctttcctttgttcttttcatgtagtttctgagaaggtgttttgttcaaatcgtgatgatggtctaaattttctatttattggaagtcaaggtcattgctgaatataagcttgttttgctatattacacttggcaaaatttaataccagaaactgtgaggagagacttgtttctggtttatacctttaaatatgtaatagaaaagaggtctttttgtgaaaactgttagaaaaaaatgaactgaaatttggttttagtaaagtatatgaagaaattaacactctagattcattcaacgtaaaaacagtcagtaaattaaatactggtttagagacatattattgcattatattgtcaggtttttgttcccttgtgaatggctattgtgagaaaaatggcatgccacctagaattctagtgtaatatctgtaggtgaaaattgaccagtttaatcagtaccatgtaaaggctatattctttttgttttgtttttatttatttattttattttaaatggctatattcttatgttttgttttttttttttaattttgaaattgagtttcgctctatcactgaggctggagtgcaggggcacgatcttggctcactgcaacctccacctcctgggttcaagcgattcttgtgcctcagtctcctgagtagttggaattacaggcatgtgccaccatgcctggctaatttttgtatttttagttgagacggggtttcaccatgttggccaggctggtctcaaactcctgacctcaagtgatgtgcctgccttggcctcccaaagtgctgggattataggcgtgagccactgttcccggccgatgtagtttataaaacatggtaaaataagagaaatgtctttctgagctgagagcctactgataaataattttatcaataaaaggattattgtaccctgaccttttaaagatgaatggcatgagtttatcactaatgcaatccaggatttatagatgaatatttggtaagacaatggactctaacatttgaaactgttaaagtcatttaattcaatgacttacctcctggttgatcttttccccccaaaactatgtttgtacatacctataggaaacttacgatttccagagacaggacattccatcttcagatggctgtgattgttatgatactcttatttcaattgaactgaaatttatcttcctataattttgccccaaggatgtcacttgggaccttttgctttatttaaaaagtgagatcattgatttagtttagagctaaataggaaatgtattgtggggtttataagagaaccataggtaatttagaagtatgttttaaaatttccaagcatttggggattttccttctatcttttttgttattgactgctcgtttaagcctcttatgatccaagaatataattagattaatttcagttatttcaagtttgttaatttctttgacaaagttttttttttttttttttgtttgggtggctcagaatatagtctgtcttggtgagtgtttagtatgtacttgaaagaatgtgcatggtgcagttgttgagtatagtagttgataaatgtcatttaaggttgggtgtggtggctcacacctgtaatcccagcatcttaggaggctgaagcaggaggatcacttgattgagcccaagagtttgagagcaacctgggcaacatagggagaccatgtctctacaaaaagtaaaaaataaaaaaattaactgggtgtggtggcatgcacctgtagtcctagccacttaggaggcagaagtaggaggattgcttaagcctgggaggttgaggctgcagtgagccgtgattgtgccactgtactccaacttgggtgacagagtaagaccctgtgtcaaaaaaaaaaaaaaagagttaagtcaagttggttcatcgtatgttcatgtcttgtatatccttaatgaattttatctgcttctattgattgcttagagagaagtgttgaattctctatcttgtccttcgtgtgaggcctggagtgccagagagatttttcttagtgttcctgcactttccccagttttcagcaagaccttcatgtccttgacagtgagggcatctctccctccacactttccccttctccgcagtatattgctgttgattgttacttgatgctggactggtcctgtgcatctgggcctcagggatgggtctttctcaacattactgtccttgcccaggatgatagctaaactcttctttgtgtctgaggagggttttgcatcagatttttcaccagatttttttgcccttcccctaacagtaacaagcctttgctatataagagtgtgggatactgggtccaagctgattttctgtcccttcaccaatagcttgcagcttttgctttgtatagtctgctttgaaagtctggaatgtgggccatgttttgtgcctgaatgtcacaaaagtatctctttcaggtcttctgtattgtttgatcccagtttttctagtgaacatttgaaaattgcattcaggcagcaactccagtgggtcaagtctgggcatggtttactgaacagatcctttgttaatggtctcaaaaggctataatcaaggtatccgccaggctgccttttaaccggaggcttgagtggggcagaatcttcctctaagctaattcaggttgttggcagaattcatttctttgtggctgtatgactgagggccctggcttcttactggatacccactggaggctgcccacagttcctagtggccatctgctgttcttgtcatgtgggcttcctcaccatggttactcactttatgccagcaagaagaatctctaaattcagggagggcccagtccttcttctaagggctttcacctgattatatcaggtccacctaagataatctctcttttaattacttcaaaattagttgatttggtaccttagttacatctgcaaatatttttccatccttccatattctattgtatacaagtaagttacaggtcctacccattctcaaggggagggaattatacagggattcagctgggagcagggaacatagtagccatctttaaaaaattttgcctaccattgtcgcatttctctgttactaatgttgcaatctcacacatgctccttaatgtagcagtttctcattgtccgaactagtaccccaggttctttgtcccatatccgagaaaattaagaaacatagacacaaaggtggggttggagtgaaagtttaataagtgaaagaaaaaaagctctctgcaggaaagaggggagtccaagtggatggcggggttacagctgaattaaaaagcttttgtaagaaactcttcatctctgtaggagtttgagtaacttattttatcagtaaagctgtctgtgctactcccgttatcttatacagctgtgggtacgtctttaggcaagcagaaatcggcttgtcttgtttgtataactgtgggtttgttttagataagccacccccgccccatccccatgcaagttcccaccatgaatatgcctaaactggggtggaaactttttcctgggagttcactaattagacaaagaacaaagagctctgtgctagatcctgtttgcttatctgtccaggtgcagtctgaggttttttttttttccccaggttgttttatttttgcctgttgctgtgacttttcaagcaggctgcttctgcagtctgaattttttcccaaatgatttttcctttccttctccctcactaaagaccaacttgatctaagttcagttttaagcttagctaaggacctctagagtagctttcctttcagagaatagtttagtcttactactacagagtgacctttctgacatgttccctgagagaccaccaagaacatagctggctggagcttgaattttgctcctttgtttcaggtctgagaattgttcagtttatatccttcttagtttgttgccaggccaaatggaatttcactctgtgaatgcacaaactagcacactgcaaagtctgaagggacctcctgtggatttctggagctctttttatgcttcctattggatctttgctccataacttctagccattttagccttcctgaattttgctctttatctactcaatttagctcagtttcctggccctctttgggttctctttacctctttacctgtatctgtggtctggaaatttcatttgggcagaaattgggtgattatagggctcacctcaattacaattctgcactacctattgtccagtatctggaaaacaattattttgtgtattttgcgcagttttctaatgtttctgttgttgttgttgttgttgttgtttatttgttttttaaactgtgaggttaagtcttgtgcttggttattctatcatggtcagaagtgaaatgggaatatttacttttattataaaacacagttattaaccttaatgtaatttatgttacctctacgggagcttcacttttgctgacatctatgcttaatggacaaactgagatgctgtgtgcccactgatggttggagaccaataatgaaggcagtacagaaattgctgtttcaattgcattcttgataccctgtgatttttgtagtgttccagatcttgcatatttagattaagaggttattttgtggcattaacatatgcaataataataatcttctctgcattcaaaatttttgattaactggatttttgtataaggaataccaaggtgagaggtttgtattttttcctgtagaattgagttttttgagcagagtgccagtttgattagtgtattttatgacagttaatattacatagtgtactggatctattggagcagggagaagggagttgggaagactggtaattagttaggaagttattgctgcaatccaggttagatgtagagaggacttatccaaggttaatggctctgagaatagaaaggagggggcctcatatgaagtgaatagaagaggacaagcagtccaagttatagtgagattttgaggctccagtattgggccattagtagaaaatgaagaggggcagttggttttgagatgctcgtttgcgattgaaatgttaaatttgtaagacttatggaagatattaatggaaatattatttagattgttagaaaaatggggttgggataagaacattctgttatttaggaaaatttttgactaatggtagaggcatgggcatgattactgtatcttgtgtttgacgcatagtaggtacccattaattacaaaagaaattgaagaaggactgattcatgtgatttttttccttctgtatttcttgcatattagtaattatatgatacaattaagatggagtttttaaggacttaactttctaattgcatacgatgcttaagagttaagattgtatttttctcataccactatctaggaggtgaagatcgagaacttattcagagaaggaaagagaaatacagactagaactgttggaacaaatggctgagcaacagaggaacaagagacggtaatgaaaggtttgcatttaaaagagatattttgagtttaaagtgcatttgtgtaaaatgacatggttaaataaggggttgtcgttctaatatgatgtttgatttgtaaatcacttatattttcatctctacatgctaaatcaacaaggaaaataaatactaagagagttttttttttttttttttggtcataagtagcaagtgagagtatttatatattctgtaatagcccttttacttccctcattgatttcttcagtttttgatttaaggtagcatttaatgttatagatatgcccattggattatcccatatatagtaacaaatataaaagtattttttgccatatgaaatggtatgcacacacacatacatgcaaaaaaaattgtatcctataaatttaacatttccatcccaaatgagcatctcaaaaccaactgtccctcttcattttctattaatagcccaataatggagcctcaaaatctcactatgacttggattccttgtcctctcgtattcacttcatacgaggccccctccttctttctattctcagagccattaatgttggataagtcctctctacgtctgacctggattgcagcaatagctttctaactaataactagtcttcccaactcccttctccctgctccagtagatccagcacactgtgtaatattaactgtcaaaaaatacactaatcaaactggcaccctgctcaaaaatcttcagtggcttcctcaattctacaggaatggtaaatcacaagtatttatgttgtacataggtatcattgtttgtagtctttcttgttgaaatacctatgagatattatagtttaaaattaggaatagagtttaaaattagaaattttaaatatagcttaaaattagaaattacagtggatcacgcctgtaatcccagcactttcggaggccgaggtgggtggatcacaaggtcaggagatcgagaccatcctggctaacacggtgaaaccccgtctctactaaaaatacaaaaaattagccgggcgtggtggcacatgcttgtggtcccagctattcgggaggctgaggcaggagaattgcttgaacctgggaggcggagtttgcagtgagctgagataacgccagtgcattccagcctgggcgacagggtgagactcttgactaaacaacaacaaaaacaacaacaacaaaattaggaatagagatctcgttttgagagaatttgagacctgttatctcttagtttttgccttttttccctctatctcagaggaagccaatatctactgtttgatgttagctatctttaacatcatttttaaaaaaaccctattattaggaagtatggtagatatatttaaatttttacccttctttttgctaactgaaaatatatgtgtaccctaaaagaggtttttttgttttacaaggtaaatattttatttttgtgttttattttgtgtgaattagtctttgaaatactctaggcattggcttagagatacatagtccaagttagttacatgtgaattctagtttactttgtatcaagtaaaaaaatttggctttcagtattatttaaggctgtaatgtcagttaaaggaattatttgtttttgtagatgtagtgcatagactttgtgtataagcttctttcagtgatgatttataattttgatagtttactatatctttttaatatgtaaaactttaattttgtttagagaaaaagatttagaactcagggttgcagcgtctggagcacaagaccctgagaaatcggtaagggtttctggcatcttttaatgtttaatctttcatcaaatgatcctcaaatgtggtggcaggtggggatagagaatattgggagaaaaagagagtagaccaatttgaacagtaataaaattaactaaattcagttctcataaagtgtaaattctcttaactgttatttccttgaggtaatttttcctttttcatttgtgtgtcatttttttaaagtttaaattagttctctctgctttattcacatgtactattccatgggaaagttatctgggttaaatttacaattgatgttaatatttttcttgaatacatcttgatcacttacttttcttacattggagtgatttctgagaaaactgacgactttatttttaaagcgttttagtaattgttacttattgtaacattagagagataataatcttatttttactttaattttgcaattctcatcattaagtggaatgaattactcacatcattgcagttaagtaaggaggaggtaatttattgtttttaccacaatttattttttctgtagttggttatgtaatatttatttctaatacaagtcttgtttcatctttgaatgatgattaagacctttaatttcattaaaaagctcattcttaaaaaggatgcagcaacttaaaattatttacctgtaggcaacttttgatttgcttttacttatgctgagaatatatcctgtgggttatctatttggaaaagtttcatattgcaccagcatcactcgcagtatgcttctgggttaacctgataaatcattcctgataagataaccatggtaggaaaaaaagaagataaatttcaaagctaaatatattttcctttatgaatcaaaagtttccttttaagaggtgagctttttaatgtaatatgttggcatgttaaattttgtatttatggttacactagtgtgtgacagaccttatttatctttgaattgaagctcctatacagtgtcaagttgatttatgagaataaataagtaattggaggcaacagttacgcctttacttttgggtttacttttgatgtgcaaatcttagaaaagggcacataagtgatgttctaaagtagagattagcaaagtgtggcctgtgaccaaatttgtttgctacctgttttcataaaaaaaagttttattgcagcacagccttgttcattccttgacatactgtttgtggctgctttagcaccatagctgagtctgctcattatgaagagactatgtagtcttgcaaatcttaatctatttactgtctagccctttacagaaagcatttgctgaccctgttttacagaatactataacagaaatggcaattagagaagtagcacggtgtcctagtacataaaaagaatactacaggtatatttaaaattaatatctgactctagtctttgcttaattatttactaatagtgagaccttaggtgatatattacttctcagagagcctcaattacccatttataaaataagcattagatattcagagtctggctgggcacagaagctcacacctgtaattccagcactctgggaggccgaggtggtcggatcacttgaggccaggagttcaagaccagccttgccaacgtggcgaaacccccttctctacaaaaattagctgtgcgtggtggcaggtgcctgtaaccccagctactctgaggctgaggcaggagaattgcttgaattcgggaagtggaagttgttgtgacctgagatcatgccactgcattccagcctgggcgacacagtgagactctgcctcaaaaataaataaataaataaataagatagatagatagatattcagagtcttttatagctgtaaaattctgttattcagtaaataaataaataaaaatagatattcagagtcttttatagctgtaaaattctgttattctgtgactgtcttaagtgcctgctgggataggaggtcttttgaggtcccttccacctttaaacttatgattatatgtaacaaacagattttttttctttattttagcctgatagactaaagcagtttagtgtggcaccaagacactttgaagagatgataccacctgaaagacccagaatagctttccagacacctctccctcctttatctgccccatctgtcccacccatcccatcagttcatcctgttccttctcaaaatgaagatttgcgcagtggactcagcagcgcccttggtgaaatggtgtctcccaggtgcttgtttaaatgttttgtgtttgggaattaggtaaggtattgctatattttatgtttagaaggatatactgaagcggatgacgttattcttcagagattttgtacagttaacagttttgtgaaataaattctcttgaaatttgtttttttctctgctattataaaaaaagggaaattcttaaaacattttattgtttaaagatgattttgtatctttagaatgaattactaagtacattttagtatttatttagttttgggttgtattttgggatgtttttgatatcttttaacatataaaagttgtacatttttttcaattttgttctttccacttggcaaacattgaattcttcaatttgtgcagaaaaagtttctaatgtggctcttttacacatataattttattttagcttctgtttcttcagctcattctctgtgattacttatgggctgtgtaactcaaatacctgaaataaaaagtgttgagattataaaacctgtaatttaagtattggggtaaagatttgatttctgtaggtgaaaggcatcacactataatagaatatacataaagaaaatcctgttgttaacactgatattttctgggctatactttcttctttgtagggcctgggcttattttttgttcactgttagtgtattaattataaaatatatttaaatttagaggtgtttttcttaacttttttgaacattgatattttctggactgtattatttcagtagaagttggtcttttagttactaaccaactgtggaagtgtgtttactatacttatcaggggctttgtgttttttatctgatggcttcctgactcaggaataggaggcattggaattaacagagcattttatggtggtctcagcattgaattagggattgaaatggttggctttcctatctggattttgggcaaaccacacctttgttgaacttcaattttctcatttgtaaaagtggagtagtattatatttttttcatgtttacaattacagggttgtgaggattagcttgtataaatctctatgaaattcgatttaatgatgacagctccctttcataacagttatttgacatttttgttgatgtatttttgttgtgaggatggtataaggtttagacacattgagtggctagtaaatgtgaaagatattccctactgaagagaacttccgtaccttcttagttctttggaattattttgaagtatatgacaagggagaacctgttaagatacatacaacagtgagaacattctagaatgccgccatctctttctattcatttaaaggaatttgcctttgccatttttactactgaaaaatattgcattggtagcaatacagagatatttcctaatcagtaatgaagtgctaatgtagaggtttttagaagttttaaatttatgaaatacttaaagattgtgtcaatactttactgttggtatttaagttgcttttattttactattaagaaatacactcgtttcctcagtcagactgaaccatttgtactcacactgttttgtagctctttgccttctctttctggattgtccttcctctaacacacacaagctcactccagtagcatggcttaagcgttgcctcttctggaaagccttacatgtgctttctttctctccctcatgtgatttaaatgtcccttctcctgtacctatagcaatctgcattttttgggctatattgctatttagtttaatttgcttgtactattattaattatttaatttgcttgtacttgactgtagttgtttattttcatgttactcctgagggacagggaccatgtttgtctttatttgatactggcacatagtgcctattggatattaattgattgaatattaacccaggtttttatcttacataaatgtacctgaaattgtgaaatcctatgtaatagtatttgctttttaagtcataatttttggtgaatgattggagcaagatggtgacattttctaaagtagtgataggattttcagtactgtttttgcaaaagagtaacatcttgattttttaaaaaattgcaatgaaatatgagaggaatttttcatctttcttttcatacaggattgcacctctgcctccacctcccctactaccacctttggctactaactatcgaactccttatgatgatgcatactatttttatgggtccaggaatactttcgatcccagtcttgcttattgtaagttatctatagggtaagcattttctccccgcttggctcaataaggaaaattgtttttttgtgtaaacaaaaaatatctaaatgagaaaagcacaactttgcttaattcagatgttatatattgatttaataaatgccctattttaaagcccagttatattttatagttatttccttttcatcttggtttaagaaataacgattgtgttttcttatgttgttctttgctaacttctagcccagaaggaaatattgatggttttctctatgtaacattttgattatgcacctttttctggaggaataagtaaaatattattaaatgattattctaaataaactttttttgtttttttgttttttctttaagatggttcaggaatgatgggcgtacagcctgcagcttatgttagtgctcctgtcacccaccaactagcacaacctgttgtgtaagttattagttaaaagaataattttttccccacttttattttgttaagatacacataacctaaaagccaccatcctaacattttagagtatactatttagtggtatttaatattttcataatgtgcaaccatcaccacaatccatcttcagaactcttttcatcttgtaaactgaaactctatacccattaaataataatggtgtacctcctcattcccctacctccgttctctggcaaccaccattctatgtctctgattttgactactccatgtacctcatatgaatagaatcatacaatgtttatctttttgtgactggcttatttcactttgcataatgtcctcaaggttcatccgtcttttagcatatttcagagtttctttcctttttaaggctgaattataatccattgtaattgtatacaacattttacttatctaaaatctatccatttatccattagtggacactttggattgcttccacattttggctatttgtgaataatgctgctgtgaacatgagtttacaaatatctctttgaaatcttgttttcaatttttttgggtctgtacccagagctggaattgctgggtcatatggtaattctatgtttaattttttgaagaactgccatactgttgtccacaactgctatactttttaatattctcaccagtagggcacaagggttccaatttctccacgtctttgccaatacttattttctttttcttttttttatagtaaccattctaatgagtgtaagatggtatttcattgtaggtttaatttgcatttccctaattattagtgaggttgagcatcttttcctatgcttcttggccatttgtatatcatctttggagaattgtctttccaagtactttcccatttttgaattaggttgtttgttttttgttgttgagttttcagagtcctccatatatcctggttattaattctgtatcaggtatttgatttgaaaatatttgctcccattctgtcttgatattgccttttgatgcacaaaattcttaaattttcataaagtccaatttgtctttttattattgttgcctgtgcctttggtgtcatgtctgagaaatcattgccaaatccaacatcctgaagcttttgccctatattttcttgtgagagttttataattttaggtcttatgttgagctgtttgagtcattttgagttaatttttttatggtattgcataagggtttgtcttagttattttgtatgtggatattcagttttcttagcaccatttgttggaaagactatcctttctgcattgagagatattggcattcttgttgaaaatcatttgaccaaatatacgagggtttatttttgggctatttatccttttcccttggtgtgtatgtcttcctttatcccagtaccttagtgttttgattactgttgctttgaatgttttgaaatcagaaaatgtgagtgctacagctttgttctttttcaaaattgttttggctattttggatccctggagattccatatgaattatgggatgagtttttctatttctgcaaaaaagtcattgtgattttggtagtgagtagtgagtgtattgaatctttgggtagttttgacattttaacagtgtcatgtcttctgatccatgaacataagatatatgtccatttatttatgtcttttaaaatttctttcagcaatatttcatagttttcattgtataggtataggtctttcacttctttagttaattcttaagtattttattcttttggatgctttcataaatggaattcctttcataattttcttttcaaattgttcattgttagtgtatagaaatgcagctgatttttgggtgttgatttgtatcctgttactttactgaattcatttattttaataattttgttgtagaatctaggattttctgcaaataagatgataacatctgtgaacagagataattttactttttctttctgatatgaatactttttatttatttttctttctttctttttttttttgagacagagtctcaccctgtcacccaggctggagtacaatgttgtgaacttggctcactgcaacctccgcctcctgagttcaagtgattcttctggctcagcctcctgagaaactgggattaaaggcgtgcaccactatgcccggctaagtttttgtatctttagtagagacagggtttcaccatgttggccaggctggtctcgaactcctgaccttgtgatctgcctgcctcagcctcccaaagtcctgggattacaggtgtgagccactgcgcctggccccttatttttctttcttaattactttcttaattaccctgactagagcttccagtactatgtttaatagaaatggctaaagcgggcatccctgccttgttcctgatcttagaggaaaagctttcagtctttcactgttgtgtatgatgtttgctgtaggtttttcatatatatagcttttattatgttgaggtaatttcattctattcctagtttgttgagttttaacgatgcaagtgttaaattttgtcaaatgctttttctgtattgtgatgatcatgtttttttcccctttattcttttaatgtggtatattgattgatttttttatgtttaaccataaccatccttgttttccaggaataaattccacttagtcatggtgtataatcattttaatatgctgctggatttggtttgctagtattttgttaaggagttttgcatcagtgttcatatgtgatcttgttgtagtttccttatactgtctagctttggtataagcataatgttgggcttatagaaggaattaggaagtgttccctcctcttgaactttttgaaaaagtttgaggatttatattagttcttctttaaatgtttgatagaattcaccagtgaaaccataaggtacagggcttttctttgttgggtgattattgattagagattcagtctctttagtaactagttatataggtctattcagattttctttttcttcatgatttagtcttgataggtttttatttctaggaatttgtccatctcatctaggttatccgatttgttggcatataattgttgataatattcccttacagtcctttcttatttttaaaagattaatagtgatgcccctttgtgaatttctgattatattttattatttatttatttatttatttttctgacctcattcttcccatcacagaattcctgattttaatagaagattcagagccttcttgttggtcagtgtagctaagcatttgtcaatcttgttgatcttttcaaataacaaactattggtttggttgattttttttttttctgtcgttattctagtttccatttcattgatttctgctgtaatcttttaaatttcctcccttctgcttactttgggttccgtttgctctcatttttctggtttctagagatgaaaatctagattattgatttggtatctttccctttgtttggtatgtatacttacaactataagctttcctcttagtactgttttagctacatcccttaagttttggtatgttgtcttttcactttcattgctctcaaaatattttccaatttttaaaaatttcttcatcaacctgttggttattttgaaatgtgttgtttactttccacataattgtgaatttcccaaatatccttctgttactcatgtctaatataattacattgcagtaggagaacaaactttgtatgatttcagtcagtcctttttaatttattgaggcttattttaagacctaacatggtctgtcctagagaatgttccacatgcatttgagaagaatgtgtattgtcctgttggtgagtgtattattctataagtgtctcttagatctagttggcttatagtgttatttcttttatttccttgatcttctgtgtagttgttctattattagaagtgaagtatttaatctccaactgttactttgtgtgtgtgtgttctgatatacagtcttgctctgtgtgtgtgtgtgtgtgtgtttgtgtgtgtgtgtgttctgatatacagtcttgctctgtcacccaagctggaatacagttgtgagaccatagtttgctgtagcctcaacctcctgggctcaagcaatcctcctaccccagcctcctgagcagctaggactacagccgtgtgccactgcacctgactgatttgtttattttttgtggaaacagggtctccctgtgttgcccagtgtgatcttgaactcctggcctcaagcgatcctcttgcctcagcctcccaaagtacgaggaatatagccatgagccaccacacccggactccaactattattcttgacttgtgtattattctcttcaattctgtcagtttttgtttcgtttcttaggtctctctttatatgcatatgtttataattgtgtcttactgaagatttgacccttttattagtgtcagagattcttctgtgtctctgctaacaatttttgtcataaagtgcttttagttctaatataaatgttgctgttctggttctcttttagtactgtttgcatggtgtatgatttttcgtatttactctcaatttatttgtctttgaatctaaaagatgtctctatgtagacagaatgcagttacttcctggtttttatgtttgccattttgcaatttttttctatatgtcttatgtctttttattcctctaatcctcctttattaccttctttttcttcttcgtttttttttttttttaagagatagggtctcattctctttcccaagctggagtgcagtggtgtgatcacagagctcactgcagcctcaaactcctgggctcaagcaatccttccactccaatctctcaaggagctggaactacaggcacatgccaccacgcctggctaaatatttgtattttttgtagagatagggttttgccatgtttcccaggctggtctcaaacttctggctcaagtgatcccagccccacaaagtgctgggattacgggcatgagccaccgcggccaggctcttttttttttttttaagacgcagtctcgctgttgcccaggctggagtgcagtggtgcgatctcggctcattgcaagccccaccttctgggttcatgtcattctcctgcctcagcctcccgagtagctgggactacaggcgcccgccaccacgcctggctaattttttgtatttttagtagagacggggtttcaccgcgttagccaggatggtctcgatctcctgacctcatgatccacccgccttggcctcccaaagtgctgggattacaggcatgagccaccgcacccggcctattagtttcttttatgttaaatatttaatagcattcaattttgatttttttgttgccttttgcataattttgagtttttttgtggtttccctacagattaaaattgatatcttaatttaaaataaatgagtttagattaagggcaacttaatttcaatggtacacaaaccttttctctaatataaggtcattccttttcctctacttgatgctattattgtcatacaaatcacactattatacatttaagtctctcaacacagttttataattattgccttatgcaattgtcttttatttatttataaatttattttttgagatagggtcttactctgttgcacaggttggagtgcagtggcatgatcatggctcactgcaagcttgaactcctgggctcaaacagtcttcccgccttagcctcctgagtagctgggactacaggtgcataccaccaatgctcagctaattaaaaaaattttttgttttgttttgttttggagataggatctcactctgtcacccaggctggagtgcagtggtatgatcatagctcactgcagtgtcaaactcctggatttaagggatcctcccacctcaggctcccaagtagctactactcccactacgcctagctaattttttatttttttaattttttgtagagacaggcgtctctctgtgtatcccaggctgctcatgaactcctggcctcaaaccaccttggtctcccaaagtgctgggattatagatgtgagccattgtgcccatccatagttgtcttttaagtcaaatagagaagaataaagttacaaacgtctttacatttgtaatatcttttatatttgcccatgtaattatctttactggcgttctttatttgtttgtgcttacttcagttgctgtcaagtgttctttcatttcaagctgaaggactcccttcagtgtttcttacagaacaggtctcttagtgatgacttctctgaattgtatttaataatgtcttaatttagctttcatttttgaaggataattttgatggtatggaatagtattggttggcattctttatcttttaacacaatatggtatcccctagcctttatggtttctgataagctgttaatcttactgaggatcccttgtatgtgatgaatggttattctcttgctttcaggatttctctgtctttatctttcagctgtttggctgtataagtgtggatccctttgagtttttcttacttggagtttgatgcgcttattggatctgtagattaatatttttcatctaatttgggaaatttttgcccattattttttccaatattctttgtgtccctttctctgtgtcttctcttcctgagacccccattggtacacattatggtgtttcacaggatctctgaagcttcgttcatttttcttcagtctttttctttctgttctagactgggtaatctcaattgacctgtcttcaagttcattgattgtttcttctgcctgctcgaatgtgctcttggctcccttttcttttcagttatatttttcagctctatcatttttatttggttctttttaaagtaatttctatctctttgttgttaattttatttggtaaacattgttttcacaatttaattctttttttgagatggagtttcactcttgttgcccaggctggagtgcagtggcctgatctcagctcactacaacctctgcctcccaggttcaagcgattgtcctgcctcagcctcctgagtagctgggattacaggcatgcgccaccacgcttggttaattgtgtatttttgctagagacggggttttgctatgttgctcaggctggtctccaactcctgacctcaggtgatctgcccgcctcggcctctcaaagtgctgggattacaggcgtgagccactgtgcccagccactttatttctttagatacatattttttagttctttcaacatatttctgataactgaataaaaatctttgttgattaaatacaaggcatgggattcctctgaaattttctgttgacttcttttttccccgtatgtatggcttataattctctatttctttgcaagtgtcataatttcttttttgaaaactgaacatttaggaaacataatgtggctactgtggaaattagattctcctcctccttgtggtttgttgttgttgctgttttctaagtaccctttgtaaagtctgtattctttgtcatatgtggccactgaagtctctgttaggatagcttaatagttcatgattagactgagatttctttaaaagctttgacccaataaacctcccagcctatgccaactggttctgtgtgtgtgtgctggggcatgcgttcagtaccctggcaatttacatctttgttttagctttcacatcccacttgcacagggtctcaatgccagccagaaatgagaggtgttctcagagcttcctcgggcatccatataattgcacatacatgtggctttctaaattctcaggaatatgttggagcttttcaagaccccatgggcatgttatttcccagatttttcttttaattttattgtcagtcttttgcttgccctggctggtatcactgttttagatagctatgatgttaagtaattactgctgattgttttctacaaaaccccaggatagtgagttctgagtctggtaaaatataggctctgtgaatggggcttttcctgggagctgccagacaggtcaaaagtgagatttttctagagattggatttttggggaattccagacctattctacctgtccagtggatactagattactggttttcacagcaactgtctttgggcagcgtttggattttaagtttatgatagagctaaggagaaactgaaaggtcaagggcaagttcaaatgccacaaagtttacttctcttactgaaaatcaaccttaacaaaaaaacaaaaactctcctgggattgttccaagccttccatgaatttccaaattacttagctcaagctgctataacaaaatattatagactgggtggcttaaacaacagacattttttcttggttttggagacatagaagtccaggataaaggtgtcagcagatttggttcctagtgagggcccttttcctggctttgtcattgtatcctcacatggtagagagagcaaggtctctggtctttcccccactccatttcacgcctccccattttttcttaagtacatttaatctcatcacgaggactgtaccctcctgatctcatctaaacctaattacctctcatagtccccagctccaaataccatcagaatagtacgcagggctttgatgtaagaacacaattcagtacatggcaccagaattattaaaaagttggttttgacaattttgactcgtgttctcattgctttaacggagtagcaggttttcttaaagttcttattctgccattctagaagtgctttctataaatcagctttagaacattttcatccctccaataagatccttcatgcccatttatagttaatcctaattcccatcctcagtatagttgtttttaagttcttctctgttaaatttttctgaaggccacattaaaaagtgtaaacttgttataaaagttagataactgagtgaccagctgaattatcttacaaaccaatgactttcaaatatttgtttgtttccaagcattttagcatgagaggtggaaggaacctgtgactctgttaactattttgatgtacgcacaatctgtcttctttccattgactttattaatttagcatgctttaatctttgtatcatttgagaggatggtaaagattttgattagctttagtctttcataaggatgggtgtgttattatatttctagggtaaccactaaaagtatagtaacaaaaggtaccacttactacagtaatagaggaaaaaattcaaaaaagaacaaccaaaatagaattgggaaattgttttattaactgtctgatctttttcagctttggtgatggaataagttaagaatttgttggccgggtgcagtggctcactcttgtaatcccagcactttgggaggccgaggcgggtgaatcacctgaggtcaggagttcaagatcagcctggtcaacatggtgaaaccccatctctactaaaaatacaaaaattagctgggcgtggtggcacatgcctgtagttctagctactcgggaggctgagacaggagaatcacttgaacctgaaaggcagaggttgcagtgagccaagatcacgccactgaactccagcttgggcgactagagtgagactccatctcaaaaaaaaaaaaaaaagcttcttggccgggttcagtcttaaacaggctaatacagagtgtggaatgaaggaatactctccggttactattatgagactttcataatcttgatacttaaacctaataagaccagtatgaaatggaaaattacaagctagttacactcattagcacagacacaaggatcctaaaactgaacctcaaagtatagagaaaggattattgatctggaattagaattactctcgaatataggatgattaaatttagtagagtatatcagttaagagcatggactttgtagcctgattgccttggtttgaatcctgcttttaccattcattagcttgaggtgtatttcttacttctattccttgtccgttaattggggtaataatggtatcacctcacagggtttttctgatgattgaatggttaaaatatgtaaagtgtttaggatagtgtctgaatactggagcctattggtgttagatataatcaatatgattataaaataaactactgtaatctaccatgttaacagaataaagaagaaagctatatgatatcccaatagacaaaggaaaagcattaaaataattgcattagtgattaaaaatgtaataaaataggttagaagggagcctataaacatgaaaaacttacatcatgtattttatttaatgatgatagatttaaaatattccttttgagattctatcattgcttcctttcacagggcttaatttcagcaaggccaaaaataagagaaagaaaggaaggaaggtacaaggattagaaaggaagagagaaaactgatgttatttgcaaaataatatatggttaaaatattggaattaatatgaaagttttcacagaattactgattacaaaatcaatatacaaaaagcagttgcaggaaatggcagttccttaaaaagaatatgatactgcaattccattcctaagcatgtaatcaaaagaaataaaaataacatgtagatgcaaagacttggatgtgaatgtttatagctgcattattgataatagtcaaaaagtggaaacaattcaagtgtccatcagtgagtgaatggataaacaaaatgtgttatattcatgcgatgaagtactactcagcaataaaaagtaatgaactactgatatgatataatatggatgaaccttataaatgttatgctaaatgaatctatacatactatattggtcccatttatataaaatgtccaggaagtacaaatctatagagacagcaggctacttacttaataattacctggggctgagggttgagtagggattgattgcatatggctatgaaggatatttttgggttataaaaatgttctaaaactggttatggtgatgatcgcacaactctataaatttactaaagatcatttaattgtatacagttgacactcgataacacaggtttaaactgtatgagtccacctacatgtggatttttttcagccaacttcaatagaaagtacaatatttgtgggatgtgaaacccatgtatgtggagggcctacttttcttatgtgggagttccatggggctcactttgggacttgagtatactctgattttggtataggcagagagtcctggaaacaatccctcagatataccacgggatgactatacttaataccccaattatttcctccctttcatcctgatctgactacataaatccttaaaccccctttttgggggagtcagggaggagttgataggtaaaggttaagaatttgggtctgtgagtatgtgggcaatatagacgggagggatcatgagtgaaatagatattgagagaacctgtccaccatatgatttataaacagtgtattttgagagaatgagtttattcacatagaccctctcaaccttctttattcatttacacaaagagcccccttgctctgaaaaaatacagtcagttaggaactatttgatctagtttacctcatcttcccttttagccactcataatccaatgtgacagtatacacaaacatacttgtttatcctaataaaagattgtaaataagttagaaaaggtaaatacacaatggaactcattttttaaagcagtgatatttttggagaagagaaagcttttttaaaattataaaatcaggctgggcgcagtggctcatgcttataatcccagcactttgggaggccgaggtgggtggatcacttgaggccaggagttagagaccagcctggccaacatggtgaaaccctgtctctactaaaaatacgaaaattagccgggcgtggtggcgggtgcttgtagtaccagttactcgggaggctgaggcaggagaatcgcttaaacccgggaggcggatgttgcagtgagcggagatggcaccatcgcacttcagcctgggcgacaagagtgaaactccgtctcaaaacaaaagaaaacaaaaaattataaaatcagtatttgaatttatcttttataatttagatttctaaaatgttttactgtcttcaaagtcagtatattcctgtacttaaacatgtgttatgttggctgggtgcagtgactcacgcctgtaatcccagcactttgggaggctaaggcaggaagatcacttgagcttagaagttcaagaccagcctgggcaacgtagaaagacttcgtctctaaaaaaagtgagccatgcatggtgatgtgcacctatacccccagctatttgaaaggctgaggtggaaggatcgcttgattccaggagatcaaggctgcagtcagctatgatggcgccactgcactccagcctgggtgacgaagtaggaccctgtcccaaaaaaaaccaaaaaaacagcactttattgcttgtgatttatgtaacaacaatatgtttaacattttttcttttatgtttccttgtgaatttttcaaaaatattaattttatttgagacagtcagactttttcctgtaattacattgttttattcttgaaatagctaagaagtaattttattagtaaatcatttaaaaataaatcattagttattgtgttacttgagggactttggctgtgttattatttctgtttgttcaggaagccgcctaagtcatatgtgtactgttcaatgaattaccacaaacttttttcactcctgtgtaactatcacctagcttaagaaatagatacagtgaatttgaaagttgcaaggattgtcaaagcaaaggcaggaaggagctaaggaaggggtcacttaaggattcctctttggcctatagagaaatatccttctgtatttttaaatgtatttatatgccatgctatttcaaaaaactgttgtattttcttcttgctttgtcgtcaatggatttaaattatttattgtgtatttgatgtaggaatacggttggacagaatgaactgaagattacaagtgatcaagtgataaattcaggattgatttttgaagataaaccgaaaccttccaaacagtcacttcagtcttaccaagaggctttgcagcagcaggtattgattcatttactcatttactgttgaacctcttaagtgtaagcatggtggtcccttagagctcagagtgtggccggggaggggaaaaaaaacagttaattataattcaaaatgctgagttttgaagtggatacagtaaaacgctgttggaagcataagatagggaaaataattgcctggggcagttgggagagcttcacacagtagttgatatttaagctgcatgttgtgcaatgactacgttacaagttgctggtgtatacagagaatggaattggggtggaagaaggggctggagagttagttaggttgttctagcagattgtgaaggactagctaataaggggttttcagtttcatctggttatgggcagctgaaggaaggaaattttaggccaagaaaagtatgaaaggattgtttgctttaagcagatttatattttatgaagataattggttgtgatttggacaattgggaagagattggcagagaaattatttagtagatagtccagtaaggaggtgatgaggccctgaaccagatggggacgttggggaagacatctaagagacaattctcaggtttcattgacaggactcagatatagggaatgagaacagagggtttgaagatgattcctaggagaataatgaggctataaaccaaaatggggaatacaggtagtagttcatgtttacagaggaggataatgggttctttcgtagtttgtaatatttgcagagaatttaagagtaactatcaaatgtatggggttctttgtgggaattcccttaccatctgagaggaccctgggactctaacttacttacttttctatagaattacacttggatttcttttaaaagtacttttgttcaacttttacatgggcaactttcttgaaagatagatttttaaaattacagaattaccaaccttttttgtatgttaggattctacaaataaaagactgaattttaaattcagaatctgtttttgcatgagcatattaaaaacaccactgacaaaactagatttttcaactctagaggtctatttgatgtgtgtgatgacttctttggctatgctggagcaaaaggttgcttaaatttactgtgcatatggttatgagtttaaaagtgactttccaaaatgtagacacttgtttattgcctatctgtatgtctctacagaacaaccctgcgcttatacttagtgatgataagaatgcatttgttttttgtgcttaatacagctttacagaagtattgcaggtttagttccagaccacagcaataaagcaaatatcacaatgaaatgattcacatgaattttttggtttcccagtgcatgcagagttatctttacactatactgtggtctattaaggtgcaacatgtcttaaacaagctacgtaaacttaatttaaaaatactgtattgctaaaaaaatttagcaaatcataatccttttgctggtggaaagtcttgcctcaatgttgatggctgctgactgatcagggtggcagttgctgaagattgggtggctgtggcaatttcttaaaatgagacaacagtgaaatttgctgcatcaattgactcctccattcatgagagatttctctgtaggatacgatgctgtttgataccattttatccacagtagaccttctttcaaagtttggagtcctctcaaaaccctgctgatgctttatcaacttagtttatataatgttctaaatctttgttgtcatctcaacagtgttcacaacatctttaccaagagtagactccatctcaagagaccactttctttgctcattcataagaagcaactcctcatccattaaaattttatcatgagattgcagcagttctctcaagtcttccatgcctcacttctaattccagttctcttgctatttcttccacatctgcagtttcttctaccactgaagtcttgaatccctcgaagtcatccatgaatcatccattagggtcaacttctttcaaacttctgatactgttgatattttgacttccttccatgactcacaaatgttcttgatggcatctggaatggtaaactctctccagagggctttcagtttagatttcccagatccatcagaggaattactctctgtggcaactatagctttatgaaacgtatttcctgaacagtaagaattcagtgtcaaaattactccatgagttaatgggctaaagaatggatattgtattagcaagcatgacaacaacattaaccttcttgtatatctagctcttggttgaccaggtgcgttgtcaatgagcagtaatattttgaaaggaatctcttttttttagtagtaggtctcaacagtggacttaaaatactcagtaaaccattcttgaaacagttgtgcagcaatacaggctttgttgtttcctttctagagcacaggtagagtagatttagcatcatctttttttttttttttttttttttttaaagacggagtctcacactgtcacccatgctggagtgcagtggtgcgatcttagctcactgcaagctccgcctcctgggttcatgccattctcctgcctcagcttcccgaatagctgggactataggcgcctgccaccatgcccggctaatttttattttgtattttcagtagagacggggtttcaccatgttagccaggatggtctcgatctcctgacctcgtgatccacctgcctcggcctcccagagtgctgggattacagttgtgagccaccgtgcccggctgatttagcatcattcttaagggccctaaggttttcagaatggtatattagcattggcttcaacttaaagtcaccagctgcattagcttctaatgagagagtcagcctgtcctttgaagcttgaaaccagacattgacttctctttactagctatgaaagtcttcttttaatacaaggctgttttgtctccattgaatatctgttgtttagtggaaccaccttcatcagttatctgatctagactttctgggtgacttgttgcagcttcttcatcagcatttgctgcctcatgttgtacttttttatttttatttttattttgagacaaagtcgcactctgttgcccagcctaggctggagtacagtggcacgatctcggctcactgcaacctccacctcagcctcccgagtagctgagactacaggtgcccactaccacgcccagctaatttttattttttatttttttttgtatttttagtagaggtggggtttcaccatgttggtcagggtggtcttgaactcctgatctcaagtgatccgcccaccttggcctcccaaagttttgggattacaggtgtgagcccagcccatgttgtacttttatgttatagagatggcagctttccctcaacttcatgaaccaacctctgctaacttgcaagttttcttctgcagcttcctcacttctctcagccttcatagaattgaagaaagttagggccttgctctggtttaggctttggcttaagggaatgctgggctggtttgatcttctatttagaccactaaaactttctctataacagcaataaggctgtttcactttcttatcattcatatgtttactggagtggcacttttaattttcttcaagaatttttcctgtgcatttacaactgggcaaagtgtttatttaacataagaggcctagctttcagcctgtctatgcatttgacaagcctttcccactaagcatagtcatttctagcttttgatttaaagtgagagatgtgactctttcattcactcaaacacttacatgccattgtagggttattatttggcctaatttcagtattctatcagggaaaagagagacccaaagagagggaaagagacaggggaacggctgattggtagaatagtcagaatacatatgacatttatccattaaatttgccatcttatgtgtgtgtgattcatggcgccccaaaacaattataatagtaacactaaagatcagcaatcacagatcaccataacagatataataataatttaaaaagtttgaaatattgtgagaattaccaaaatgtgacacagagacatgaaattagcccatgccattggaaaaatggtactgatagacttcctcaatgcagagttgccacaaaccttcgatttgtaaaaaatgcaatatctgtggccaggcgtggtggctcacgcctgtaatcccagcactttgggaggccaaggtgggtggatcagaggtcaggagattgagaccatcctggctaatgcggtgaaaccccgtctctactaaaaatacaaaaaataactgggcgtggtggcaggctcctgtagtcccagctactctggaggctggggcaggagaatggcgtgaacccgggaggcggagcttgcagtgagctgagatcacgccactgcactccagcttgggtgacagagcgagactccgtctcaaaaaaaaaaaaaaaaaaaaaaaaaaatgcaatgtccgcaaagcacaataaaattcagcacaataaaatgaggtatgcctgtatttaaagttgccaagcattccccagagagagttgatcctccgacctctgaattctgggaatagagtttgcctagggaaagtaggtctggtaaggttgagggtagactttgtggctgggcattccccttgaaaggatagatgaaaaaggaacgtagggagatctgatggtcccatggaactggcagggttagagagggaatggctcaggtagacactaggggagggaaggaggagttggttgagtctgaagtaccttagtggctagaaagtcatttggtgtatatagaggaacaggggctatgtattctagccattgaattatttttatttttaatgttattatttaaagacagtgtcttgcataatgttgcccaagctgaagtacagtggcatgatcttggctgactacaaactccacctcctgggttcaagtgattcttgtgcctcagacacccaagtagctgggattacacatgtgcgcaaccacacccagctaatttttgtatttttagtagagatggggttttgcatgttggccaggctggtcttgaactcttgaccttaagtgatctgcccaccttggcctccataggcatgagccacgacacctgacctaaagtatttttacattgagtattacatatatttgtgattttaacctttgtaggggggtacactggggaaaaaaaaaaaagcaaatttttttgcttgttttctaatacaaaaaataacatctggtattactaacttcttgtatcagaatacttgtcagcgtttattttaaatatatcttatgttgtcaagattcgggaaagagaagaaagaaggaagaaagaacgtgaagaaaaagaagaatatgaagctaaattagaagctgaaatgagaacatataatccctggggaaaaggtggaggtggtgctcctctcagggatgcaaaaggaaatctgataagtacgttatttctactgacttgtttttaaaataagctaaattatttttaactttttaaaagattggggagtagaaaaaagtaggaatcatagcctctatagcaacgcatgtatgtaacttaatgcatatgaggtattttaagagtaaatataataacagaggctagaaagcatttcttcttcagaatactatccatttgtttttattataaatatttcatcctccgatgttgataacccagttgcagagaaaagctcatgttagttgataagtttttactgaaactggtacttagaatattttgttccctcataaaaatgataaaacccatattacaatttaaaaaaaataaactagtaagatgtcttagaaataaaggatgtaaaacagttttgggaggggattttgtgtttaatttatctatgcaatatacctgctaattgcaagaattcctttgggaaaaagaagacatgatcatagaaactttctagcaagtttcataatttgttgatttatctttcaattatgtactctcaaaaatgtttgatctagtaatcacacaacaaatacttcgaaagagtggctttatacaacttgttatatacagttgtctgttggtaaccatgggacattggttccatgatctcctgtgaatacccaaatccatggatgctcaagttcctgatataaaattggtaaagtgttcgcatataacctacacacatcttcctgtatactttaagtcatctctagattacttgtaatacctaatacagtgaaaatgctatgtaaatagttgtaatcttgtattaattagggaacaatgacaagaaaaaaagacttttcacatgttcagtgcagatgcaagcatccatttttttttgttttttaatgtttttgaattgtggttgattgaatccacagatgtggaacccgcagttacaaagggctgttgtatatattaggatggtctttgtttagcgtttagttaagcagaataaaagtagatcaaagatacacacttcatgttctttaggtgttatgtattgtaggaatagatgagtgatagaatcggaagattggatgttgagttagaattctcgtgtgttgcaaaaattttctcccattctgtaggttgcctgttcactctgatggtagtttcttttgccatgcagaagctctttagtttaattagatcccatttgtcaattttggcttttgttgccattgcttttggtgttttagacatgaagtccttgcccatgcctatgtcctgaatggtattgcctaggttttcttctagggtttttatggttttagatctaacatttaagtctttaatccatcttgaattaatttttgtttaaggtgtaaggaaggtatccagtttcagctttctgcatatggctagccagttttcccagcaccatttattaaatagggaatcctttccccatttcttatttttgtcaggtttgtcaaagatcagatagttgtagatgtgcggcattaccagaatctacaatgaactcaaacaaatttagaagaaaaaaacaaccccatcaaaaagtaggcaaaggatatgaacagacacttctcaaacgaagacatttatgcaaccaacagacacatgaaaaaatgctcatcatcactggccatcagagaaatgcaaatcaaaaccacaatgagataccatctcacaccagttagaatggcgatcattaaaaagtcaggaaacaacaggtgctggagaggatgtggagaaataggaacacttttacactgttggtgggactgtaaactagttcaaccattgtggaagtcagtgtggcgattcctcagggatctagaactagaaataccatttgacccagccatcccattactgggtatatacccaaaggattataaaacatgctgctataaagacacatgcacatgtatgtttattgcagcactgttcacaatagcaaagacttggaaccaagccaaatgtccaacaatgatagactggattaagaaaatgtggcacatatacaccatggaatactatgcagccataaaaaaggctgagttcatgtcctttgcagggacatggatgaagctggaaaccatcattctcagcaaactattgcaaggacaaaaaaccaaacaccgcatgttctcactcataggtgggaattgaacaatgagaacacatggacacaggaaggggaacatcacacaccggggcctgttgtggggtgaggggagcggggagggatagcactaggagaaatacctaatgttaaatgatgagttaatgggtgcagcacaccaacatggcacatgtatacatatgcaacaaacctgcacgttgtgcacacgtaccctaaaatttaaagtatagtaataaaagaattcttatgtattatgcctttgcttgttaaatattggtttttttgaagatatatttgaggcccactttaatttattttaatttaattaattaattttttcgagacagagtttcactctgtcacccaggctggagtgcaatggcaccatcttggctcactgcaacctctgcctccaggttcaagcaattctcctgcctcagcctcccaagtaactgggatttataggcatgcaccaccacacccggctaatttttgtatttttattagagacggggtttcaccatgttggtcaggctggtctcaaactcctgacctcaggtgtcccacccacctcagcctcccaaagtgctgggattacaggtgtgagccactgtgcccagcctactttaattttaatagctctttttttcttcccaaaagatttgttcctttcctatcttcacctcatgaataattttctcacagttttgaaagagtgaaactcttattactttctttatcaatgaaatgattttagatgatgcctagctaacatttcttattttaataggtaagtgtttacttgaaaatatattagaaaaacactagttttccatttatgaatagtgctataatattttcttttaaactacaggtattaaagtgaaggcattagtccaggcatttaatggaaagtgctgtaataataaacaaacccaaattcttagaagcttaaggcctctcttgttaggcatccacttttgtcccactctgatgctgctgtttgggtggttctcctccaagaagtgactcagggatccattgtttcattccttcattttagagtccttttcttcttgtccagggacaaattgaggattttgttggggcctggcctggatgtggaggaagatcatttttgccttcattccattgttcagacctagttataggttctaacctaactgcttgggaggctgggaagtttaactttctttatgctcagaagaaggacatgggattaatagccatatgggcaatctttgctacagtaaatttaaattataaattgatagaagttaactagttaccatgaaaaatgtgcttaactgagtgaaacattggaaaacattgggatagagcagttttctaaaatcttacctctaagattatttctagttcaaacaatacaattattgtgttctgtatgcctttaattggtggaagtgagtaggataaatttgggttattgagttataaaacattattttagaattgcttgacctaatgagcatggagaaaatgtttccacattattttagaattgcgtgacctaatgagcatggagaaaatgcttcttagatttcaatttttaatagtaatgtttagttggcttatttaatgccgtcttcatgccatgaaatagaaaaggcatactattttatcaaatacagtataactcttttaatgatattttcaagcaagtaaactcatgacttaaagagtatcagtttattttgtatgtggatgctacattttatctttatttttattttttgagatggagtttcgctcttttgcccaggccggagtgcaatgatgcaatctcagttcactgcaacctctgcctcccgggttcaagcagttctcctgcctcagccttctgagtagctgggattacaggcatgtgccaccacgcccccctaattttgtgtatttagtaaagatggggtttcaccatgttggtggtcttgaactcctgacctgaggtgatccatccacctcggcctcccaaagtgctaggattacagacatgagcgactgcacccagtgtagctactacattttagagaaggcgggaacattacatttgaaatatgtagtatagagcagtgtgatgactaagaccacataacgtctgttcattatcttggctaactttaattctgctgctgacttttctaattactcctgttctttttttgatcttttattccaaagaaattaataaaattgaatcttaacactgcacccttatcttacctaagaagatctcattataaggcatagtagttactaatgaaatataaaaatgtgttattcatgcaactttaaagtatcaccccttttaaagtaaatatttctcattttaattatttgtacagtattttattctgttgtctttctcagttctttatttattaaagttctttattcaggtttttatttgaaactttacatgaaactgtccatgtcaaatgttaaaacgtatacaccaaaagaaaaatgtcaataaaaataaattaaaagataaaattaaaaaccactttgaaaaatggtatctcatagttccaattgattaacaggatgattagttagtcagttctcttacttactcgtccacccatgccaatctgtgatctcgtttctggcatgaaaatattgccttttttctgacatttgtgttttagcatagtgtttctgagattcatccatgttgttacatatgtcagtagcttattttttttattactgaatagtattacattttctgaaggtatcacagttgtttatccatttaccagttgatagatatttgggctgtttacagttcaaggctattataaataaagctgttagaaacattcacttacagatctttgtgtgaacataaatttttatttcttttgggtaagtgcctaggaatagaattgctgggttgaatagtaagtgtttaactttgtaagaaactgccagaacattctccaattttgttttgtcattttgcattcctatcagaaaagtatgaggtttctagttgctctgaattttcatcagcacttgaaattatgcatctttaaacttttagttattttattgaaagtgcagtgatacctcatttaaaaaaagctttttctattgtgaaattaagacctaaaagagttgcaaagatggtgtagagagtatccttcaccttgtttcccctgacgttaacgtcttagataatcatggcacaatgatcaaaattagaaattaacctagatacagtgccgataattaagttacataccttgttcgaattttaccagttttttttttcttttcctaatgtccttattgtattttaggctctggtccaggatcctataatgcatttagttcatgtctctttagtctcctccaatctgtgaaattcctctttctcagtctttctgtctctctctgttccattgctctatatttctatccttttgcccgtatcagagtctcttgattactatagctttgtagtaagttttgaaattgaaaagtttgagtcctccagctttgttcttttttttcaagatcttttgacaactcaacttcttcgcatattttactatcactatagtaatgtagtaatattattatttagtaataagttatagtaagtaaataatgttatagtaagtaattattactattactattactttgtcatgtcaagcatggtggcattttcattgggattccattaactttatagataatattgaaacagccagcatcttaataatattgagcctcttgatccatgagtgggcagtgtatatccatttattgcttctagttaatttctctcagcaatattttgtagtttttggtggcagatcttgtgtatattttgttaattgtttccctaaatatttcatgtggtttgaagctattttaaaatgttacattaaaaaatttttaattcatttgttcattgatggtctatagaaatacaggtaaattttttatattgtctgtagtctgtgtgcttgctactgtctgtagtctgtgtggttgctaaactcacttgttagttttagtagtttttttgtagattctttgatttttaatgtaggcaatcatagcatctgtcagtagagttagttttacttatttctttccaatctgatgccttctatttattttaattgccttttacactgtttaagaactccagtacagtgttaagaattcatgagcgcagacatccttgtcttgtctctgatttcagatggaaagcaatctttcaccattaagttagctgtaggcttttagttgatttttcttttatcccattgaggatgttctattccttgtttgcttagaggtttcattgtgagtgtatgttgaattttgtcaggtgcttttctgcatctattgagatgataatgtggtttctttacccttctgacctatggtaaattacattgattgatttttgaatattcagccaatcttgcattcctgggaaaaaccaagctgtattattgtcttttatacgtgttgtagaatttgatttgctagtattttgttagagatttttgcatctaggctcataagatattctggttttttatttctttataatgttgtctggttttggtgtcagggtaattctggcctgataacatgaattgggaaatgttttttcttttgttttttgagacagagtcttgctctgtcgcagaagctggagtacagtgacataatcacggctcactgtagcctcgacctcctaggccgaagcaattctgccacctcaactttctgagtagctgggactacagtcatgtaccaccatacctggctaattttttttattttttgtagaaacagggtctcactatgtttatgttgcctaggctggtctcgaactcctgagctcaagtgatcctcccaccttggcctcccaaagtgctgggaatacataggtgtgagccacatcgcctagctgggaaatgttttttctgtgtttagaattcaccagtgaaggctgggtgtggcggctcacgcctgtaatcccagcacattgggaggctgaggcaggtggatcacaaggtcaagagatcgagaccattttagccaacatggtgaaaccctatctctactaaaaaaaaaaaaaaaaaattagctgtgtgtggtggtgtgctcctgtggtcccagctactcaggaagctgagacaggagaatcatttgaacccaggaggtggaggttgcagtgagccaagattgcgtcactgccagagcgggactccatctcaaaaaaaaaaaaaaaaagcattcaccagtgaagccatctgggtggggaatcttctttttgggaaagttttaaactatgacttcactttatttaatagataaagagacattcagtttatttcttatgtgagctttggttatttgaatcattcaaggaaattattcattttatttatttatttattggcataatgttgttcataatatttcttttttattctaatgtttgtaggatctgtggtgatggcttctcattcattcctgatatttgtaatttgtatattttcttaatctgtctggctggatgtttatcaactttatggatcttttcatagaatcagctttagttttcattgattttttttctctgcttttcttcttgtttcagtgattttgctcttatctttactatttgcttcctttagtttgctttgtgcttacttttctcccttttctaatttctttcttttttttttgtttttgttttgagacagagtctctctgtgtcgcccaggttggagtgcagtggcacaatctcggctcactgcaacctccgcctcccgggttcaagtgattctcctgcctcagccttccaagtatctgggactgactacaggcacacaccaccacacctggctaatttttgtatttttagtagagacggggtttcaccatactggccaggctggtctcgaactcctgaggtgatctgcccacctcagcctccgaaagtgctgggattacaggcatgagccaccgtgcccagcccccttttctaattttttaatgtcgatgcttagactatgatttgagaccttacttattttctgtgcatttaagtgtgctacacatttccctctgagtactgttttagctgtacatcacaaatttttatgtgttgttttaattttcattcagttttctgattttcattgtgacttttctttgacccccattagttatttggaagtggacttaaaaattttccaagtatcaggggattttcctgagagctttcttttattcaattctagtttgtattctgttttgtaagagaatatacttttcttttttttttttttttttgagacaaggtctcactctgtcacccaggctgtaatgcaatggcacggtcatgcctcactgcagtctcaacctccctggctaaagtgatcttcccgcctcagctcccccaagtagcaaggactacagacacatgctaccatgcccagctaattacaaaattttttttagagacagggtctcacttttttgcccagctggtctcaaactcctggcctcaaatgatcctcccacctcagcctcccgaagtgttgagattacaggcatgagccactgcgcccagctggagagaatatacttttaatgacttcagtgtttttaagtttgtgagatttgttttatgagccatcagttagaattttactctataagtaagtgtatatattttaaattaggttaattttgatatatgtattgttagtagtgctagggttgggaattttgcttagctctctgaattaggtcattataaaagagtttctgtgtcagccatgaattgctgaataatcctgggtttatagtaacatttaacatatctcagcccttcacaaaatatattttgatatgtattttccaccaaagtataaagagtagcagctaacttgtgaagttaattaaaattaatttttttataatgagctaattcactcagtgaggagcacgtaagtgctcctaattttatattgaatgttatgatgatttacatttaaaataaagtcctatctttgcagttgacaaattacactcttgaccaaagtgccttttttaattttcgttttttagctgatttcaaatcatttattttaccatctcacagaaagacagaaaaggagtggccagttgccaaatcatttttcccaataaaaagcaatatggatttggtttgcttgctaaatctgatagtcttaaatcttaataattatgtactctgatgaaattaattttctcttaatataaatatgttgaatattattccagttgagaagtccatatataatcaacaataaattataatgtgttatcgaagtttgcttacatatagggtatctcctaatgtatggtttgtgcaggtgactatcaaactaagattgcattccctaagcactcactagtttggcaacacagctgtagattatttcaagaatatctatctgccttgccagtccttggcacttgggaattttcttgcagtcacctttttctgtggtttcacccagtcccttctctttgcattttttctatttatttcttctttctacctctgaacatgcttaggtcacttgtattaaaacacagacaaatgcttcctttaccatataaaacacattcaaaaagtagtccatgcttgttgctgtcacttcttaccaccctcttattggctatttttccatagtataacatctagcttgtacccccgcgccccaccaccccatgccacattgtcaacaaaaagcctgatgacctaatttcaatttaatgatttttactcatcttttatcttctttgaactggcttgacagttcctttttttctctaagtcctttgtatcctccgagatgctgtccagacttcagctaatattttttggatgtgcattatgaactagagttagactctgctaggtttgtgagcatgatctttcttctaaggactgtcatctgaccttgtgtgtttctcatcccttcatccattctcttccatgtcatctcttttactcctgtgttactctttaggtcttccctacagattgatctttaaatctttttctttgccctcaaccatttttatttttattttttttgagacagtctcactctgtcacccagcctgaagtgcagtggtgtaattttgactcactgcaacctgcacccccccggcttaagtgatcctcccacctcagccccccaagtagctgggactacaggtacatgccatcatgcccagctaatttttgtattttcagtagaaatgggatttcaccatgttgcccaggatggtcttaaactcctgagctcaagtaatccaccctctttggcctcccaaagtgctgggattataggtgtgagccaccacgcccggccagactaatatattaatcccacttctgtaacaaccacaactgcctccattaccttctacagaacaaaattgagagccattgacatgtgttttaggatattgaagaataggtatccattctatggtttccagtcttatttgccattgctctattacatgtgctttatgctctagtctagctggactactttaatgttgccagaacactcatcatgctttacccacttggagtgctttctcacattgttctatttctctattatgctttcctacttatcttcatctgtgaagctcctatacattttccaagtccaagctgccctaaatattgtaacagaatgtgaaccttcctgattctgaactcccattctcttttgtagcatttatgtattacttgccatgttctatctggaattctaattgtgattcatgttcaaaatacattcttgaacataacaggcttcctgataaatacttcttatatccaggtttaagttcactttcagtgctgccatactgttgcagttttttggtttgtttgttttatggaaaacaggtactttttattttattaaagctttaagttctgtaatcattcagttctgtttttgagattggttgtttgacccaattctaggtgctcagatttttgctgtgtgtattagatatctattctatgtaatgaattaacccaaaacttggtgttttagcatgataaacagttattatcttgcggttctgagggttagaaatttgtgagtggtttagttgggtggttctgtctcaggctccctcataatgttggagtccaagatgttgaccatggcagtagtcatctgaggcttgatggggactgtaagattcattttcaatatggctccctcacatggctcaggaggccttagttccttgtcatatgggcctctccatagggctcccttagtgtccttatggtatggcagttggctttcttcagagtgaatgatccatagataagcaaggtggaaataatttcttttatgaggtagcctcagaagtcatataccattatttctgcaatatgctagtcataagaagtgagttattaactctggacaccactgaaggggaatggaatttagctttaccctttgagggaggattgccaagtaatttgtgaatatattttaaaactccactccacataattatgtgttattaggagaccgatgacaggtaaattacactatgagttgttttaaattgttgctatattttttctatattaaagaaattctaagttctgaagtaacatagatactgttaatatggtttttatgttttgttaaagatttatgtgtccttaatttatctactaattgagattatttttaaggattattttttgaaaatcttaaaagttttgataattttgtttctcttttcagggcaccaacatatcattgaattattcccaactttgtcctattgtttttctttctgacttcctattttaagaaaatatattttgcatgccaattacagaaatgtgtttattgaaataaatggcttattttttcctctcagctgatttgaataggatgcacagacaaaatatagatgcctaccataacccagatgcaagaacatatgaagataaaagggctgttgtatctctagacccaaatttagccacttcaaatgctgagaacctagaagatgctgcaaataaaagctcaggtttttaatcacttttttttttttttttttttttttacatttctgaaattgttcagtaacatttctgttctgtgactaagttcttattgggatcttgagaatttggctatcctgatacaggaaacataacacactattcataaagtgccttttcttcatagttactttgaaaaaaggtgaatagggaaaggttacttcttcctactgtgtttcttctcagctttgtaacttgctgtgtatcctttagctgctgctaacatttttattttgctagtgggggacatttcttaatatcaaacactctttttacacacatacacaatttgcatcttatatccatagctgtttgaattagtgaaacagtatcattgtgatatgataaattgtacagggaaattcattttttacttgttttagtaatcatttaccctcccttgtaaaacaacagtgtacaaagaaatgaagcaatgttgtttttttttttgtgagatggagtctcactttgttatcccaggctggagtgcagtggcataatctcagctcactgcaacctccacctcctgggttcaagcagttctctacctcagcctcccaagtagctggaatcacaggtacccaccaccacacctggctaatttttgtatttttagtaggtatggggtttcaccatttagccaggctggtctcgaacttctgaccttgtgatccatccgcctccacctcccaaagtgccgggattacaggcgtgagccatcgcctggttacatgcctcttaactacttatctttgatttactattaatatcctttaatcaattctgaaagatgaaaattattcaattatctttttttgacataccaggaaaagttgtcaggtatgttaaattgtgttatatatttaaaaataaaatttaatacagcacctcacactatattttgatgcctataaaactggccatttattcattacaaaattctactttgtgctttcacagaagttttgattttagattagaaaagaacttttcattaggaagttctaaaatatttgtgactgatcatgtagtcttttttgtttttaacccttatttttggctaaacagataagtgaagtggggagctgtgattagagtcatagccctgcatctttcaaggctttgatggtagcacacttatctgtagcctttttgaacagtttaagagatggattatttaccgttttcatgggcagcttgtaccagtgttttctaattatgagaaaatgctttctttgttctacaatatattttatcggatccagttttgatttttagagcactaaaattggaacctttgattttgacaatattattgatttggctcttttaatttgtaatagtgtgtggtaagaacatcacaacaccttttcatattattgctgctaagagaattttgacttatttctgatatttttctcatttgctgctgcttctagtagtctgtattgagatctcattgccatacagagtctttctctacccttttcttccatacctggtattgtttgtagttctggctcagcctagaactttcgctatcttagtaataacactttttagccatctagctttgcacaccaagcaaaaacaccagaaaatcaacagttcccatgatcccttcccaaaagcataagcctgatgattaaacatgcacagcaaaatttgttgcctatagcctttctgtaccactgccaggtttttatgctgatattgttgccaagatgttctgttttaagaattgagtaaaaaaaaaaccataaaatgtttaaaacttccttttttttgtgaattgaaattcccaaattagacttttcttccctaagaatgaattaattggctgggtgcagtggctcacgcctgtaatcccagcactttgggaggctgaggcaggcggatcatgaggccaggagatcgagaccatcctggcctacatggtgaaaccccgtctctactaaaaatacaaaaattagctgggcgtggtggcatgtgcctgtagtcccagctacttgggaggctgaggcaggagaattgcttgaacccgggaataggaggttgcagtgagctgagatcacgccactgcactccagcctggtgacagagtgagactccatctcaaaaaaaaaaaaaaaaaaaagaattaattaatctaaaataaactttctcaatacaagaaatgattcaaagccacctaattttgtgctatgccatatatatgtgtatgagtgcatgtatgtgtatgtatgtacacacagacacacatatctttgcatatatgtagcatttgatattttaaaagcctgaaggaacttgaatatagctgaaaattgaatgttacaacatgtgtttaagtttccttatcctctaatattttatcttcattaggtttgtttctgatgccctttataatgttcattattttttcttttattttatggtttttagatgagctatggcttatgaagtctaatacgaatttggcttaaatttatttttttggcttattatcatgccaagatacatttctgctttctttgtatatagcaagtgtttccctatgattttccttttatagtttattcatttctaaaaggacttctcttgtctgtctctaataatatttcttctctaattgccccaaaggtttagaataggagtgagcatcacggtgaaacatgctactcaagtttgttttgctaatcagcttttccaccacagcataaaatttaaaagagccttcaaggtgtatatttagtttgttttcagtgggaaaattttctagagggaaaaagtattcataatgtttaagtattgatttggctttctgccagtctgttcaaataagcattaataaatttaaatacaaaagcaaaatagacctgagtggtagctgaactgcaaagcaatttgcctatacaaaactacatgcgagaaatacatgctttaggctgggcacgctggctcacgcctgtaatcccagcacttttggaggccgaggcgggcggatcatctgaggtcaggagttagagaccagcctggccaatgtgacgaaatcccgtctcaactaaaaatacaaaaaaaaattagccaggcatggtggcacacgcctgtagtcccagctacttgggaggctgaagcaggagaatagcttgaacctgggaggcagaggttgcagtgagccgagatcatgccactgcactccagcctgggtgacagagcaagactctgtctcaaaaaacaaaaaaagaaatacatgctttagtttaatggtataaagaatgagtcagaaactcaaaaataatataaaaagttatgtgaggcttaaatttaaatgtcattttttcccatctgcattcaaagagactctaagggtataattgtttttcgaattgcttttatgaaataattttttccattccaagaatatatgatactatttataggtaatatatactaaaaaatttttgttcatgtttatatctcattaagttgagagttttaaaaataaaaacgattacaataattaagatgcattctaatttgttaaatatgtttttcaaagctgactttctattctgtcatttaaactattgggaagcattttgaaattactgatttttaaaaacggttttagaaaattttaaatatatgttacataatacattttaatatgttattaagcaatattcttaagtaaaggatattcacatactgaagaatgtaaatatgtcctttttttctttataaattctattttaaagcctttgttgcaatgagggttgtttaagctgttagcttttatgtttcctttgtatctttcagatattatttgatttttttaactgttaattttattttagtattaccatttttctttctcttactactgttcatctgatcttcagattctaatctcaaccttccccttctgattttaatctttggactttttttttttttaaaaatgaatttattagcaaactgttcattctttaactgttaaattttctaagcattggctaatagtatgtttttgcaaaatatttctttcaaggtcatatgcaaacacagagctctccttttgctcggggaaatgtatttggtgagcctccaactgaacttcagattaaacagcaagaattatacaagaattttcttcgtttccaggtgaaatgctatttgatcagtttcaaagtttcatgagattttaataaacaaaacttgcaaagattttctccaggataaatactaaattctaaaatgccatactgttatctaaaatatctaatttatatcagatcagatatcagtagtacaaaagttatttcatttcaaggaaataaacagatgtattaagtatagtagttgacttaatcttttattttattaaataattaattttttttatttttttgagacggagtcttgctctgtctacccaggctagggtgtagtggtgagatcttcgctcactgcaacctccgcctcctggctttaagtgattctcctgcctcagcctcctgagtagctgggactacaggtgcctgccaccacgcccggctaattttttgtatttttagtggagacagggtttcaccgtattagccaggatggtcttgatctcctgacctcgtgatctgcctaccttggcctctcaaagtgctgggattacaggcgtgagccgccacacctgaccaatttttgtatttttaatagagacgggatgtcaccatcttggccaggctggtctcgaactactgacctcaagtgatctgcctgctttggtcccccgaagtgctgggattacaggtgtaagccaccacgcccagcctaagtcattaattttaaatcaaagaatgctgagattttaaaaactgatttactaatatattcatctattaggcagagaatgcatctttctagatatttgtaagttattagaaaatcaatagattttttccaaatgatttgatattattacagattgtaaataaataaaaattagatttaagataatcacagtttacaattatttgccccatttatgtacataagtaaatggcatttaacatagtagaactgcccagactattcgcaaaggaagacacttgaacatccagtgtttatgaagcaaacagacttactcccatactgggggtaccctgggctgagtcctagggatggagcctgagatgaatgtgagatacttgctcatgagggactcacagtttcttctttccctacctccctccccttcacactcacacttagataccagtgtcagattaatcttatggcctggttaatcctcctttgatatgacttttcacctgctattcttctttactcaaaatctggtggtagcttttctttgcctacagaaattatctcaactcttgaacctaacatttaaggttttataatctaattccaaactcttaaatagatgccctcaaacatatcttctttttaatcctaattattcttgactcttaaataaggcagtgacgtaatggatatagcctttaaggatgattgatattaggctgggtgtggtggctcacacctctaatgccagcactttgggaggccaaggtgggcagatctcttgagcacaggagtttgagactagcctgggcaacatgatgaaaccccatttctacaaaaaattagccaggcattgtagtgtgtgcctgtcaccccagctactcgggaggctgaggtgggaggattgcttgagcccaggaggcaaaggttgcagtgagccaagatatgccactttattcttgcctgggtgacagagtgaaaaaaggatgattgatgtgacatcactgtttaagatacaataatagaggattaaaaagagtggaagcagggatattttactagtgtgggtgacagtggaaatgggtggaaagtgctttttaaggttcagcagaaacaatatagatattaaatgtgagaaactggtatcagaggtcccaatattgtgcactcaagtcaggtagcagcaagttgagggttcagagtccctgttgaacgtaaaggaccgtgtggtatattgaccatgacagcaggtcataatttaagtacctcctctaatgcttagcagttcttatcatggtctaaggtagaattcagccaaaaaacaatcttacaattgtatagacttttattgtttttgagatacttttacatatagtgtctcatcaaacctcagatttctctgagagaggttttattatctctgtttaataacatacaactaatacacagactaacaggcttgcccagggtgtcacagctagcaaattgtgaggccattgcttgaacccaagtctccagacttcaagtgtaatatctatggatatcagacttctatttataggattcactaggaagtctttacctctagaaaaagtatggtaatgggggaagctttaactattttagtttcaaccttcagttcttccaccctgtcaaccctcaatttatctgtgaatggattgctttcagatgatgattttttaatttttctttcagcagcctcttcaaaatctcttctcccacctcaaacaaaacctaatatgtaattctaagaaaatgtaaaatagatcaatggtatttattattactgtcaacaatataatgtcagataaaaagtatccaaaacttttgttaaaaaaaatattatgaaatgttcaaatctgtgcacaaagatggtaagaaattagcctgaggtctgtacaagtaagttccacagttagctcaagttaatgcatcagaagtcttcatgctgttaaaatttggtgaatattaataacacttgtgaatgtttgacatttttaaccacagctttaaaaatagttaacaaataaaatatttttaagaactctgaagcatttttgtgttatgtaattggaaaaccatgacaggaagatagctttccctgctttccagaccagaaacctgttgaacaactgtctagcattcctgttggcactgagctttggatccattaggtgtatgatccattaatagcttaaaaattggtattctttgattttgatggaaaagtgacccctgtgaatgtgatttttttttccatggagtaggaagaagggggaattgagtattgaatatgaaattttgatgaattataaatgatgttttctttaggcatattggacttgaagaagtgattgcatgcaaattgctaactaaaagtactaaatattaggcttatgcatatttaataatgttgtgagaaagaagtgttggaaaaagccctagtatataaaatcataggatgtgttagaagattaaagttcttttttttttttaaagacagagtctcattctgtcgcccaggctggagtgcagtggtgcaatctcggctcactgcaacctctgcctcctgggttcaagtgattctcctgtctcagcctcctgagtagctgggattacaggcacacaccaccacgcctggctaatttttgtatttttagtagagacggggttacaccatgttggccaggctggtttcgaactcctgacctcaggtgagccaccgcgcctggccagattaaagttcttgtagctcaaaaattaatagcactagatagagcaaccttgaagctagaggaagtacagacaagaaaaacaaaaatatgctgagtagtatgatccatacctaaggataactaaaatctgttgataactttaaaccagagacatgaatacctggttcccatgctgctgttcttccctgcctcattcatcgggcgtgtggactatctatctcttagggccttctttccttcaaatcttaggctctagagtactcaacgctgcagactccaggtagcattcaagatgaaacttaattgtgagtccttgtgacctaaatcctcctccacctaatagttttagttctttctccattaacctctatagttaggaaataacaaagggcatttgggagaaatggctcttgcattaaaaaatgattgaatactaaaatactaatttcactgttattttagaataatcaattccaagaattttgacacataatagcagcaatcactatagaataatataatcatgaattagttgcttagaaccttctatataggaggacttttatgttccttacattgtttcactttaattctttaagcactcctttgagatgtaggcgttaataactgtgtttaccagaaaaaagagaaaactgaggacaagcaagtttcttaaggtcacacggtctgtttggtggaactggaatttaactcaaagcttttaacagtacagtaaatcatgtagcctccctgaaaatacaggagactgaaaaatttaggaacatgcaaaaagagggtacaagtgttgagtttatatactatcaggaaaaaaataagtgatattctaacttttcaatagttttacaagataaataactaagtttaattctttagattgaggaaaagaaacaaagagaggaagcagagcgagagagactgagaattgcagaagaaaaagaagaaagacggcttgcagaacagagggcacgaattcagcaggagtatgaagaggaacaggaaaagaaaagagagaaagaggaggaggtacatcttttttccctattgtattttactacttagtctgaaggtgaaatctttgacttgaaaaggtatttcttacttataaaggagaacagtgttggagtacatttagaaaatatcagatcaatatacattctttggatattattttattaaggtgaaagggtaatttaagaaaggagataagtgatgactttaaaaatatagatgtaggctgactgaagactttataaaagatgcctaatattttatttttaagcagacaacttatgttaaagaacaccatatcatgtcatctatatctttatctcattttatcagataaataaggcagcacatttttgaatgtactatagaaggaatatatggaatgcatatttctctttttattttaaagcaaaggctaaaaaatgaagagcatattcggttagctgaagaaagac

SEQ ID NO: 15526 - DNA, 111764 bp, Homo sapiens
cagtcagaccgctaacaggagaaatggaatattaagtatagtatattgttccccctcaccttttctcatttcttcctctgtctcaggcactcattcatatattcatttgcagatttattcaatgaacattttcttgggttaaagttatgtgccagcattataaaattgaatagcgcatgggccttgccttcatagattttatagtttagttttatatatgatgttccattctgaacatgagaatcaaaactttctctccttaggcttaaattctgtatctttaaaaaaaggtttagattccttcaaaaggaaacagttcctttctaggatgatttaaaattccaagcatatggaatgctttagtttcttttggaagagagttagaagcatgtgtaagaggtgtccctaaggaatcctctgttataccctctatcatcaaggagttaaataggccagaaatgtttatcaagagaattccagtgttgatagcggtaagtggattttagtattctgtaagaatccataaacatccacttatgtttatattacactggccttttccctgcctgaaatgtttcagtgatgtagtaagcagtgatatgacacattcttgaaaagttcccatcattcagctacattgtgagaaataaggcacaaaatggtgatttttatatcagtttataaactacagtcaaattttatttcatctatagtgctcatagctgaatctttaaggaaagttttggccaggcgtggtggtgcatgcctgtagtcctagctactcgggaggctgagatgggaggattgcttgaggccaggaggttgaggctgcaatgtgccatgatcacgccactgcactcaagcctaggtaacagagcgagaccctgtctaaagagagagaaaaaaaaaaaagccaagttttattttgtttagaaatgataattttttaatactatagtattatgtgtatagtaggactaaaaaagggatgaagcttcagatctgaatactcatctaatgtctatgcttcttgacatagtattttattattgaaggtttgaaaagtatataatttgatttttgatagctttgttgagatataatttacacaccataacatttacctatttaaagtgtacaattcaatggtttttagtatatttacaagttgtacagtcatcattgtcatcatccctaaatgtaatttgatttttaaattttgtgtaaggaaatactactcaaattcgaagtttttcttcaaaaattaacatccatttacagagtttctgtttgggatgatgaaaaaattctggaaatggatagtgatgatggttgtacaacattgtaaatgtacttaatgccactgaattgaatgcttaaaatgattaaaatggtaggttttatattatatacattttaccacaataaaaattaatatccatttttatgaaatcagaagtggtttaactttagaagtttttaggaatttcatcctatctgaatgctctttgatacaaaaagaaaattaaaaaaaaaaaaagaaatgtgattctaagcaacacatggccctaataattttttctcagaaacatgttatattaaagatattcttgtatgctaaaaaaaatcatgttattagttttcctagactgaaaatgatgcattaaaattgttgttggtatttatttttatagaaattagtgtataattaagtgaagatgtaaagataattagtttttctttaattttgctgttcttgagaaagcaagatgccaaacaatgctggactacttgtcttaactggaggaaaaagtgaatataatgcacacatgcatataaatatgtatatgataatataaaagtatctgtttataggtgcattaaaaaattatctgcatggagacaagaaataacaatgtttgttgttctggacaggagaacagggtggctagggctcatggatgagaatgatatttttgataatatttttgattatctgaatgtattatctattgagacattttaagtaaaaaacttaccctaatcctactcttggaataagcataattctgttccttcttactgtgctttgttacaggaagtagaactttgagattggtttgaaaatgaattatactaagaagttgttttttttctaggaattgattatggattaagtttaccacttggagaagactatgaacggaagaaacataaattaaaagaagaattgcggcaagattacagacgttatcttactcaggtaatgagttctattaatgagttgggtttaatgtttcagaattcagctcctaaatttgttttcataaggtattagtcatatgtgttaatttttaggttttcagtggtactagcaaagtagtagtatagtcaaagttaagtggcatatatgacattggtagagaaaaaaatattgctgagaaccggtgccatagaatgatacagacttttgaccttttgactaaggcagtggattctaattttaagtgagatcgttaattatggtttttcatgttttctgtaaagttgtcatggtttgaagtagtccaatcatggtttcccactcttctacaccccccaactatgtattaaaatgacatatggagttctagttgctaattattttcctatgagccaagcttataaaattacatttaattatttagccactaaagcttttgttttatgatctcatgttttacttagcagaactcttgagtatttttgttaaattatataatggccaaagtaaggtttattgtaagttttaaatttaggttataaaattattttaaacaattatgatatttgttgtcatctcaaaatattctttagttttttactgctttatgtttgttccaagtgtacaaatgtctcttattctgatttacacatggagagaatgaactttgacttaatacactttgtcaatggtttgtttcccttgactttagggcattacacaagggaaaagaaaggtagggttgtctgcaatacgtcctccttcagttttttctttctttttttttttttttacgatctagaaggttgcaatcatttgcatttatgagattcaaaccaattaggaaaacgggttcatttgtgattttgagatgtttgaatggcaccattttgtattcttgcttttagcagatgacagcatacacattataattttccgttaatatagtcattacttttgattcctgctttgcatttgtgtttattgctttcttatgcattctttttgaatattctgcagttaagtctgttttcagcatgcaattttttatttctcaaattacactaatcacagtaagattaatagagtagtagaatatccaagatatttgaactacatgttgtgagaatttggattactctgtttttccaccaaaatctatagattgcattgtccatttatattggaaaacaaagagaaacagtttatggttttacaaaactggttttaaaaggaatctcacagattcaccattcaactaacatattttaaacacttattatgaagatatatcaggtatgcatcctgtcttcaagaggcttagaatttagttgtagagatagcattcatacgattcagaaagtggtaactacaagaaggatataatgatcaagatagtcctcatagtgggaatttctattttgtgaggcaatctagatttgggtgatctggagagagaatcgaagcgagaaagcttttcagatggaaagcatagagtaaaggaggacctagagggtagactttagctttgtatgaatgaggcatattaggtttaccagcctgactgggtcagagtatcattctttttgagagtagtaagaaataatgatgtatataggataggatcaaattagaaggcagtggatttttaacttgttatatgtaatagtcagtgatgagcatcatactttcttaaatagcttgtgaagagcatggtaactgtgttttaggacagttagttctgcatgtagagactctcattgtgttaaattgctgcccaacttcttaactgatttcctcgcgctaattttcacttcaccctccaagctattttccagaatgattcagtccctaacttatttaaatatgtcagtatcctctaactgcctccaggataaaaattcaaattccttagcatggcacatgtctttcgtgttccagcctgactccctgggcttatacctcattatcttccccttccctactttttcttattgggtggagttttcctctggtatcagatatctaccattttctcttgtaggttttgcattactccctaggtaagatttttaaaaaggatagtggtgggggacatgagaagaaattgccgtcatgaaagtacaaatctttaaattcaaagggatgtgaaggagttttttaagatttttttgtttgttttttggtttttttttgagacagagtcttgctctgtcgcccaggctggagtgcagtggtacgatcttggctgactgtaatctcagcctcctgggttcaagcgattcttttgcctcagctcccggagtagctggaactacaggcgtccaccaccatgcctggctaatttttttgtacttttagtagagacggggtttcaccatattggccaggctggtctcaaactcctgaccttgtgatctgcccacttcggcctcctaaagtgctgggattacaggcatgagccaccgcacccggccagtttttgagattattaagaatatagtcggccgggggcacggctgacgcctgtaatcccagtactttgggaggcagaggcgggcagatcacaaggtcaggaaatcgagaccatcctggctaacacgttgaaaccccgtctctactaaaaatacaaaaaaattagcctggcgtggtggcaggcgcctgtagtcccagctactcgggaggctgaggcaggagaatggcgtgaaccctggaggcggagcttgcagtgagccgagatcgcgccactgcactccagcctgggcgacagagtgagaatccgtctcaaaaaaaaaaaaaaagaatatagtcttgtagaggagcactatttccttaaaattagagagacagtcttttgttcacatttgagaaggtgggactggaagggaaagcaagagaaaaagaaaactacacagactatagggagctggctgcagcttcctggaccccctgaaatatgtatggtttccaagtcccactcatatctcttgtggcttccagacttggattgcatggatatttgagtttttaaaaaaaatcaaatcttttaattttgtcaagaagagttattaaaacaaacaactaccatcttttttcgtgttttaattaatttttttttcctgtgcccttcctgcccagagatggtttcctgtttttagaataaaagatgcttgaccatctaaacacagaaaagacatgttctcaggggaacagtttttaaattgagtcagttaattaatatccccagcccagacctccatcctgaacttcagagttttctagctggctgcataattcacattttcactttgaaatctacctgatatcttatgtagaccatgtccaaaagagaattcttgatttctgttcttcccaccctcatggctgataaacctgcactatccgtagcctgtccttttaatttcctttttgtcacagtaattattaccttctagcatgctgtataattactcctcattatgtttattatttctttttcattttccccagcttgaatgtatgcttttggaggacaggaatctttatctgtttttttcagtcccaaatgtatcagaaagtttgggcacatggtaggcactcagtatttattgaatgaatgaatgaatgaatgattaaaatttagctttttgaaaaaactcactatgttgttctttttttaagaattaaagtttttttggtagagacagggtaataaaaaaaagttttttttttgtttttttttttaaatactcaagctggtcttgaactcttgggctcaagtgtccctcctgccttggcctcccaaagtgctgggattacagacatgagccaccactccctgcctatgttgttgttattgtttattcttttcattttattgaaaatttcaaacatcattcttgacccatgtttggaatgggaaattgcccagtgaaggagtgaggatgttaaatctatcttcctggttggaactatgaatgggtttttcatgcatttataactctacaaaataattaggtttatagtgtacttcagtatataggaggtaaaatcactcagggatctggtcatgtgtcttattttttccttgtcaggtaagtttagagttccatacagccaactttcaaattagcttttgtagcacaactcatttgtaaattcagatttaatgacactttatttatttatttttgagacagattctcactctgtcacccaggctagagtgcggtggtgctgatcttggcttgctgcaacctccgctttttgggttcaggtgattctcctgcctcagcctcccaagtagctgggactacaggtgcgcggccccaagcccggctaattttttgtgtttttagtagagggggtttcgccttgttgcccaggctggtccgaactcctgagctcaagtgatctgcctgcctcaacctcccaacctgctaggattacaggtatgagccaccctgcctggccagatttaatgaaactttattaatcacttagttttgctaattactatctttccataatgttttgaatacaacgctattgtagttaatacgttgttttgcggttatttgcttacatgtctgtttctgctactgaattgtaaatcccttgaatatagggaaaatatatttgtatccctaccatctgaaaatagtacctgcatagtattagatggttgctaattgcttgtttaatgaataaataaaaggcatggaattaggcaggttgacaattattgattgattttatccttataacctagtgatgtgtagatggcattatttctgttttatagacaaggaaactgaaatgaagtgaagtaaattattccaaagtatttgactgctaagtaacagtaccagaaagttggagatcatatgtatttttttaccaattggggatcatgtgtattttttttttccagttctttgtatttgctttacagctttcaaagcgattttatattttttgtcctccttcatccttataccagctttggtaggtaggcagagcaggtactattctcattttgcagaagaagaaagtgtctgtcagaaaagttaagtgacttccccattgttacacaactgataagtgcttgggctagttgtagatcctaggtcttttgactgctagtctaatgctgcctctactacactgcattacttaaatgcttaatgaacaagattggaggaacacataaacaacattcatagtttatatctattggcatttcagtagatattcactcacataattataggaaaaatagaaaaaaaacttgtggcatgcattaagatatttgtgaggaagtttaaatttgccttgagaacaaaaagacagtagagcactgataatgaagagtacatgcttagaagacgaaattgggaaattttttttcatgcttctaatcatcttgaatcaatagacgtatatattgcacatgaaaattaaggcctgattttccctttcagggagttgttgattggaagaaaattctcttttttccaaatgcttttggtatggtctatatagatttgtagtttctgtcttcattccatttcattcatttgctctgcataatataatactagtttagaatatagaatgcaaagacacatttatgcaacatattttataaaggcaattaggtaatatatttttttaatgtgtatatatacagaaaaattttctatctacgagtgaaacagatccatctactttgggagtttctcttcctattggtgagaggttatctgctaaggtaggtggataggagtagttattgtgggtaccagttttccgaggcatcaaaatcattaaagaacatactgctgatttaaatgcaaatggaagatcacatcatttccccacacttgaatatatttctatttcaaaaatccgtggagtcatatttatgctgtttaaaaaaattttcttgaacacaacatttgtaaccatataattttatatttctttaatatgttgattcttttgctgtattcagttatacttaactgaatattcagaattcatttttttcagcattgatttctgactataaagtttatgctatgtaacacagttattggaataagtggatgtgaaattatagtgagcttttatatagggtgagggtaagggttctttgaatgtgtgattctgacactccattaatacacgtccatattccttagagatgaaagtaataaagcactgtacacctcttgtagtgactcaggtctcaccagagtatatcagagatcatgaaatagtatataagacaaaatggacagttaataaatttcaaaagacagacctagtttctttttttttgagacgaagtatcaccccgttgcccaggctggagggcagtggcggggtcttggctcactgcaacctccacctccccagttcaagcgattctcctgcatcagcctcctgagtagctggaggcaggattacaggcccctgccaccaagccccgctaattttttgtgtttttagtagagatggtgtttcacaatgtaggccaggctggtctcgagctcctgacctcgtgatccacccgcctcagcctcccaaagtactggcattacaggcgtgagccaccgctcccagctgacctagtttctttagtacttttttagattgtgttgttttagcgacacgggagtattaaaatttaagaacattttttaatcatatatttatgttttaacagaacatttcattataatattttataatctgtgataatttttctttttaagtttaaaatataaaggatcattttttaaccttggaaagcaaatggttagcagcaggtgcttcaggggagtgggttgggcattaggagagggaggtgtccctgagaaggaaagaaggaaggtaaccccatcatatctctttggaaacatgctaatgacagatctcctggcaaacacaatcatcatatttactagtgggagagatttatctctgaatgcttttggcagaatacacctggtttgtctaggattgctgttgggaatcaaacctggaatctatggatttatgtggcatggctctttggaaaatgtcatctaagctctgttaactattggagtgtaaaatggagatgtttcatgaacgaagcaactcccttctgttagagacctcatgtattaatggaccaaagcatgtagtcatgcatattctcatgtgacaagaaagacctggggagctgtatgtgtgtcctcaaacctcttccgacttctcccatgcctttcagtgacatctgtccttgaaattattagtaaagcttgattctgggtaagagttctgatatgtatgattcagatttgacattctgataggacattgagggatttttttttcctgaagttgaattttaacattgccttttgatttttattttaaggaaaggttgaaacttgaacgtaacaaagaatacaatcagtttctcaggggtaaggaagaatccagtgaaaagttcaggcaggtggaaaagagtactgaggtaggttttgcttttgaattaaatctgtactactactaccacaggttgaatattttgtacttgaaaagctttttctattttagacattttacttttttttgtaaatacttgcaaaattaagccaaattaaaccaaacacaggacatttaaatatttagttttggaagttattttatctcatattgaagaacttttaacatttaattggggagatttaattttagagatcagttttgttaagtgattttcatttatttttaaaaatttaaatgagtttttatgatgacaattcctagctatgtttgtttttttcaaaatttaaggatcaattagccggacatggtggcaggtgcctgtaatcccaactacttgggaggctgaggcaggagaatcgcttgaacctgggaggcagaggttgcagtgagccaagattgcctcactgcactccagcctgggtgacagagcgagacctggtctgaaaaaaaaaaaaaaaaaaaaaaaaaaggatgattgatgtatctggggccaaaacatttaccactttctatatcctttgtgttgagaatttaatttgaaatattttgaagtaatatctcctgggataggaatttgcatttagtttatcctctcttttttttttttttttttttgagacggagtcttgctctgtcacccaggctggaatgcagtggcacaatgtcagctcactgcaacctccacttcctggcttcaggcgattctcctgcctcagcctctggagtagctgggattacaggtgcctgccaccacgcctggctaatttttgtatttttagtagagttggggtttcagcatgttggtcaggctggtcttgaactcctgaccttgtgatccgcctgcctcggcctcccaaagtgctgggattacaggcgtgagccaccaggccctgccacagaaaggtaaaattttcttgaaatttttttttctaaaaaaatatatgggtgattaatgttgcctaggctggtcttgaactcccaggctcaagcaatccactggcctccacctagaatttttatgtaataagcttttcataaactgcacaatttgatgggttttagaatatgtaaaccacaatcaagataacgagcgtatcctgtatcccccaaagtggttctgggaccctttggaatctgtgtgtcctcactgtcctccactcattcccatactgtctccagatcttcctgacctgacttctatcaccctagactagtttacatttgatcatttactataaatggatcatacaggatatactagttttggagatatggcttctttcactcggtatgattattttgaggttcatttgtgttgttgaatgtatggatgattcattccgttttgttgcatagtaatgttccattgcatggctgtatcagcttgtttatccattcccctgttgatggacatttgagttatttctggtttttgctattacaagtaaagctcatgtgaacattaatgtaaaaacgtatatatatataaatatatgggtgattaaataaacatcagagttgaaatgatagactaagtataaattgagggtttaattaccttataagagatagtttcttgtcaagttttgtttcttttttcttttttaattgaacagcccaagagtcagagaaataaaaaacctattggtcaagttaagcctgatctaacttcacaaatacagacatcttgtgaaaattcagagggtcctagaaaagatgtcttaactccttcagaggcatatgaagaacttctgaaccaaagacgactagaggaggacagataccgacaactagatgatgaaatcgaattaaggaatagaagaattattaaaaaagcaaatgaagaagtgggcatttccaacctaaaacatcaaaggtttgcaagcaaggctggcattccagatagaagatttcacagatttaatgaggatcgtgtttttgatagacggtatcatagaccagaccaagatcctgaagtaagtgaagaaatggatgagaggtttagatatgaaagtgattttgatagaagactttcgagagtgtatacaaatgacaggtatttacaacttcatttttattttatttgcttaatatagcaaattaattgttaatatttgctgttgttactttttatcattatactagggagaagcagttttgatttatcataattaattctaagatgctgtcagttttaagatgcatcattattttatgtcccactgaggggaaaaagaaaacactcaaggtgggggccctgttgtaaagttggaaaactgaaaggctacaccctttatgtaaaagtatgtgaattggaagtagtcattcccacagaaagggacagagaggaaatgtccacatcccaaccttggcagtgagtagagagtaaagatacaaacaaccttccttgagaatttgaagtgtaaattagtaatgattcaagttcacagtccgaattcatactgccagtagcgtccaaagaaaccttgaggcaagaattcagagttttctcaattcatagtgctcttggatgaggggaaaaataactctgcaataacttgacataaaaccaggtcattggctgttctgacttccaatattaaaatgtggccaggcatggtggctcatgcctgtaatcccagcactttgggaggccgaggcgggcggatcgcgaggtaaggaggttgagaccagcctgaccaacagggtgaaaccctgtctctactaaaaatacaaaaattagccaggcatggaggtgcgcatctgtaatcccagctactcagaaggctggggcaggagaatcacttgaacccgggaggcagaggttgcagtgagcagagatcacgccactgcgctccagcctgggcggtaaggtgagactctgtctccaaaaaaaaaaaaagtgtggctgggggttgtgcctcacgcttgtaatccctgcagtttgggaggccaaggcaggcagatcacttgaggtcaggagtttgagaccaaactgaccaacatggtgaaaccccatctctactaaaaatacaaaaattagccaggcgtggtgggacgtgcctgtaatcccagctactcgggaggctgaggcaggagaatcgcttgaacctgggaggcagaggttgcagtgagccgagattgtgccactgaactccagcctgggcgacagagcgagactctgtctcaacaacaacaataaaaataaatgaataaaataaaacgtgtgaaaaaaggataccttaaaatagatgaaatacaatttattcctgtagtcataagttttttcagtcagattttcagatggttttcagttcctttgaatgtttttgtgacactatttataatttcttaactgctacaatgaggttttattgttgtatttatcatacattgatacttgccatagtttaacctaacttgttttggagataggaatacctcagggtctcatatttgtcattgacttgtttacttgacaagtgttaatacattttgagtagcttttgggacctgctttatttgctagtccaaatagattagtttttaagtattttagaaaatgttttcggggtagtgctgtacattcaatattctaactattaattacaatacaaagcttttacagttctttgtcttctacattctgtagctgttatgtcctcacacaatatttttaatatttaccttgatttaggtaatttgaatgaaggattagaatttggaaatggcaattatagtttctctgatctgaatctaattgtttatacttcagaaaattctccaaatcctataatgttatatttgaaaatgcttatatgtaaggtaattaaaggctgactaaactaaaataattcagttggggaactgcaagtaatctttgactcttggtgataatgtctcctttgtacatgagaacttcttttccctttatggtgtttgtttacgtttagggtgaatgtaatgcatacccttttaagtttggaattttaagaaacataatggttgcttctttgtttttttttaatctattacttttataattatatcctgtgataattttatacatgaactaacaaatgaatatcattctatttgagaactctcatatcttcttatgtatcccaaaataaaatgaactccttcaatataaacttttccaaatactatttaagaatagattaaacatgaggttgagtgagaataattcttgttaaatactttaaagtgtttcttcaatatataaatcatatttttatttcgtttttatataaactctgacatctccaagtgttttttcttatgtgtctctttaacaatttaatttaaaatgggatttctttatttcagatttatagattccttatttccagcaaaaaaaaaaaaaagaccagtcattcagtagtttataaatagactggtttaggagaaatgactgtatttgtgaaaattttgagactaaagaaatgtggaactgagtttcatctcttgctccaagcatttattcttaacatactatgcaatcttgatcagaagttcttgacaaaaaataattataatgtattatgagaagtgcacagttaattttccttcattcttctaagttttctttggtcttttttttttttttcctttcctaaaagtcagcatctggtaaattctagttttggtttataataattttttatttttggtttcaatttttctctaccctataaacgtttacttttttttcatataccataattattaatgaaatatttccccatacttaaatatgggaaagctaaaacttttctcagaaaatgatgttgccttcctaaactcatatcatgaaatcactgacagcattcttaattaacaaggtggttaacactgtaattgatagttgcattctgtgtgtgtatgtgtgttgtttatttatgcatatttaccaattcaagtaaaatttatcatgttttaggagctttctaaagtagaatgtaatagcatgtcttaagatactttgaaatttataagctctatttaaatatagtaatcctagtcttatttattaacttgaactgtagaagttaatattttactttattatcttttactttaaccaatgttaatgaataaaagaagttttacttcttaatacccaaagaaaccaggtacagagtagatggggttgataatagaaaacactgctaccaaagtaaatataaaaattgggaaagaatggaaaacaaagagaaaaatgattgtccacagttaacatctcagagtgtttcattagcttctttttttttttttaaagattaacatgtgttcatttttaggataaacttggcctgtaccctatacctggtttctttgggtattacgatttttacctgatcaactagagttgttgactcttgtcttcaaggaaatagggagaaaaatatttttttcatttaaaataccttttttttttagttagtaggatggtgaaaccattttgcagttattttattccctcaatcatatctgatttgcatttcaaagttatgagttctgtccctttgtgacaaaacccaacatgttaaggtgtggtaagtgaacttatatattaaaagccatagaatatttagatagattttctatggctataccaccctggaatgtgcctgatcttgtttgatgttggaaactaagtaggcttggacctggttagtaatttggtgggagagtatttagatagattacttttgggtcacaaggatagtcttaatctggtactctcacagtgaaacataaaggggttccagggacaaactgaacctaaacagaactcctgaactttgattagaatcaaatggttcttagacatttagtgagtgcattacttttggatattatcatctgtctgttttcctttaatgttgagatgattgaatagagatgtagccgtggtaaaaccactgctgattcttactagttgctttcttcagagaggactttttttgttcagaaaaggttacaacaataaattgtaagaccataaaagctgttttaagtgaactaacagagctagttctgggtgattaaatgctaaatttattagaaatataaaggccaatttagtaaatgaaggaaatgccataaaaattgtagggatattttaatagagaataaggtggctaacttaccaaactatagtttgtcttttcagcttaatttcccttcaaggtttcttttttttaggtcttacattggtaatttaaaaaaaattataaaatctgtatttgtaaacagtaattcttccttgacttaaaaaagataaacaaatcatatgtcatttcataaaattgaatagtatccctaagattttattatctttttagtgaaatgcttatttctgctcttttttagcctcttaaacatttttcggtcttgatcttataattattggtgacagagtggacttttataatcttgttaatgatttttttcttcaatgaaaggtataccttagaacatctttcatatgtgctgctcactaggaaatcttttgattttgctgtagattttagcaaagagaccttaaccttatacataaataaaatcatttcttaaattaatttaggatgaactttgaaaatgacctcttgtgtttatggtgtttgctttactatctatatacactgaagagactgtaaaagattttttagtgtggataccttgggtgcagtggtggtataaagataagctagaattattaatctaaatattatcttcagaaaacttaactaataattaaggaagccacaagccctatgttaattttagaaaaagcttttgtatatttaactggcctttaattctgggaccccaagttatgcttttaagaatttgtaactttaaatttctatttaatttttttcttttttttttgagacagggtcttactctgttgctcaggctggagtgcagtggtacagtcttggctcactgcaacctctgccttccaggctcaaacagtcctcccactttagcctcccaagtagctgggactataggcatgagccgccgtgcccggcctctgttaaaaaaatttgtaataaagatttctttattattaaagaatatatatatatatataaataaagattatttttatatgtaatttttttttggcctagatacctctttactacaccagtgaatttactttttgtgttgtgtcatgggttctcaagaaaacctctaggttgggtgatttgctaggaggatccataaggactttgggtatagttgtagtcacagttataatttattacagcaaaatgatacaatgcaaaatcagcaaaggtaaaaggcacatggaacaaagtttgaaggaaaccaggcacaagcttccaaggggtctctcccagtggtgtcacacaggagatgcttaattcctccagcattgaattgtaacaatataaggaaatgtctgccaggaaagcgattagacacttggtgcccaaggtttttattgtgggatggttacgtaggcaccctgtacctggcatgtaccaaaattccagacttcctgaagaaaagcaaatgtttagcataaactatagtttgtgtaaacagtttaagcacagtgagctgctcttatcagttctgccagtggttgtaactctcccaaaatctatattcccaggtgccagccaagggtcaactgtacagtcaggattttctgaggataggcagtctcaggcctgctctgttaacgcttttctgcattatatataaatatccagtataattaaatctggttgcctggcagtgttaattacaaatttgaatttgagtttgtatttacctgtttgttaagtggtagaagtagggaatgacactaaactgatgtgtcattcacacatcagaatgtgtgtatgtgatctgtgatcgattaaaaaatggaagccattcatgcgttatgccatgtcatagttactaagattaaaattccaaatagtgttttctccacagatgatattgacagtggcttgtatgatggaaacaagggaagaaagaattttatatgctggttctgtggagagtgagaagtttctttttttttccggaaaattgccatttttcttaatccaataatgaaattcacctaaaatactgaatactgctttaacaaccatatttctttgtaatagtcctcttgagaaagacaatatagttgggtaactcaacagccatgtaaagaaactttgaaatgcttatgaaatgctgattttcacggatgccaataagtgttggtgtaaaaagtcatgttggttttatggtatgagaaattaagctaaaaataaaatcagtgtttgccaaatggaaaaaagattgattgaaaaacattttttcattattattttccaaaaaggtttttaaagaagaaaacagaaaacatgctaatctttctttttgttgtttatgacctcgtaagtaaagttagctaatcattttctctgtttatattttccattcacctatcagtaacatttattctttcctgtgatttacagtgttagcaaatgtcatggtttgttatattttatttaatttattgataagactgctgctgtatttttaagttaaaaaggttatgacaggtcgcggtggctcatgcttgtaatcccagcactttgggaggccaaggcgggagatcacaaggttaggagatcgagactatcctggccaacatggtgaaaccctgtctctactaaaatacaaaaaattagccaggtatggtggtgcgcgcctatagtcccagctacttgggaggctgaggcaggggaatcacttgaacccaggaggtggaggttgcagtgagccgagattgtgccactgcactccagcctggcgacacagcaagactccgtctcaaaaaaaaagaaggttatacgtacaatgaaataattcacagactctatgaattttgatttaaaaaatgttctcattttgaattttgactataatctttgtgagtgcagggactgtgtccgaatacccagtaggtgttcagttattcacttttaaattgaatgataaaaaagtgttagtatatttgtagttttaaaaataaaaatttatagcaagtacattaaaataacataatctttttagaaaagattattacgtttaaactcttagtgtctcattaaccagcagatcatacaaattctatttaattttataatgcatttatagtaaaacttcattataacactttgttccttttaatgttgccaacatcaaatgtaaaaacaccaaactgttataagaaggtccactgtatgtggcacatgctttataagctaatgtgtttttaaggatgcacaggaacaaacgagggaatatgcctcctatggaacatgatggggatgttatagaacagtcaaacataagaatttcatctgctgaaaataaaaggtacagtatgtaatataaattctctgctttagtcattacattgtgaaacagaatgtgcctaaaactggctaactgaaaaagtagaaagatacagtaaattaacagccttccttcttagtgagaagtgaattaaaggaaaagaaaggtggggaggtagtactaaatgaaaatcgatagtactttacagcattcttttaaagaacaagttttggttataaagtgtgccaaggtgttctgaagaagtccctatcattacaaagtatgtaaatttgtttgaaataataaaagaaataagtataatttaatggactaaaaatcaacttaaaatatcttagagtcatggtgatgcaacttgactggaaataaattgaaaatgtggccgggcctggtggctcatgcctgtaatcccagcattttgggaagccgatgcaggcggatcacttgaggtcaggagttcaagaccagcctggtctggccaacatggtgaaacccagtctctactgaaaatacaaaaaaaaaaaagaaaaagaaaagaaaaaattagccaggcgtggcaatccctgtaatccctggtaatccctgtaatcccagctactcgggaggctgaggcaggagaatggcgtgaacccaggaggcggagcttgcagtgagccgagatcgcaccactgcactccagtctgggcaacagagcaagactccctctcaaaaaaaaaaaaaaaaaaaaaaaattggaaatgttcctgtggtgtgaatttttctttcaaaagtttatttttgattttcagtttatcaagtagatagcttttatgcctactttgtaaaattagtgctcatatatttctgtcatgttgaaaggaaattgtatgtattttatatttatgttctctttctacttacagttttttatcattttggtggcattcctgtgtcgtacataaggataaatgattttgaatctatagtatacagtgaagataatgtcatatgtcaagaaagatgtctatttttttctaagaaaagtaatatataaacactgcttgcaataagataatttgctgttttgttctaattgattaagtttcctttgaggatttttttccccttgtttctgtcttccaagaaaggtttttttttttttttcttttttgagacagagtctcgctttgttgtccatgctggagtgcagtgacatattatagctcactgaaaccttgactttacaggctcaagtgaccctcccaccacagcctctggagtagttgggactacaggcatgtgccactatgcctggctagttttttaaaaaatttttttgtagagtcaggatctctgttgtccaggctggtcttgaactcccaaactcatggtgggattacaggcatgagccattgcgcatggccaggaaggagtgtttttagggatgatcttttctaagtatgtgcatagatcactctttcttttcctttttttttattttttatttacgtgcactttttttctttttctttttcttcttttttgagacagagtctcactctgtcacccagactggagtgcagcggcacgatctcagctcactgcaatctctgcctcctgggttcaagtgattctcctgcctcggcctcccgagtagctgggattagaggcgtgtgtcaccacgcctggctaatttttttgtatttttagtagtgatgggatttcaccatgttagccaggctggtctcgaactcctgacctcaggtaattcgcccgccttggcctcccaaaatgctgggattacaggcatgagccactgctcccggtcttacatgcacatatatatatatatatattttttttttttttttttttttttttactggggtagctgtttttttatgaaaaaggatttttttttttttttttttcgagacagagtcttgttctgtcacccgggctggagtacagtggcaggatcttggctcactgtaccctctgccttccaggttcaagtgattctcctacctctgcctcccaagtagctgggattataggcgtgtgccaccatgtccagctaatttctgtatttttagtagagatgaggttttactgtgatagccaggctggtctcaagctccagacctcaagcgatctgcctgccttggcctcccagggtgctgtaatacaggtgttagccaccacgcccagcctgaaaaagattttatttgagaacctatacagccagtgaagcaagctgaatgtttttgtttttgtttttgtttttgatatgtgtctcactcttgttgcccaggctggagcacaatgatgctatcttggctcattgcaacctctgcttcctggtttcaagtgattctcctgtgtcagcctcctgagtagctgggattacaggcctccaccactgcactcagctaatttttttgtattttttattagagacggggtttcaccatattggccaggctggtttccaactcctgacctcaggcaatccacccacgtaggcctcccaaagtgctggaattacaggtgtgagccaccatgcctggccaaattattattaattttttaagcctgaatacattggagttgcactgtataaagagatagaatgccatgattttaccttaaccttaaaaatttgtaaatattttaatgtccatagtactttgaaaggctaataattcatagctacattttactctgaaattttgcttcctgaaaattatctggattttaatttactctttttctctgtctttttttctttagtgctccagacaatgaaacatccaaatctgctaatcaagatacctgtagtccttttgcagggatgctctttggtaggcacaaaacttccaactagttgcgcttgtatagagtgtcttataatccttttttaagtgagaactcagtgttgtaattaatactatttttactaatagtagaaaatatttgtaagtgcttactttacactaggtactattctaatcatttaacatatatagctctgtataattttattttgtatttttaaaattttatgtatcttcttatttttactcatgatgttcatgaacacatctatgtataattttaaagctaaattatttagtgatgtgctttccgtaggtgataatgaaattattagtttcagtaatcttttttttttgcaaaatggattgatcattaccaatcagtaatgagcttttaattccatattttattagcactctgttgcagtgtggctgtttcttttctgcttttaaaaagtattttgttttatttatgatagttttttccttaattcttctttctagtttctttagctagtacaaaactgctgtgtattttagtttcttttctccaaattaaacctttctttcctttgttcttttcatgtagtttctgagaaggtgttttgttcaaatcgtgatgatggtctaaattttctatttattggaagtcaaggtcattgctgaatataagcttgttttgctatattacacttggcaaaatttaataccagaaactgtgaggagagacttgtttctggtttatacctttaaatatgtaatagaaaagaggtctttttgtgaaaactgttagaaaaaaatgaactgaaatttggttttagtaaagtatatgaagaaattaacactctagattcattcaacgtaaaaacagtcagtaaattaaatactggtttagagacatattattgcattatattgtcaggtttttgttcccttgtgaatggctattgtgagaaaaatggcatgccacctagaattctagtgtaatatctgtaggtgaaaattgaccagtttaatcagtaccatgtaaaggctatattctttttgttttgtttttatttatttattttattttaaatggctatattcttatgttttgttttttttttttaattttgaaattgagtttcgctctatcactgaggctggagtgcaggggcacgatcttggctcactgcaacctccacctcctgggttcaagcgattcttgtgcctcagtctcctgagtagttggaattacaggcatgtgccaccatgcctggctaatttttgtatttttagttgagacggggtttcaccatgttggccaggctggtctcaaactcctgacctcaagtgatgtgcctgccttggcctcccaaagtgctgggattataggcgtgagccactgttcccggccgatgtagtttataaaacatggtaaaataagagaaatgtctttctgagctgagagcctactgataaataattttatcaataaaaggattattgtaccctgaccttttaaagatgaatggcatgagtttatcactaatgcaatccaggatttatagatgaatatttggtaagacaatggactctaacatttgaaactgttaaagtcatttaattcaatgacttacctcctggttgatcttttccccccaaaactatgtttgtacatacctataggaaacttacgatttccagagacaggacattccatcttcagatggctgtgattgttatgatactcttatttcaattgaactgaaatttatcttcctataattttgccccaaggatgtcacttgggaccttttgctttatttaaaaagtgagatcattgatttagtttagagctaaataggaaatgtattgtggggtttataagagaaccataggtaatttagaagtatgttttaaaatttccaagcatttggggattttccttctatcttttttgttattgactgctcgtttaagcctcttatgatccaagaatataattagattaatttcagttatttcaagtttgttaatttctttgacaaagttttttttttttttttttgtttgggtggctcagaatatagtctgtcttggtgagtgtttagtatgtacttgaaagaatgtgcatggtgcagttgttgagtatagtagttgataaatgtcatttaaggttgggtgtggtggctcacacctgtaatcccagcatcttaggaggctgaagcaggaggatcacttgattgagcccaagagtttgagagcaacctgggcaacatagggagaccatgtctctacaaaaagtaaaaaataaaaaaattaactgggtgtggtggcatgcacctgtagtcctagccacttaggaggcagaagtaggaggattgcttaagcctgggaggttgaggctgcagtgagccgtgattgtgccactgtactccaacttgggtgacagagtaagaccctgtgtcaaaaaaaaaaaaaaagagttaagtcaagttggttcatcgtatgttcatgtcttgtatatccttaatgaattttatctgcttctattgattgcttagagagaagtgttgaattctctatcttgtccttcgtgtgaggcctggagtgccagagagatttttcttagtgttcctgcactttccccagttttcagcaagaccttcatgtccttgacagtgagggcatctctccctccacactttccccttctccgcagtatattgctgttgattgttacttgatgctggactggtcctgtgcatctgggcctcagggatgggtctttctcaacattactgtccttgcccaggatgatagctaaactcttctttgtgtctgaggagggttttgcatcagatttttcaccagatttttttgcccttcccctaacagtaacaagcctttgctatataagagtgtgggatactgggtccaagctgattttctgtcccttcaccaatagcttgcagcttttgctttgtatagtctgctttgaaagtctggaatgtgggccatgttttgtgcctgaatgtcacaaaagtatctctttcaggtcttctgtattgtttgatcccagtttttctagtgaacatttgaaaattgcattcaggcagcaactccagtgggtcaagtctgggcatggtttactgaacagatcctttgttaatggtctcaaaaggctataatcaaggtatccgccaggctgccttttaaccggaggcttgagtggggcagaatcttcctctaagctaattcaggttgttggcagaattcatttctttgtggctgtatgactgagggccctggcttcttactggatacccactggaggctgcccacagttcctagtggccatctgctgttcttgtcatgtgggcttcctcaccatggttactcactttatgccagcaagaagaatctctaaattcagggagggcccagtccttcttctaagggctttcacctgattatatcaggtccacctaagataatctctcttttaattacttcaaaattagttgatttggtaccttagttacatctgcaaatatttttccatccttccatattctattgtatacaagtaagttacaggtcctacccattctcaaggggagggaattatacagggattcagctgggagcagggaacatagtagccatctttaaaaaattttgcctaccattgtcgcatttctctgttactaatgttgcaatctcacacatgctccttaatgtagcagtttctcattgtccgaactagtaccccaggttctttgtcccatatccgagaaaattaagaaacatagacacaaaggtggggttggagtgaaagtttaataagtgaaagaaaaaaagctctctgcaggaaagaggggagtccaagtggatggcggggttacagctgaattaaaaagcttttgtaagaaactcttcatctctgtaggagtttgagtaacttattttatcagtaaagctgtctgtgctactcccgttatcttatacagctgtgggtacgtctttaggcaagcagaaatcggcttgtcttgtttgtataactgtgggtttgttttagataagccacccccgccccatccccatgcaagttcccaccatgaatatgcctaaactggggtggaaactttttcctgggagttcactaattagacaaagaacaaagagctctgtgctagatcctgtttgcttatctgtccaggtgcagtctgaggttttttttttttccccaggttgttttatttttgcctgttgctgtgacttttcaagcaggctgcttctgcagtctgaattttttcccaaatgatttttcctttccttctccctcactaaagaccaacttgatctaagttcagttttaagcttagctaaggacctctagagtagctttcctttcagagaatagtttagtcttactactacagagtgacctttctgacatgttccctgagagaccaccaagaacatagctggctggagcttgaattttgctcctttgtttcaggtctgagaattgttcagtttatatccttcttagtttgttgccaggccaaatggaatttcactctgtgaatgcacaaactagcacactgcaaagtctgaagggacctcctgtggatttctggagctctttttatgcttcctattggatctttgctccataacttctagccattttagccttcctgaattttgctctttatctactcaatttagctcagtttcctggccctctttgggttctctttacctctttacctgtatctgtggtctggaaatttcatttgggcagaaattgggtgattatagggctcacctcaattacaattctgcactacctattgtccagtatctggaaaacaattattttgtgtattttgcgcagttttctaatgtttctgttgttgttgttgttgttgttgtttatttgttttttaaactgtgaggttaagtcttgtgcttggttattctatcatggtcagaagtgaaatgggaatatttacttttattataaaacacagttattaaccttaatgtaatttatgttacctctacgggagcttcacttttgctgacatctatgcttaatggacaaactgagatgctgtgtgcccactgatggttggagaccaataatgaaggcagtacagaaattgctgtttcaattgcattcttgataccctgtgatttttgtagtgttccagatcttgcatatttagattaagaggttattttgtggcattaacatatgcaataataataatcttctctgcattcaaaatttttgattaactggatttttgtataaggaataccaaggtgagaggtttgtattttttcctgtagaattgagttttttgagcagagtgccagtttgattagtgtattttatgacagttaatattacatagtgtactggatctattggagcagggagaagggagttgggaagactggtaattagttaggaagttattgctgcaatccaggttagatgtagagaggacttatccaaggttaatggctctgagaatagaaaggagggggcctcatatgaagtgaatagaagaggacaagcagtccaagttatagtgagattttgaggctccagtattgggccattagtagaaaatgaagaggggcagttggttttgagatgctcgtttgcgattgaaatgttaaatttgtaagacttatggaagatattaatggaaatattatttagattgttagaaaaatggggttgggataagaacattctgttatttaggaaaatttttgactaatggtagaggcatgggcatgattactgtatcttgtgtttgacgcatagtaggtacccattaattacaaaagaaattgaagaaggactgattcatgtgatttttttccttctgtatttcttgcatattagtaattatatgatacaattaagatggagtttttaaggacttaactttctaattgcatacgatgcttaagagttaagattgtatttttctcataccactatctaggaggtgaagatcgagaacttattcagagaaggaaagagaaatacagactagaactgttggaacaaatggctgagcaacagaggaacaagagacggtaatgaaaggtttgcatttaaaagagatattttgagtttaaagtgcatttgtgtaaaatgacatggttaaataaggggttgtcgttctaatatgatgtttgatttgtaaatcacttatattttcatctctacatgctaaatcaacaaggaaaataaatactaagagagttttttttttttttttttggtcataagtagcaagtgagagtatttatatattctgtaatagcccttttacttccctcattgatttcttcagtttttgatttaaggtagcatttaatgttatagatatgcccattggattatcccatatatagtaacaaatataaaagtattttttgccatatgaaatggtatgcacacacacatacatgcaaaaaaaattgtatcctataaatttaacatttccatcccaaatgagcatctcaaaaccaactgtccctcttcattttctattaatagcccaataatggagcctcaaaatctcactatgacttggattccttgtcctctcgtattcacttcatacgaggccccctccttctttctattctcagagccattaatgttggataagtcctctctacgtctgacctggattgcagcaatagctttctaactaataactagtcttcccaactcccttctccctgctccagtagatccagcacactgtgtaatattaactgtcaaaaaatacactaatcaaactggcaccctgctcaaaaatcttcagtggcttcctcaattctacaggaatggtaaatcacaagtatttatgttgtacataggtatcattgtttgtagtctttcttgttgaaatacctatgagatattatagtttaaaattaggaatagagtttaaaattagaaattttaaatatagcttaaaattagaaattacagtggatcacgcctgtaatcccagcactttcggaggccgaggtgggtggatcacaaggtcaggagatcgagaccatcctggctaacacggtgaaaccccgtctctactaaaaatacaaaaaattagccgggcgtggtggcacatgcttgtggtcccagctattcgggaggctgaggcaggagaattgcttgaacctgggaggcggagtttgcagtgagctgagataacgccagtgcattccagcctgggcgacagggtgagactcttgactaaacaacaacaaaaacaacaacaacaaaattaggaatagagatctcgttttgagagaatttgagacctgttatctcttagtttttgccttttttccctctatctcagaggaagccaatatctactgtttgatgttagctatctttaacatcatttttaaaaaaaccctattattaggaagtatggtagatatatttaaatttttacccttctttttgctaactgaaaatatatgtgtaccctaaaagaggtttttttgttttacaaggtaaatattttatttttgtgttttattttgtgtgaattagtctttgaaatactctaggcattggcttagagatacatagtccaagttagttacatgtgaattctagtttactttgtatcaagtaaaaaaatttggctttcagtattatttaaggctgtaatgtcagttaaaggaattatttgtttttgtagatgtagtgcatagactttgtgtataagcttctttcagtgatgatttataattttgatagtttactatatctttttaatatgtaaaactttaattttgtttagagaaaaagatttagaactcagggttgcagcgtctggagcacaagaccctgagaaatcggtaagggtttctggcatcttttaatgtttaatctttcatcaaatgatcctcaaatgtggtggcaggtggggatagagaatattgggagaaaaagagagtagaccaatttgaacagtaataaaattaactaaattcagttctcataaagtgtaaattctcttaactgttatttccttgaggtaatttttcctttttcatttgtgtgtcatttttttaaagtttaaattagttctctctgctttattcacatgtactattccatgggaaagttatctgggttaaatttacaattgatgttaatatttttcttgaatacatcttgatcacttacttttcttacattggagtgatttctgagaaaactgacgactttatttttaaagcgttttagtaattgttacttattgtaacattagagagataataatcttatttttactttaattttgcaattctcatcattaagtggaatgaattactcacatcattgcagttaagtaaggaggaggtaatttattgtttttaccacaatttattttttctgtagttggttatgtaatatttatttctaatacaagtcttgtttcatctttgaatgatgattaagacctttaatttcattaaaaagctcattcttaaaaaggatgcagcaacttaaaattatttacctgtaggcaacttttgatttgcttttacttatgctgagaatatatcctgtgggttatctatttggaaaagtttcatattgcaccagcatcactcgcagtatgcttctgggttaacctgataaatcattcctgataagataaccatggtaggaaaaaaagaagataaatttcaaagctaaatatattttcctttatgaatcaaaagtttccttttaagaggtgagctttttaatgtaatatgttggcatgttaaattttgtatttatggttacactagtgtgtgacagaccttatttatctttgaattgaagctcctatacagtgtcaagttgatttatgagaataaataagtaattggaggcaacagttacgcctttacttttgggtttacttttgatgtgcaaatcttagaaaagggcacataagtgatgttctaaagtagagattagcaaagtgtggcctgtgaccaaatttgtttgctacctgttttcataaaaaaaagttttattgcagcacagccttgttcattccttgacatactgtttgtggctgctttagcaccatagctgagtctgctcattatgaagagactatgtagtcttgcaaatcttaatctatttactgtctagccctttacagaaagcatttgctgaccctgttttacagaatactataacagaaatggcaattagagaagtagcacggtgtcctagtacataaaaagaatactacaggtatatttaaaattaatatctgactctagtctttgcttaattatttactaatagtgagaccttaggtgatatattacttctcagagagcctcaattacccatttataaaataagcattagatattcagagtctggctgggcacagaagctcacacctgtaattccagcactctgggaggccgaggtggtcggatcacttgaggccaggagttcaagaccagccttgccaacgtggcgaaacccccttctctacaaaaattagctgtgcgtggtggcaggtgcctgtaaccccagctactctgaggctgaggcaggagaattgcttgaattcgggaagtggaagttgttgtgacctgagatcatgccactgcattccagcctgggcgacacagtgagactctgcctcaaaaataaataaataaataaataagatagatagatagatattcagagtcttttatagctgtaaaattctgttattcagtaaataaataaataaaaatagatattcagagtcttttatagctgtaaaattctgttattctgtgactgtcttaagtgcctgctgggataggaggtcttttgaggtcccttccacctttaaacttatgattatatgtaacaaacagattttttttctttattttagcctgatagactaaagcagtttagtgtggcaccaagacactttgaagagatgataccacctgaaagacccagaatagctttccagacacctctccctcctttatctgccccatctgtcccacccatcccatcagttcatcctgttccttctcaaaatgaagatttgcgcagtggactcagcagcgcccttggtgaaatggtgtctcccaggtgcttgtttaaatgttttgtgtttgggaattaggtaaggtattgctatattttatgtttagaaggatatactgaagcggatgacgttattcttcagagattttgtacagttaacagttttgtgaaataaattctcttgaaatttgtttttttctctgctattataaaaaaagggaaattcttaaaacattttattgtttaaagatgattttgtatctttagaatgaattactaagtacattttagtatttatttagttttgggttgtattttgggatgtttttgatatcttttaacatataaaagttgtacatttttttcaattttgttctttccacttggcaaacattgaattcttcaatttgtgcagaaaaagtttctaatgtggctcttttacacatataattttattttagcttctgtttcttcagctcattctctgtgattacttatgggctgtgtaactcaaatacctgaaataaaaagtgttgagattataaaacctgtaatttaagtattggggtaaagatttgatttctgtaggtgaaaggcatcacactataatagaatatacataaagaaaatcctgttgttaacactgatattttctgggctatactttcttctttgtagggcctgggcttattttttgttcactgttagtgtattaattataaaatatatttaaatttagaggtgtttttcttaacttttttgaacattgatattttctggactgtattatttcagtagaagttggtcttttagttactaaccaactgtggaagtgtgtttactatacttatcaggggctttgtgttttttatctgatggcttcctgactcaggaataggaggcattggaattaacagagcattttatggtggtctcagcattgaattagggattgaaatggttggctttcctatctggattttgggcaaaccacacctttgttgaacttcaattttctcatttgtaaaagtggagtagtattatatttttttcatgtttacaattacagggttgtgaggattagcttgtataaatctctatgaaattcgatttaatgatgacagctccctttcataacagttatttgacatttttgttgatgtatttttgttgtgaggatggtataaggtttagacacattgagtggctagtaaatgtgaaagatattccctactgaagagaacttccgtaccttcttagttctttggaattattttgaagtatatgacaagggagaacctgttaagatacatacaacagtgagaacattctagaatgccgccatctctttctattcatttaaaggaatttgcctttgccatttttactactgaaaaatattgcattggtagcaatacagagatatttcctaatcagtaatgaagtgctaatgtagaggtttttagaagttttaaatttatgaaatacttaaagattgtgtcaatactttactgttggtatttaagttgcttttattttactattaagaaatacactcgtttcctcagtcagactgaaccatttgtactcacactgttttgtagctctttgccttctctttctggattgtccttcctctaacacacacaagctcactccagtagcatggcttaagcgttgcctcttctggaaagccttacatgtgctttctttctctccctcatgtgatttaaatgtcccttctcctgtacctatagcaatctgcattttttgggctatattgctatttagtttaatttgcttgtactattattaattatttaatttgcttgtacttgactgtagttgtttattttcatgttactcctgagggacagggaccatgtttgtctttatttgatactggcacatagtgcctattggatattaattgattgaatattaacccaggtttttatcttacataaatgtacctgaaattgtgaaatcctatgtaatagtatttgctttttaagtcataatttttggtgaatgattggagcaagatggtgacattttctaaagtagtgataggattttcagtactgtttttgcaaaagagtaacatcttgattttttaaaaaattgcaatgaaatatgagaggaatttttcatctttcttttcatacaggattgcacctctgcctccacctcccctactaccacctttggctactaactatcgaactccttatgatgatgcatactatttttatgggtccaggaatactttcgatcccagtcttgcttattgtaagttatctatagggtaagcattttctccccgcttggctcaataaggaaaattgtttttttgtgtaaacaaaaaatatctaaatgagaaaagcacaactttgcttaattcagatgttatatattgatttaataaatgccctattttaaagcccagttatattttatagttatttccttttcatcttggtttaagaaataacgattgtgttttcttatgttgttctttgctaacttctagcccagaaggaaatattgatggttttctctatgtaacattttgattatgcacctttttctggaggaataagtaaaatattattaaatgattattctaaataaactttttttgtttttttgttttttctttaagatggttcaggaatgatgggcgtacagcctgcagcttatgttagtgctcctgtcacccaccaactagcacaacctgttgtgtaagttattagttaaaagaataattttttccccacttttattttgttaagatacacataacctaaaagccaccatcctaacattttagagtatactatttagtggtatttaatattttcataatgtgcaaccatcaccacaatccatcttcagaactcttttcatcttgtaaactgaaactctatacccattaaataataatggtgtacctcctcattcccctacctccgttctctggcaaccaccattctatgtctctgattttgactactccatgtacctcatatgaatagaatcatacaatgtttatctttttgtgactggcttatttcactttgcataatgtcctcaaggttcatccgtcttttagcatatttcagagtttctttcctttttaaggctgaattataatccattgtaattgtatacaacattttacttatctaaaatctatccatttatccattagtggacactttggattgcttccacattttggctatttgtgaataatgctgctgtgaacatgagtttacaaatatctctttgaaatcttgttttcaatttttttgggtctgtacccagagctggaattgctgggtcatatggtaattctatgtttaattttttgaagaactgccatactgttgtccacaactgctatactttttaatattctcaccagtagggcacaagggttccaatttctccacgtctttgccaatacttattttctttttcttttttttatagtaaccattctaatgagtgtaagatggtatttcattgtaggtttaatttgcatttccctaattattagtgaggttgagcatcttttcctatgcttcttggccatttgtatatcatctttggagaattgtctttccaagtactttcccatttttgaattaggttgtttgttttttgttgttgagttttcagagtcctccatatatcctggttattaattctgtatcaggtatttgatttgaaaatatttgctcccattctgtcttgatattgccttttgatgcacaaaattcttaaattttcataaagtccaatttgtctttttattattgttgcctgtgcctttggtgtcatgtctgagaaatcattgccaaatccaacatcctgaagcttttgccctatattttcttgtgagagttttataattttaggtcttatgttgagctgtttgagtcattttgagttaatttttttatggtattgcataagggtttgtcttagttattttgtatgtggatattcagttttcttagcaccatttgttggaaagactatcctttctgcattgagagatattggcattcttgttgaaaatcatttgaccaaatatacgagggtttatttttgggctatttatccttttcccttggtgtgtatgtcttcctttatcccagtaccttagtgttttgattactgttgctttgaatgttttgaaatcagaaaatgtgagtgctacagctttgttctttttcaaaattgttttggctattttggatccctggagattccatatgaattatgggatgagtttttctatttctgcaaaaaagtcattgtgattttggtagtgagtagtgagtgtattgaatctttgggtagttttgacattttaacagtgtcatgtcttctgatccatgaacataagatatatgtccatttatttatgtcttttaaaatttctttcagcaatatttcatagttttcattgtataggtataggtctttcacttctttagttaattcttaagtattttattcttttggatgctttcataaatggaattcctttcataattttcttttcaaattgttcattgttagtgtatagaaatgcagctgatttttgggtgttgatttgtatcctgttactttactgaattcatttattttaataattttgttgtagaatctaggattttctgcaaataagatgataacatctgtgaacagagataattttactttttctttctgatatgaatactttttatttatttttctttctttctttttttttttgagacagagtctcaccctgtcacccaggctggagtacaatgttgtgaacttggctcactgcaacctccgcctcctgagttcaagtgattcttctggctcagcctcctgagaaactgggattaaaggcgtgcaccactatgcccggctaagtttttgtatctttagtagagacagggtttcaccatgttggccaggctggtctcgaactcctgaccttgtgatctgcctgcctcagcctcccaaagtcctgggattacaggtgtgagccactgcgcctggccccttatttttctttcttaattactttcttaattaccctgactagagcttccagtactatgtttaatagaaatggctaaagcgggcatccctgccttgttcctgatcttagaggaaaagctttcagtctttcactgttgtgtatgatgtttgctgtaggtttttcatatatatagcttttattatgttgaggtaatttcattctattcctagtttgttgagttttaacgatgcaagtgttaaattttgtcaaatgctttttctgtattgtgatgatcatgtttttttcccctttattcttttaatgtggtatattgattgatttttttatgtttaaccataaccatccttgttttccaggaataaattccacttagtcatggtgtataatcattttaatatgctgctggatttggtttgctagtattttgttaaggagttttgcatcagtgttcatatgtgatcttgttgtagtttccttatactgtctagctttggtataagcataatgttgggcttatagaaggaattaggaagtgttccctcctcttgaactttttgaaaaagtttgaggatttatattagttcttctttaaatgtttgatagaattcaccagtgaaaccataaggtacagggcttttctttgttgggtgattattgattagagattcagtctctttagtaactagttatataggtctattcagattttctttttcttcatgatttagtcttgataggtttttatttctaggaatttgtccatctcatctaggttatccgatttgttggcatataattgttgataatattcccttacagtcctttcttatttttaaaagattaatagtgatgcccctttgtgaatttctgattatattttattatttatttatttatttatttttctgacctcattcttcccatcacagaattcctgattttaatagaagattcagagccttcttgttggtcagtgtagctaagcatttgtcaatcttgttgatcttttcaaataacaaactattggtttggttgattttttttttttctgtcgttattctagtttccatttcattgatttctgctgtaatcttttaaatttcctcccttctgcttactttgggttccgtttgctctcatttttctggtttctagagatgaaaatctagattattgatttggtatctttccctttgtttggtatgtatacttacaactataagctttcctcttagtactgttttagctacatcccttaagttttggtatgttgtcttttcactttcattgctctcaaaatattttccaatttttaaaaatttcttcatcaacctgttggttattttgaaatgtgttgtttactttccacataattgtgaatttcccaaatatccttctgttactcatgtctaatataattacattgcagtaggagaacaaactttgtatgatttcagtcagtcctttttaatttattgaggcttattttaagacctaacatggtctgtcctagagaatgttccacatgcatttgagaagaatgtgtattgtcctgttggtgagtgtattattctataagtgtctcttagatctagttggcttatagtgttatttcttttatttccttgatcttctgtgtagttgttctattattagaagtgaagtatttaatctccaactgttactttgtgtgtgtgtgttctgatatacagtcttgctctgtgtgtgtgtgtgtgtgtgtttgtgtgtgtgtgtgttctgatatacagtcttgctctgtcacccaagctggaatacagttgtgagaccatagtttgctgtagcctcaacctcctgggctcaagcaatcctcctaccccagcctcctgagcagctaggactacagccgtgtgccactgcacctgactgatttgtttattttttgtggaaacagggtctccctgtgttgcccagtgtgatcttgaactcctggcctcaagcgatcctcttgcctcagcctcccaaagtacgaggaatatagccatgagccaccacacccggactccaactattattcttgacttgtgtattattctcttcaattctgtcagtttttgtttcgtttcttaggtctctctttatatgcatatgtttataattgtgtcttactgaagatttgacccttttattagtgtcagagattcttctgtgtctctgctaacaatttttgtcataaagtgcttttagttctaatataaatgttgctgttctggttctcttttagtactgtttgcatggtgtatgatttttcgtatttactctcaatttatttgtctttgaatctaaaagatgtctctatgtagacagaatgcagttacttcctggtttttatgtttgccattttgcaatttttttctatatgtcttatgtctttttattcctctaatcctcctttattaccttctttttcttcttcgtttttttttttttttaagagatagggtctcattctctttcccaagctggagtgcagtggtgtgatcacagagctcactgcagcctcaaactcctgggctcaagcaatccttccactccaatctctcaaggagctggaactacaggcacatgccaccacgcctggctaaatatttgtattttttgtagagatagggttttgccatgtttcccaggctggtctcaaacttctggctcaagtgatcccagccccacaaagtgctgggattacgggcatgagccaccgcggccaggctcttttttttttttttaagacgcagtctcgctgttgcccaggctggagtgcagtggtgcgatctcggctcattgcaagccccaccttctgggttcatgtcattctcctgcctcagcctcccgagtagctgggactacaggcgcccgccaccacgcctggctaattttttgtatttttagtagagacggggtttcaccgcgttagccaggatggtctcgatctcctgacctcatgatccacccgccttggcctcccaaagtgctgggattacaggcatgagccaccgcacccggcctattagtttcttttatgttaaatatttaatagcattcaattttgatttttttgttgccttttgcataattttgagtttttttgtggtttccctacagattaaaattgatatcttaatttaaaataaatgagtttagattaagggcaacttaatttcaatggtacacaaaccttttctctaatataaggtcattccttttcctctacttgatgctattattgtcatacaaatcacactattatacatttaagtctctcaacacagttttataattattgccttatgcaattgtcttttatttatttataaatttattttttgagatagggtcttactctgttgcacaggttggagtgcagtggcatgatcatggctcactgcaagcttgaactcctgggctcaaacagtcttcccgccttagcctcctgagtagctgggactacaggtgcataccaccaatgctcagctaattaaaaaaattttttgttttgttttgttttggagataggatctcactctgtcacccaggctggagtgcagtggtatgatcatagctcactgcagtgtcaaactcctggatttaagggatcctcccacctcaggctcccaagtagctactactcccactacgcctagctaattttttatttttttaattttttgtagagacaggcgtctctctgtgtatcccaggctgctcatgaactcctggcctcaaaccaccttggtctcccaaagtgctgggattatagatgtgagccattgtgcccatccatagttgtcttttaagtcaaatagagaagaataaagttacaaacgtctttacatttgtaatatcttttatatttgcccatgtaattatctttactggcgttctttatttgtttgtgcttacttcagttgctgtcaagtgttctttcatttcaagctgaaggactcccttcagtgtttcttacagaacaggtctcttagtgatgacttctctgaattgtatttaataatgtcttaatttagctttcatttttgaaggataattttgatggtatggaatagtattggttggcattctttatcttttaacacaatatggtatcccctagcctttatggtttctgataagctgttaatcttactgaggatcccttgtatgtgatgaatggttattctcttgctttcaggatttctctgtctttatctttcagctgtttggctgtataagtgtggatccctttgagtttttcttacttggagtttgatgcgcttattggatctgtagattaatatttttcatctaatttgggaaatttttgcccattattttttccaatattctttgtgtccctttctctgtgtcttctcttcctgagacccccattggtacacattatggtgtttcacaggatctctgaagcttcgttcatttttcttcagtctttttctttctgttctagactgggtaatctcaattgacctgtcttcaagttcattgattgtttcttctgcctgctcgaatgtgctcttggctcccttttcttttcagttatatttttcagctctatcatttttatttggttctttttaaagtaatttctatctctttgttgttaattttatttggtaaacattgttttcacaatttaattctttttttgagatggagtttcactcttgttgcccaggctggagtgcagtggcctgatctcagctcactacaacctctgcctcccaggttcaagcgattgtcctgcctcagcctcctgagtagctgggattacaggcatgcgccaccacgcttggttaattgtgtatttttgctagagacggggttttgctatgttgctcaggctggtctccaactcctgacctcaggtgatctgcccgcctcggcctctcaaagtgctgggattacaggcgtgagccactgtgcccagccactttatttctttagatacatattttttagttctttcaacatatttctgataactgaataaaaatctttgttgattaaatacaaggcatgggattcctctgaaattttctgttgacttcttttttccccgtatgtatggcttataattctctatttctttgcaagtgtcataatttcttttttgaaaactgaacatttaggaaacataatgtggctactgtggaaattagattctcctcctccttgtggtttgttgttgttgctgttttctaagtaccctttgtaaagtctgtattctttgtcatatgtggccactgaagtctctgttaggatagcttaatagttcatgattagactgagatttctttaaaagctttgacccaataaacctcccagcctatgccaactggttctgtgtgtgtgtgctggggcatgcgttcagtaccctggcaatttacatctttgttttagctttcacatcccacttgcacagggtctcaatgccagccagaaatgagaggtgttctcagagcttcctcgggcatccatataattgcacatacatgtggctttctaaattctcaggaatatgttggagcttttcaagaccccatgggcatgttatttcccagatttttcttttaattttattgtcagtcttttgcttgccctggctggtatcactgttttagatagctatgatgttaagtaattactgctgattgttttctacaaaaccccaggatagtgagttctgagtctggtaaaatataggctctgtgaatggggcttttcctgggagctgccagacaggtcaaaagtgagatttttctagagattggatttttggggaattccagacctattctacctgtccagtggatactagattactggttttcacagcaactgtctttgggcagcgtttggattttaagtttatgatagagctaaggagaaactgaaaggtcaagggcaagttcaaatgccacaaagtttacttctcttactgaaaatcaaccttaacaaaaaaacaaaaactctcctgggattgttccaagccttccatgaatttccaaattacttagctcaagctgctataacaaaatattatagactgggtggcttaaacaacagacattttttcttggttttggagacatagaagtccaggataaaggtgtcagcagatttggttcctagtgagggcccttttcctggctttgtcattgtatcctcacatggtagagagagcaaggtctctggtctttcccccactccatttcacgcctccccattttttcttaagtacatttaatctcatcacgaggactgtaccctcctgatctcatctaaacctaattacctctcatagtccccagctccaaataccatcagaatagtacgcagggctttgatgtaagaacacaattcagtacatggcaccagaattattaaaaagttggttttgacaattttgactcgtgttctcattgctttaacggagtagcaggttttcttaaagttcttattctgccattctagaagtgctttctataaatcagctttagaacattttcatccctccaataagatccttcatgcccatttatagttaatcctaattcccatcctcagtatagttgtttttaagttcttctctgttaaatttttctgaaggccacattaaaaagtgtaaacttgttataaaagttagataactgagtgaccagctgaattatcttacaaaccaatgactttcaaatatttgtttgtttccaagcattttagcatgagaggtggaaggaacctgtgactctgttaactattttgatgtacgcacaatctgtcttctttccattgactttattaatttagcatgctttaatctttgtatcatttgagaggatggtaaagattttgattagctttagtctttcataaggatgggtgtgttattatatttctagggtaaccactaaaagtatagtaacaaaaggtaccacttactacagtaatagaggaaaaaattcaaaaaagaacaaccaaaatagaattgggaaattgttttattaactgtctgatctttttcagctttggtgatggaataagttaagaatttgttggccgggtgcagtggctcactcttgtaatcccagcactttgggaggccgaggcgggtgaatcacctgaggtcaggagttcaagatcagcctggtcaacatggtgaaaccccatctctactaaaaatacaaaaattagctgggcgtggtggcacatgcctgtagttctagctactcgggaggctgagacaggagaatcacttgaacctgaaaggcagaggttgcagtgagccaagatcacgccactgaactccagcttgggcgactagagtgagactccatctcaaaaaaaaaaaaaaaagcttcttggccgggttcagtcttaaacaggctaatacagagtgtggaatgaaggaatactctccggttactattatgagactttcataatcttgatacttaaacctaataagaccagtatgaaatggaaaattacaagctagttacactcattagcacagacacaaggatcctaaaactgaacctcaaagtatagagaaaggattattgatctggaattagaattactctcgaatataggatgattaaatttagtagagtatatcagttaagagcatggactttgtagcctgattgccttggtttgaatcctgcttttaccattcattagcttgaggtgtatttcttacttctattccttgtccgttaattggggtaataatggtatcacctcacagggtttttctgatgattgaatggttaaaatatgtaaagtgtttaggatagtgtctgaatactggagcctattggtgttagatataatcaatatgattataaaataaactactgtaatctaccatgttaacagaataaagaagaaagctatatgatatcccaatagacaaaggaaaagcattaaaataattgcattagtgattaaaaatgtaataaaataggttagaagggagcctataaacatgaaaaacttacatcatgtattttatttaatgatgatagatttaaaatattccttttgagattctatcattgcttcctttcacagggcttaatttcagcaaggccaaaaataagagaaagaaaggaaggaaggtacaaggattagaaaggaagagagaaaactgatgttatttgcaaaataatatatggttaaaatattggaattaatatgaaagttttcacagaattactgattacaaaatcaatatacaaaaagcagttgcaggaaatggcagttccttaaaaagaatatgatactgcaattccattcctaagcatgtaatcaaaagaaataaaaataacatgtagatgcaaagacttggatgtgaatgtttatagctgcattattgataatagtcaaaaagtggaaacaattcaagtgtccatcagtgagtgaatggataaacaaaatgtgttatattcatgcgatgaagtactactcagcaataaaaagtaatgaactactgatatgatataatatggatgaaccttataaatgttatgctaaatgaatctatacatactatattggtcccatttatataaaatgtccaggaagtacaaatctatagagacagcaggctacttacttaataattacctggggctgagggttgagtagggattgattgcatatggctatgaaggatatttttgggttataaaaatgttctaaaactggttatggtgatgatcgcacaactctataaatttactaaagatcatttaattgtatacagttgacactcgataacacaggtttaaactgtatgagtccacctacatgtggatttttttcagccaacttcaatagaaagtacaatatttgtgggatgtgaaacccatgtatgtggagggcctacttttcttatgtgggagttccatggggctcactttgggacttgagtatactctgattttggtataggcagagagtcctggaaacaatccctcagatataccacgggatgactatacttaataccccaattatttcctccctttcatcctgatctgactacataaatccttaaaccccctttttgggggagtcagggaggagttgataggtaaaggttaagaatttgggtctgtgagtatgtgggcaatatagacgggagggatcatgagtgaaatagatattgagagaacctgtccaccatatgatttataaacagtgtattttgagagaatgagtttattcacatagaccctctcaaccttctttattcatttacacaaagagcccccttgctctgaaaaaatacagtcagttaggaactatttgatctagtttacctcatcttcccttttagccactcataatccaatgtgacagtatacacaaacatacttgtttatcctaataaaagattgtaaataagttagaaaaggtaaatacacaatggaactcattttttaaagcagtgatatttttggagaagagaaagcttttttaaaattataaaatcaggctgggcgcagtggctcatgcttataatcccagcactttgggaggccgaggtgggtggatcacttgaggccaggagttagagaccagcctggccaacatggtgaaaccctgtctctactaaaaatacgaaaattagccgggcgtggtggcgggtgcttgtagtaccagttactcgggaggctgaggcaggagaatcgcttaaacccgggaggcggatgttgcagtgagcggagatggcaccatcgcacttcagcctgggcgacaagagtgaaactccgtctcaaaacaaaagaaaacaaaaaattataaaatcagtatttgaatttatcttttataatttagatttctaaaatgttttactgtcttcaaagtcagtatattcctgtacttaaacatgtgttatgttggctgggtgcagtgactcacgcctgtaatcccagcactttgggaggctaaggcaggaagatcacttgagcttagaagttcaagaccagcctgggcaacgtagaaagacttcgtctctaaaaaaagtgagccatgcatggtgatgtgcacctatacccccagctatttgaaaggctgaggtggaaggatcgcttgattccaggagatcaaggctgcagtcagctatgatggcgccactgcactccagcctgggtgacgaagtaggaccctgtcccaaaaaaaaccaaaaaaacagcactttattgcttgtgatttatgtaacaacaatatgtttaacattttttcttttatgtttccttgtgaatttttcaaaaatattaattttatttgagacagtcagactttttcctgtaattacattgttttattcttgaaatagctaagaagtaattttattagtaaatcatttaaaaataaatcattagttattgtgttacttgagggactttggctgtgttattatttctgtttgttcaggaagccgcctaagtcatatgtgtactgttcaatgaattaccacaaacttttttcactcctgtgtaactatcacctagcttaagaaatagatacagtgaatttgaaagttgcaaggattgtcaaagcaaaggcaggaaggagctaaggaaggggtcacttaaggattcctctttggcctatagagaaatatccttctgtatttttaaatgtatttatatgccatgctatttcaaaaaactgttgtattttcttcttgctttgtcgtcaatggatttaaattatttattgtgtatttgatgtaggaatacggttggacagaatgaactgaagattacaagtgatcaagtgataaattcaggattgatttttgaagataaaccgaaaccttccaaacagtcacttcagtcttaccaagaggctttgcagcagcaggtattgattcatttactcatttactgttgaacctcttaagtgtaagcatggtggtcccttagagctcagagtgtggccggggaggggaaaaaaaacagttaattataattcaaaatgctgagttttgaagtggatacagtaaaacgctgttggaagcataagatagggaaaataattgcctggggcagttgggagagcttcacacagtagttgatatttaagctgcatgttgtgcaatgactacgttacaagttgctggtgtatacagagaatggaattggggtggaagaaggggctggagagttagttaggttgttctagcagattgtgaaggactagctaataaggggttttcagtttcatctggttatgggcagctgaaggaaggaaattttaggccaagaaaagtatgaaaggattgtttgctttaagcagatttatattttatgaagataattggttgtgatttggacaattgggaagagattggcagagaaattatttagtagatagtccagtaaggaggtgatgaggccctgaaccagatggggacgttggggaagacatctaagagacaattctcaggtttcattgacaggactcagatatagggaatgagaacagagggtttgaagatgattcctaggagaataatgaggctataaaccaaaatggggaatacaggtagtagttcatgtttacagaggaggataatgggttctttcgtagtttgtaatatttgcagagaatttaagagtaactatcaaatgtatggggttctttgtgggaattcccttaccatctgagaggaccctgggactctaacttacttacttttctatagaattacacttggatttcttttaaaagtacttttgttcaacttttacatgggcaactttcttgaaagatagatttttaaaattacagaattaccaaccttttttgtatgttaggattctacaaataaaagactgaattttaaattcagaatctgtttttgcatgagcatattaaaaacaccactgacaaaactagatttttcaactctagaggtctatttgatgtgtgtgatgacttctttggctatgctggagcaaaaggttgcttaaatttactgtgcatatggttatgagtttaaaagtgactttccaaaatgtagacacttgtttattgcctatctgtatgtctctacagaacaaccctgcgcttatacttagtgatgataagaatgcatttgttttttgtgcttaatacagctttacagaagtattgcaggtttagttccagaccacagcaataaagcaaatatcacaatgaaatgattcacatgaattttttggtttcccagtgcatgcagagttatctttacactatactgtggtctattaaggtgcaacatgtcttaaacaagctacgtaaacttaatttaaaaatactgtattgctaaaaaaatttagcaaatcataatccttttgctggtggaaagtcttgcctcaatgttgatggctgctgactgatcagggtggcagttgctgaagattgggtggctgtggcaatttcttaaaatgagacaacagtgaaatttgctgcatcaattgactcctccattcatgagagatttctctgtaggatacgatgctgtttgataccattttatccacagtagaccttctttcaaagtttggagtcctctcaaaaccctgctgatgctttatcaacttagtttatataatgttctaaatctttgttgtcatctcaacagtgttcacaacatctttaccaagagtagactccatctcaagagaccactttctttgctcattcataagaagcaactcctcatccattaaaattttatcatgagattgcagcagttctctcaagtcttccatgcctcacttctaattccagttctcttgctatttcttccacatctgcagtttcttctaccactgaagtcttgaatccctcgaagtcatccatgaatcatccattagggtcaacttctttcaaacttctgatactgttgatattttgacttccttccatgactcacaaatgttcttgatggcatctggaatggtaaactctctccagagggctttcagtttagatttcccagatccatcagaggaattactctctgtggcaactatagctttatgaaacgtatttcctgaacagtaagaattcagtgtcaaaattactccatgagttaatgggctaaagaatggatattgtattagcaagcatgacaacaacattaaccttcttgtatatctagctcttggttgaccaggtgcgttgtcaatgagcagtaatattttgaaaggaatctcttttttttagtagtaggtctcaacagtggacttaaaatactcagtaaaccattcttgaaacagttgtgcagcaatacaggctttgttgtttcctttctagagcacaggtagagtagatttagcatcatctttttttttttttttttttttttttaaagacggagtctcacactgtcacccatgctggagtgcagtggtgcgatcttagctcactgcaagctccgcctcctgggttcatgccattctcctgcctcagcttcccgaatagctgggactataggcgcctgccaccatgcccggctaatttttattttgtattttcagtagagacggggtttcaccatgttagccaggatggtctcgatctcctgacctcgtgatccacctgcctcggcctcccagagtgctgggattacagttgtgagccaccgtgcccggctgatttagcatcattcttaagggccctaaggttttcagaatggtatattagcattggcttcaacttaaagtcaccagctgcattagcttctaatgagagagtcagcctgtcctttgaagcttgaaaccagacattgacttctctttactagctatgaaagtcttcttttaatacaaggctgttttgtctccattgaatatctgttgtttagtggaaccaccttcatcagttatctgatctagactttctgggtgacttgttgcagcttcttcatcagcatttgctgcctcatgttgtacttttttatttttatttttattttgagacaaagtcgcactctgttgcccagcctaggctggagtacagtggcacgatctcggctcactgcaacctccacctcagcctcccgagtagctgagactacaggtgcccactaccacgcccagctaatttttattttttatttttttttgtatttttagtagaggtggggtttcaccatgttggtcagggtggtcttgaactcctgatctcaagtgatccgcccaccttggcctcccaaagttttgggattacaggtgtgagcccagcccatgttgtacttttatgttatagagatggcagctttccctcaacttcatgaaccaacctctgctaacttgcaagttttcttctgcagcttcctcacttctctcagccttcatagaattgaagaaagttagggccttgctctggtttaggctttggcttaagggaatgctgggctggtttgatcttctatttagaccactaaaactttctctataacagcaataaggctgtttcactttcttatcattcatatgtttactggagtggcacttttaattttcttcaagaatttttcctgtgcatttacaactgggcaaagtgtttatttaacataagaggcctagctttcagcctgtctatgcatttgacaagcctttcccactaagcatagtcatttctagcttttgatttaaagtgagagatgtgactctttcattcactcaaacacttacatgccattgtagggttattatttggcctaatttcagtattctatcagggaaaagagagacccaaagagagggaaagagacaggggaacggctgattggtagaatagtcagaatacatatgacatttatccattaaatttgccatcttatgtgtgtgtgattcatggcgccccaaaacaattataatagtaacactaaagatcagcaatcacagatcaccataacagatataataataatttaaaaagtttgaaatattgtgagaattaccaaaatgtgacacagagacatgaaattagcccatgccattggaaaaatggtactgatagacttcctcaatgcagagttgccacaaaccttcgatttgtaaaaaatgcaatatctgtggccaggcgtggtggctcacgcctgtaatcccagcactttgggaggccaaggtgggtggatcagaggtcaggagattgagaccatcctggctaatgcggtgaaaccccgtctctactaaaaatacaaaaaataactgggcgtggtggcaggctcctgtagtcccagctactctggaggctggggcaggagaatggcgtgaacccgggaggcggagcttgcagtgagctgagatcacgccactgcactccagcttgggtgacagagcgagactccgtctcaaaaaaaaaaaaaaaaaaaaaaaaaaatgcaatgtccgcaaagcacaataaaattcagcacaataaaatgaggtatgcctgtatttaaagttgccaagcattccccagagagagttgatcctccgacctctgaattctgggaatagagtttgcctagggaaagtaggtctggtaaggttgagggtagactttgtggctgggcattccccttgaaaggatagatgaaaaaggaacgtagggagatctgatggtcccatggaactggcagggttagagagggaatggctcaggtagacactaggggagggaaggaggagttggttgagtctgaagtaccttagtggctagaaagtcatttggtgtatatagaggaacaggggctatgtattctagccattgaattatttttatttttaatgttattatttaaagacagtgtcttgcataatgttgcccaagctgaagtacagtggcatgatcttggctgactacaaactccacctcctgggttcaagtgattcttgtgcctcagacacccaagtagctgggattacacatgtgcgcaaccacacccagctaatttttgtatttttagtagagatggggttttgcatgttggccaggctggtcttgaactcttgaccttaagtgatctgcccaccttggcctccataggcatgagccacgacacctgacctaaagtatttttacattgagtattacatatatttgtgattttaacctttgtaggggggtacactggggaaaaaaaaaaaagcaaatttttttgcttgttttctaatacaaaaaataacatctggtattactaacttcttgtatcagaatacttgtcagcgtttattttaaatatatcttatgttgtcaagattcgggaaagagaagaaagaaggaagaaagaacgtgaagaaaaagaagaatatgaagctaaattagaagctgaaatgagaacatataatccctggggaaaaggtggaggtggtgctcctctcagggatgcaaaaggaaatctgataagtacgttatttctactgacttgtttttaaaataagctaaattatttttaactttttaaaagattggggagtagaaaaaagtaggaatcatagcctctatagcaacgcatgtatgtaacttaatgcatatgaggtattttaagagtaaatataataacagaggctagaaagcatttcttcttcagaatactatccatttgtttttattataaatatttcatcctccgatgttgataacccagttgcagagaaaagctcatgttagttgataagtttttactgaaactggtacttagaatattttgttccctcataaaaatgataaaacccatattacaatttaaaaaaaataaactagtaagatgtcttagaaataaaggatgtaaaacagttttgggaggggattttgtgtttaatttatctatgcaatatacctgctaattgcaagaattcctttgggaaaaagaagacatgatcatagaaactttctagcaagtttcataatttgttgatttatctttcaattatgtactctcaaaaatgtttgatctagtaatcacacaacaaatacttcgaaagagtggctttatacaacttgttatatacagttgtctgttggtaaccatgggacattggttccatgatctcctgtgaatacccaaatccatggatgctcaagttcctgatataaaattggtaaagtgttcgcatataacctacacacatcttcctgtatactttaagtcatctctagattacttgtaatacctaatacagtgaaaatgctatgtaaatagttgtaatcttgtattaattagggaacaatgacaagaaaaaaagacttttcacatgttcagtgcagatgcaagcatccatttttttttgttttttaatgtttttgaattgtggttgattgaatccacagatgtggaacccgcagttacaaagggctgttgtatatattaggatggtctttgtttagcgtttagttaagcagaataaaagtagatcaaagatacacacttcatgttctttaggtgttatgtattgtaggaatagatgagtgatagaatcggaagattggatgttgagttagaattctcgtgtgttgcaaaaattttctcccattctgtaggttgcctgttcactctgatggtagtttcttttgccatgcagaagctctttagtttaattagatcccatttgtcaattttggcttttgttgccattgcttttggtgttttagacatgaagtccttgcccatgcctatgtcctgaatggtattgcctaggttttcttctagggtttttatggttttagatctaacatttaagtctttaatccatcttgaattaatttttgtttaaggtgtaaggaaggtatccagtttcagctttctgcatatggctagccagttttcccagcaccatttattaaatagggaatcctttccccatttcttatttttgtcaggtttgtcaaagatcagatagttgtagatgtgcggcattaccagaatctacaatgaactcaaacaaatttagaagaaaaaaacaaccccatcaaaaagtaggcaaaggatatgaacagacacttctcaaacgaagacatttatgcaaccaacagacacatgaaaaaatgctcatcatcactggccatcagagaaatgcaaatcaaaaccacaatgagataccatctcacaccagttagaatggcgatcattaaaaagtcaggaaacaacaggtgctggagaggatgtggagaaataggaacacttttacactgttggtgggactgtaaactagttcaaccattgtggaagtcagtgtggcgattcctcagggatctagaactagaaataccatttgacccagccatcccattactgggtatatacccaaaggattataaaacatgctgctataaagacacatgcacatgtatgtttattgcagcactgttcacaatagcaaagacttggaaccaagccaaatgtccaacaatgatagactggattaagaaaatgtggcacatatacaccatggaatactatgcagccataaaaaaggctgagttcatgtcctttgcagggacatggatgaagctggaaaccatcattctcagcaaactattgcaaggacaaaaaaccaaacaccgcatgttctcactcataggtgggaattgaacaatgagaacacatggacacaggaaggggaacatcacacaccggggcctgttgtggggtgaggggagcggggagggatagcactaggagaaatacctaatgttaaatgatgagttaatgggtgcagcacaccaacatggcacatgtatacatatgcaacaaacctgcacgttgtgcacacgtaccctaaaatttaaagtatagtaataaaagaattcttatgtattatgcctttgcttgttaaatattggtttttttgaagatatatttgaggcccactttaatttattttaatttaattaattaattttttcgagacagagtttcactctgtcacccaggctggagtgcaatggcaccatcttggctcactgcaacctctgcctccaggttcaagcaattctcctgcctcagcctcccaagtaactgggatttataggcatgcaccaccacacccggctaatttttgtatttttattagagacggggtttcaccatgttggtcaggctggtctcaaactcctgacctcaggtgtcccacccacctcagcctcccaaagtgctgggattacaggtgtgagccactgtgcccagcctactttaattttaatagctctttttttcttcccaaaagatttgttcctttcctatcttcacctcatgaataattttctcacagttttgaaagagtgaaactcttattactttctttatcaatgaaatgattttagatgatgcctagctaacatttcttattttaataggtaagtgtttacttgaaaatatattagaaaaacactagttttccatttatgaatagtgctataatattttcttttaaactacaggtattaaagtgaaggcattagtccaggcatttaatggaaagtgctgtaataataaacaaacccaaattcttagaagcttaaggcctctcttgttaggcatccacttttgtcccactctgatgctgctgtttgggtggttctcctccaagaagtgactcagggatccattgtttcattccttcattttagagtccttttcttcttgtccagggacaaattgaggattttgttggggcctggcctggatgtggaggaagatcatttttgccttcattccattgttcagacctagttataggttctaacctaactgcttgggaggctgggaagtttaactttctttatgctcagaagaaggacatgggattaatagccatatgggcaatctttgctacagtaaatttaaattataaattgatagaagttaactagttaccatgaaaaatgtgcttaactgagtgaaacattggaaaacattgggatagagcagttttctaaaatcttacctctaagattatttctagttcaaacaatacaattattgtgttctgtatgcctttaattggtggaagtgagtaggataaatttgggttattgagttataaaacattattttagaattgcttgacctaatgagcatggagaaaatgtttccacattattttagaattgcgtgacctaatgagcatggagaaaatgcttcttagatttcaatttttaatagtaatgtttagttggcttatttaatgccgtcttcatgccatgaaatagaaaaggcatactattttatcaaatacagtataactcttttaatgatattttcaagcaagtaaactcatgacttaaagagtatcagtttattttgtatgtggatgctacattttatctttatttttattttttgagatggagtttcgctcttttgcccaggccggagtgcaatgatgcaatctcagttcactgcaacctctgcctcccgggttcaagcagttctcctgcctcagccttctgagtagctgggattacaggcatgtgccaccacgcccccctaattttgtgtatttagtaaagatggggtttcaccatgttggtggtcttgaactcctgacctgaggtgatccatccacctcggcctcccaaagtgctaggattacagacatgagcgactgcacccagtgtagctactacattttagagaaggcgggaacattacatttgaaatatgtagtatagagcagtgtgatgactaagaccacataacgtctgttcattatcttggctaactttaattctgctgctgacttttctaattactcctgttctttttttgatcttttattccaaagaaattaataaaattgaatcttaacactgcacccttatcttacctaagaagatctcattataaggcatagtagttactaatgaaatataaaaatgtgttattcatgcaactttaaagtatcaccccttttaaagtaaatatttctcattttaattatttgtacagtattttattctgttgtctttctcagttctttatttattaaagttctttattcaggtttttatttgaaactttacatgaaactgtccatgtcaaatgttaaaacgtatacaccaaaagaaaaatgtcaataaaaataaattaaaagataaaattaaaaaccactttgaaaaatggtatctcatagttccaattgattaacaggatgattagttagtcagttctcttacttactcgtccacccatgccaatctgtgatctcgtttctggcatgaaaatattgccttttttctgacatttgtgttttagcatagtgtttctgagattcatccatgttgttacatatgtcagtagcttattttttttattactgaatagtattacattttctgaaggtatcacagttgtttatccatttaccagttgatagatatttgggctgtttacagttcaaggctattataaataaagctgttagaaacattcacttacagatctttgtgtgaacataaatttttatttcttttgggtaagtgcctaggaatagaattgctgggttgaatagtaagtgtttaactttgtaagaaactgccagaacattctccaattttgttttgtcattttgcattcctatcagaaaagtatgaggtttctagttgctctgaattttcatcagcacttgaaattatgcatctttaaacttttagttattttattgaaagtgcagtgatacctcatttaaaaaaagctttttctattgtgaaattaagacctaaaagagttgcaaagatggtgtagagagtatccttcaccttgtttcccctgacgttaacgtcttagataatcatggcacaatgatcaaaattagaaattaacctagatacagtgccgataattaagttacataccttgttcgaattttaccagttttttttttcttttcctaatgtccttattgtattttaggctctggtccaggatcctataatgcatttagttcatgtctctttagtctcctccaatctgtgaaattcctctttctcagtctttctgtctctctctgttccattgctctatatttctatccttttgcccgtatcagagtctcttgattactatagctttgtagtaagttttgaaattgaaaagtttgagtcctccagctttgttcttttttttcaagatcttttgacaactcaacttcttcgcatattttactatcactatagtaatgtagtaatattattatttagtaataagttatagtaagtaaataatgttatagtaagtaattattactattactattactttgtcatgtcaagcatggtggcattttcattgggattccattaactttatagataatattgaaacagccagcatcttaataatattgagcctcttgatccatgagtgggcagtgtatatccatttattgcttctagttaatttctctcagcaatattttgtagtttttggtggcagatcttgtgtatattttgttaattgtttccctaaatatttcatgtggtttgaagctattttaaaatgttacattaaaaaatttttaattcatttgttcattgatggtctatagaaatacaggtaaattttttatattgtctgtagtctgtgtgcttgctactgtctgtagtctgtgtggttgctaaactcacttgttagttttagtagtttttttgtagattctttgatttttaatgtaggcaatcatagcatctgtcagtagagttagttttacttatttctttccaatctgatgccttctatttattttaattgccttttacactgtttaagaactccagtacagtgttaagaattcatgagcgcagacatccttgtcttgtctctgatttcagatggaaagcaatctttcaccattaagttagctgtaggcttttagttgatttttcttttatcccattgaggatgttctattccttgtttgcttagaggtttcattgtgagtgtatgttgaattttgtcaggtgcttttctgcatctattgagatgataatgtggtttctttacccttctgacctatggtaaattacattgattgatttttgaatattcagccaatcttgcattcctgggaaaaaccaagctgtattattgtcttttatacgtgttgtagaatttgatttgctagtattttgttagagatttttgcatctaggctcataagatattctggttttttatttctttataatgttgtctggttttggtgtcagggtaattctggcctgataacatgaattgggaaatgttttttcttttgttttttgagacagagtcttgctctgtcgcagaagctggagtacagtgacataatcacggctcactgtagcctcgacctcctaggccgaagcaattctgccacctcaactttctgagtagctgggactacagtcatgtaccaccatacctggctaattttttttattttttgtagaaacagggtctcactatgtttatgttgcctaggctggtctcgaactcctgagctcaagtgatcctcccaccttggcctcccaaagtgctgggaatacataggtgtgagccacatcgcctagctgggaaatgttttttctgtgtttagaattcaccagtgaaggctgggtgtggcggctcacgcctgtaatcccagcacattgggaggctgaggcaggtggatcacaaggtcaagagatcgagaccattttagccaacatggtgaaaccctatctctactaaaaaaaaaaaaaaaaaattagctgtgtgtggtggtgtgctcctgtggtcccagctactcaggaagctgagacaggagaatcatttgaacccaggaggtggaggttgcagtgagccaagattgcgtcactgccagagcgggactccatctcaaaaaaaaaaaaaaaaagcattcaccagtgaagccatctgggtggggaatcttctttttgggaaagttttaaactatgacttcactttatttaatagataaagagacattcagtttatttcttatgtgagctttggttatttgaatcattcaaggaaattattcattttatttatttatttattggcataatgttgttcataatatttcttttttattctaatgtttgtaggatctgtggtgatggcttctcattcattcctgatatttgtaatttgtatattttcttaatctgtctggctggatgtttatcaactttatggatcttttcatagaatcagctttagttttcattgattttttttctctgcttttcttcttgtttcagtgattttgctcttatctttactatttgcttcctttagtttgctttgtgcttacttttctcccttttctaatttctttcttttttttttgtttttgttttgagacagagtctctctgtgtcgcccaggttggagtgcagtggcacaatctcggctcactgcaacctccgcctcccgggttcaagtgattctcctgcctcagccttccaagtatctgggactgactacaggcacacaccaccacacctggctaatttttgtatttttagtagagacggggtttcaccatactggccaggctggtctcgaactcctgaggtgatctgcccacctcagcctccgaaagtgctgggattacaggcatgagccaccgtgcccagcccccttttctaattttttaatgtcgatgcttagactatgatttgagaccttacttattttctgtgcatttaagtgtgctacacatttccctctgagtactgttttagctgtacatcacaaatttttatgtgttgttttaattttcattcagttttctgattttcattgtgacttttctttgacccccattagttatttggaagtggacttaaaaattttccaagtatcaggggattttcctgagagctttcttttattcaattctagtttgtattctgttttgtaagagaatatacttttcttttttttttttttttttgagacaaggtctcactctgtcacccaggctgtaatgcaatggcacggtcatgcctcactgcagtctcaacctccctggctaaagtgatcttcccgcctcagctcccccaagtagcaaggactacagacacatgctaccatgcccagctaattacaaaattttttttagagacagggtctcacttttttgcccagctggtctcaaactcctggcctcaaatgatcctcccacctcagcctcccgaagtgttgagattacaggcatgagccactgcgcccagctggagagaatatacttttaatgacttcagtgtttttaagtttgtgagatttgttttatgagccatcagttagaattttactctataagtaagtgtatatattttaaattaggttaattttgatatatgtattgttagtagtgctagggttgggaattttgcttagctctctgaattaggtcattataaaagagtttctgtgtcagccatgaattgctgaataatcctgggtttatagtaacatttaacatatctcagcccttcacaaaatatattttgatatgtattttccaccaaagtataaagagtagcagctaacttgtgaagttaattaaaattaatttttttataatgagctaattcactcagtgaggagcacgtaagtgctcctaattttatattgaatgttatgatgatttacatttaaaataaagtcctatctttgcagttgacaaattacactcttgaccaaagtgccttttttaattttcgttttttagctgatttcaaatcatttattttaccatctcacagaaagacagaaaaggagtggccagttgccaaatcatttttcccaataaaaagcaatatggatttggtttgcttgctaaatctgatagtcttaaatcttaataattatgtactctgatgaaattaattttctcttaatataaatatgttgaatattattccagttgagaagtccatatataatcaacaataaattataatgtgttatcgaagtttgcttacatatagggtatctcctaatgtatggtttgtgcaggtgactatcaaactaagattgcattccctaagcactcactagtttggcaacacagctgtagattatttcaagaatatctatctgccttgccagtccttggcacttgggaattttcttgcagtcacctttttctgtggtttcacccagtcccttctctttgcattttttctatttatttcttctttctacctctgaacatgcttaggtcacttgtattaaaacacagacaaatgcttcctttaccatataaaacacattcaaaaagtagtccatgcttgttgctgtcacttcttaccaccctcttattggctatttttccatagtataacatctagcttgtacccccgcgccccaccaccccatgccacattgtcaacaaaaagcctgatgacctaatttcaatttaatgatttttactcatcttttatcttctttgaactggcttgacagttcctttttttctctaagtcctttgtatcctccgagatgctgtccagacttcagctaatattttttggatgtgcattatgaactagagttagactctgctaggtttgtgagcatgatctttcttctaaggactgtcatctgaccttgtgtgtttctcatcccttcatccattctcttccatgtcatctcttttactcctgtgttactctttaggtcttccctacagattgatctttaaatctttttctttgccctcaaccatttttatttttattttttttgagacagtctcactctgtcacccagcctgaagtgcagtggtgtaattttgactcactgcaacctgcacccccccggcttaagtgatcctcccacctcagccccccaagtagctgggactacaggtacatgccatcatgcccagctaatttttgtattttcagtagaaatgggatttcaccatgttgcccaggatggtcttaaactcctgagctcaagtaatccaccctctttggcctcccaaagtgctgggattataggtgtgagccaccacgcccggccagactaatatattaatcccacttctgtaacaaccacaactgcctccattaccttctacagaacaaaattgagagccattgacatgtgttttaggatattgaagaataggtatccattctatggtttccagtcttatttgccattgctctattacatgtgctttatgctctagtctagctggactactttaatgttgccagaacactcatcatgctttacccacttggagtgctttctcacattgttctatttctctattatgctttcctacttatcttcatctgtgaagctcctatacattttccaagtccaagctgccctaaatattgtaacagaatgtgaaccttcctgattctgaactcccattctcttttgtagcatttatgtattacttgccatgttctatctggaattctaattgtgattcatgttcaaaatacattcttgaacataacaggcttcctgataaatacttcttatatccaggtttaagttcactttcagtgctgccatactgttgcagttttttggtttgtttgttttatggaaaacaggtactttttattttattaaagctttaagttctgtaatcattcagttctgtttttgagattggttgtttgacccaattctaggtgctcagatttttgctgtgtgtattagatatctattctatgtaatgaattaacccaaaacttggtgttttagcatgataaacagttattatcttgcggttctgagggttagaaatttgtgagtggtttagttgggtggttctgtctcaggctccctcataatgttggagtccaagatgttgaccatggcagtagtcatctgaggcttgatggggactgtaagattcattttcaatatggctccctcacatggctcaggaggccttagttccttgtcatatgggcctctccatagggctcccttagtgtccttatggtatggcagttggctttcttcagagtgaatgatccatagataagcaaggtggaaataatttcttttatgaggtagcctcagaagtcatataccattatttctgcaatatgctagtcataagaagtgagttattaactctggacaccactgaaggggaatggaatttagctttaccctttgagggaggattgccaagtaatttgtgaatatattttaaaactccactccacataattatgtgttattaggagaccgatgacaggtaaattacactatgagttgttttaaattgttgctatattttttctatattaaagaaattctaagttctgaagtaacatagatactgttaatatggtttttatgttttgttaaagatttatgtgtccttaatttatctactaattgagattatttttaaggattattttttgaaaatcttaaaagttttgataattttgtttctcttttcagggcaccaacatatcattgaattattcccaactttgtcctattgtttttctttctgacttcctattttaagaaaatatattttgcatgccaattacagaaatgtgtttattgaaataaatggcttattttttcctctcagctgatttgaataggatgcacagacaaaatatagatgcctaccataacccagatgcaagaacatatgaagataaaagggctgttgtatctctagacccaaatttagccacttcaaatgctgagaacctagaagatgctgcaaataaaagctcaggtttttaatcacttttttttttttttttttttttttacatttctgaaattgttcagtaacatttctgttctgtgactaagttcttattgggatcttgagaatttggctatcctgatacaggaaacataacacactattcataaagtgccttttcttcatagttactttgaaaaaaggtgaatagggaaaggttacttcttcctactgtgtttcttctcagctttgtaacttgctgtgtatcctttagctgctgctaacatttttattttgctagtgggggacatttcttaatatcaaacactctttttacacacatacacaatttgcatcttatatccatagctgtttgaattagtgaaacagtatcattgtgatatgataaattgtacagggaaattcattttttacttgttttagtaatcatttaccctcccttgtaaaacaacagtgtacaaagaaatgaagcaatgttgtttttttttttgtgagatggagtctcactttgttatcccaggctggagtgcagtggcataatctcagctcactgcaacctccacctcctgggttcaagcagttctctacctcagcctcccaagtagctggaatcacaggtacccaccaccacacctggctaatttttgtatttttagtaggtatggggtttcaccatttagccaggctggtctcgaacttctgaccttgtgatccatccgcctccacctcccaaagtgccgggattacaggcgtgagccatcgcctggttacatgcctcttaactacttatctttgatttactattaatatcctttaatcaattctgaaagatgaaaattattcaattatctttttttgacataccaggaaaagttgtcaggtatgttaaattgtgttatatatttaaaaataaaatttaatacagcacctcacactatattttgatgcctataaaactggccatttattcattacaaaattctactttgtgctttcacagaagttttgattttagattagaaaagaacttttcattaggaagttctaaaatatttgtgactgatcatgtagtcttttttgtttttaacccttatttttggctaaacagataagtgaagtggggagctgtgattagagtcatagccctgcatctttcaaggctttgatggtagcacacttatctgtagcctttttgaacagtttaagagatggattatttaccgttttcatgggcagcttgtaccagtgttttctaattatgagaaaatgctttctttgttctacaatatattttatcggatccagttttgatttttagagcactaaaattggaacctttgattttgacaatattattgatttggctcttttaatttgtaatagtgtgtggtaagaacatcacaacaccttttcatattattgctgctaagagaattttgacttatttctgatatttttctcatttgctgctgcttctagtagtctgtattgagatctcattgccatacagagtctttctctacccttttcttccatacctggtattgtttgtagttctggctcagcctagaactttcgctatcttagtaataacactttttagccatctagctttgcacaccaagcaaaaacaccagaaaatcaacagttcccatgatcccttcccaaaagcataagcctgatgattaaacatgcacagcaaaatttgttgcctatagcctttctgtaccactgccaggtttttatgctgatattgttgccaagatgttctgttttaagaattgagtaaaaaaaaaaccataaaatgtttaaaacttccttttttttgtgaattgaaattcccaaattagacttttcttccctaagaatgaattaattggctgggtgcagtggctcacgcctgtaatcccagcactttgggaggctgaggcaggcggatcatgaggccaggagatcgagaccatcctggcctacatggtgaaaccccgtctctactaaaaatacaaaaattagctgggcgtggtggcatgtgcctgtagtcccagctacttgggaggctgaggcaggagaattgcttgaacccgggaataggaggttgcagtgagctgagatcacgccactgcactccagcctggtgacagagtgagactccatctcaaaaaaaaaaaaaaaaaaaagaattaattaatctaaaataaactttctcaatacaagaaatgattcaaagccacctaattttgtgctatgccatatatatgtgtatgagtgcatgtatgtgtatgtatgtacacacagacacacatatctttgcatatatgtagcatttgatattttaaaagcctgaaggaacttgaatatagctgaaaattgaatgttacaacatgtgtttaagtttccttatcctctaatattttatcttcattaggtttgtttctgatgccctttataatgttcattattttttcttttattttatggtttttagatgagctatggcttatgaagtctaatacgaatttggcttaaatttatttttttggcttattatcatgccaagatacatttctgctttctttgtatatagcaagtgtttccctatgattttccttttatagtttattcatttctaaaaggacttctcttgtctgtctctaataatatttcttctctaattgccccaaaggtttagaataggagtgagcatcacggtgaaacatgctactcaagtttgttttgctaatcagcttttccaccacagcataaaatttaaaagagccttcaaggtgtatatttagtttgttttcagtgggaaaattttctagagggaaaaagtattcataatgtttaagtattgatttggctttctgccagtctgttcaaataagcattaataaatttaaatacaaaagcaaaatagacctgagtggtagctgaactgcaaagcaatttgcctatacaaaactacatgcgagaaatacatgctttaggctgggcacgctggctcacgcctgtaatcccagcacttttggaggccgaggcgggcggatcatctgaggtcaggagttagagaccagcctggccaatgtgacgaaatcccgtctcaactaaaaatacaaaaaaaaattagccaggcatggtggcacacgcctgtagtcccagctacttgggaggctgaagcaggagaatagcttgaacctgggaggcagaggttgcagtgagccgagatcatgccactgcactccagcctgggtgacagagcaagactctgtctcaaaaaacaaaaaaagaaatacatgctttagtttaatggtataaagaatgagtcagaaactcaaaaataatataaaaagttatgtgaggcttaaatttaaatgtcattttttcccatctgcattcaaagagactctaagggtataattgtttttcgaattgcttttatgaaataattttttccattccaagaatatatgatactatttataggtaatatatactaaaaaatttttgttcatgtttatatctcattaagttgagagttttaaaaataaaaacgattacaataattaagatgcattctaatttgttaaatatgtttttcaaagctgactttctattctgtcatttaaactattgggaagcattttgaaattactgatttttaaaaacggttttagaaaattttaaatatatgttacataatacattttaatatgttattaagcaatattcttaagtaaaggatattcacatactgaagaatgtaaatatgtcctttttttctttataaattctattttaaagcctttgttgcaatgagggttgtttaagctgttagcttttatgtttcctttgtatctttcagatattatttgatttttttaactgttaattttattttagtattaccatttttctttctcttactactgttcatctgatcttcagattctaatctcaaccttccccttctgattttaatctttggactttttttttttttaaaaatgaatttattagcaaactgttcattctttaactgttaaattttctaagcattggctaatagtatgtttttgcaaaatatttctttcaaggtcatatgcaaacacagagctctccttttgctcggggaaatgtatttggtgagcctccaactgaacttcagattaaacagcaagaattatacaagaattttcttcgtttccaggtgaaatgctatttgatcagtttcaaagtttcatgagattttaataaacaaaacttgcaaagattttctccaggataaatactaaattctaaaatgccatactgttatctaaaatatctaatttatatcagatcagatatcagtagtacaaaagttatttcatttcaaggaaataaacagatgtattaagtatagtagttgacttaatcttttattttattaaataattaattttttttatttttttgagacggagtcttgctctgtctacccaggctagggtgtagtggtgagatcttcgctcactgcaacctccgcctcctggctttaagtgattctcctgcctcagcctcctgagtagctgggactacaggtgcctgccaccacgcccggctaattttttgtatttttagtggagacagggtttcaccgtattagccaggatggtcttgatctcctgacctcgtgatctgcctaccttggcctctcaaagtgctgggattacaggcgtgagccgccacacctgaccaatttttgtatttttaatagagacgggatgtcaccatcttggccaggctggtctcgaactactgacctcaagtgatctgcctgctttggtcccccgaagtgctgggattacaggtgtaagccaccacgcccagcctaagtcattaattttaaatcaaagaatgctgagattttaaaaactgatttactaatatattcatctattaggcagagaatgcatctttctagatatttgtaagttattagaaaatcaatagattttttccaaatgatttgatattattacagattgtaaataaataaaaattagatttaagataatcacagtttacaattatttgccccatttatgtacataagtaaatggcatttaacatagtagaactgcccagactattcgcaaaggaagacacttgaacatccagtgtttatgaagcaaacagacttactcccatactgggggtaccctgggctgagtcctagggatggagcctgagatgaatgtgagatacttgctcatgagggactcacagtttcttctttccctacctccctccccttcacactcacacttagataccagtgtcagattaatcttatggcctggttaatcctcctttgatatgacttttcacctgctattcttctttactcaaaatctggtggtagcttttctttgcctacagaaattatctcaactcttgaacctaacatttaaggttttataatctaattccaaactcttaaatagatgccctcaaacatatcttctttttaatcctaattattcttgactcttaaataaggcagtgacgtaatggatatagcctttaaggatgattgatattaggctgggtgtggtggctcacacctctaatgccagcactttgggaggccaaggtgggcagatctcttgagcacaggagtttgagactagcctgggcaacatgatgaaaccccatttctacaaaaaattagccaggcattgtagtgtgtgcctgtcaccccagctactcgggaggctgaggtgggaggattgcttgagcccaggaggcaaaggttgcagtgagccaagatatgccactttattcttgcctgggtgacagagtgaaaaaaggatgattgatgtgacatcactgtttaagatacaataatagaggattaaaaagagtggaagcagggatattttactagtgtgggtgacagtggaaatgggtggaaagtgctttttaaggttcagcagaaacaatatagatattaaatgtgagaaactggtatcagaggtcccaatattgtgcactcaagtcaggtagcagcaagttgagggttcagagtccctgttgaacgtaaaggaccgtgtggtatattgaccatgacagcaggtcataatttaagtacctcctctaatgcttagcagttcttatcatggtctaaggtagaattcagccaaaaaacaatcttacaattgtatagacttttattgtttttgagatacttttacatatagtgtctcatcaaacctcagatttctctgagagaggttttattatctctgtttaataacatacaactaatacacagactaacaggcttgcccagggtgtcacagctagcaaattgtgaggccattgcttgaacccaagtctccagacttcaagtgtaatatctatggatatcagacttctatttataggattcactaggaagtctttacctctagaaaaagtatggtaatgggggaagctttaactattttagtttcaaccttcagttcttccaccctgtcaaccctcaatttatctgtgaatggattgctttcagatgatgattttttaatttttctttcagcagcctcttcaaaatctcttctcccacctcaaacaaaacctaatatgtaattctaagaaaatgtaaaatagatcaatggtatttattattactgtcaacaatataatgtcagataaaaagtatccaaaacttttgttaaaaaaaatattatgaaatgttcaaatctgtgcacaaagatggtaagaaattagcctgaggtctgtacaagtaagttccacagttagctcaagttaatgcatcagaagtcttcatgctgttaaaatttggtgaatattaataacacttgtgaatgtttgacatttttaaccacagctttaaaaatagttaacaaataaaatatttttaagaactctgaagcatttttgtgttatgtaattggaaaaccatgacaggaagatagctttccctgctttccagaccagaaacctgttgaacaactgtctagcattcctgttggcactgagctttggatccattaggtgtatgatccattaatagcttaaaaattggtattctttgattttgatggaaaagtgacccctgtgaatgtgatttttttttccatggagtaggaagaagggggaattgagtattgaatatgaaattttgatgaattataaatgatgttttctttaggcatattggacttgaagaagtgattgcatgcaaattgctaactaaaagtactaaatattaggcttatgcatatttaataatgttgtgagaaagaagtgttggaaaaagccctagtatataaaatcataggatgtgttagaagattaaagttcttttttttttttaaagacagagtctcattctgtcgcccaggctggagtgcagtggtgcaatctcggctcactgcaacctctgcctcctgggttcaagtgattctcctgtctcagcctcctgagtagctgggattacaggcacacaccaccacgcctggctaatttttgtatttttagtagagacggggttacaccatgttggccaggctggtttcgaactcctgacctcaggtgagccaccgcgcctggccagattaaagttcttgtagctcaaaaattaatagcactagatagagcaaccttgaagctagaggaagtacagacaagaaaaacaaaaatatgctgagtagtatgatccatacctaaggataactaaaatctgttgataactttaaaccagagacatgaatacctggttcccatgctgctgttcttccctgcctcattcatcgggcgtgtggactatctatctcttagggccttctttccttcaaatcttaggctctagagtactcaacgctgcagactccaggtagcattcaagatgaaacttaattgtgagtccttgtgacctaaatcctcctccacctaatagttttagttctttctccattaacctctatagttaggaaataacaaagggcatttgggagaaatggctcttgcattaaaaaatgattgaatactaaaatactaatttcactgttattttagaataatcaattccaagaattttgacacataatagcagcaatcactatagaataatataatcatgaattagttgcttagaaccttctatataggaggacttttatgttccttacattgtttcactttaattctttaagcactcctttgagatgtaggcgttaataactgtgtttaccagaaaaaagagaaaactgaggacaagcaagtttcttaaggtcacacggtctgtttggtggaactggaatttaactcaaagcttttaacagtacagtaaatcatgtagcctccctgaaaatacaggagactgaaaaatttaggaacatgcaaaaagagggtacaagtgttgagtttatatactatcaggaaaaaaataagtgatattctaacttttcaatagttttacaagataaataactaagtttaattctttagattgaggaaaagaaacaaagagaggaagcagagcgagagagactgagaattgcagaagaaaaagaagaaagacggcttgcagaacagagggcacgaattcagcaggagtatgaagaggaacaggaaaagaaaagagagaaagaggaggaggtacatcttttttccctattgtattttactacttagtctgaaggtgaaatctttgacttgaaaaggtatttcttacttataaaggagaacagtgttggagtacatttagaaaatatcagatcaatatacattctttggatattattttattaaggtgaaagggtaatttaagaaaggagataagtgatgactttaaaaatatagatgtaggctgactgaagactttataaaagatgcctaatattttatttttaagcagacaacttatgttaaagaacaccatatcatgtcatctatatctttatctcattttatcagataaataaggcagcacatttttgaatgtactatagaaggaatatatggaatgcatatttctctttttattttaaagcaaaggctaaaaaatgaagagcatattcggttagctgaagaaagacaaaaagaagcagaaagaaagaagaaagaagaagaagaaaaatataacctgcaacttcagcactactgtgaaagagacaatttgattggggaagaaacaaaggtaagtttcagacaaaaatgtcaatcaaacccatagtttaactcactttcactgtgagagttgtacagttgttagaaaaggggagaaagaggaggaggtgcttttgttcctgttctgtcttactgtttagtctgggcacaatgtactgaactttctgtaggaggtactgtcactgtgctttgttggtattttctgtccattgaaggtaatggatttacttacttgagccattcttagtctcattcccatggtgtatgcggtgccacccaagaatatggtctgcagacagtacaacatgaactgtttgttatggttcatgacaagactaatacagaaagtgagagtggtttatatatatatatatatgtattctttttttttttttttttttttttttttttgagacataatctcgctctgttgcccaggctctggagtgcagtggcacaattttggctcactgcacctccacttcctgggttcaagcagttctcctgcctcagcctctcaagtagctgggactacaggcacacgccatcatgcccagctaatttttgtatttttagcagagacggggtttcaccatgttggccagactggtctcaaactcctgacctcagatgatccacccacctctgcctcccagagtgctgagattacaggagtgagccaccacgcccggccttctctctctttctttctttctttctttctttttctttctttctttctttctttctttctttctttctttctttctttctttctttctttctttctttctttcctttccttccttccttccttccttccttccttctttcttttcttttcttttcttttcttttcttttcttttcttttcttttcttttcttttcttttcttttcttttctttttctttttctttttctttctttttgttttaagagaccaggtcttgctatgttgcccaggctgatctcaaatttttgggctcaagttatcctcctgcctcagcctcccaaagtggtgggattgcaggtgtgagccaccacaccctgcctcacagataattttttattgtaaaattcatcatttaagaatttaaggtcgaggcaggcggatcacttgaggccaggagatcgagaccagcctgggcaacatggtgaaaccccgtctctataacaaatacaaaaattagctgggcgtggtggcaggcacctgtagtcccagctactcaggaggctgaggcaagagaatcgcctgaacttgggaggcggaggttgcagtgagccgtgactgcactgtggcactccagcctgggtgacagagcgagactccatctcaaaaaaaaaaaaaaaagaattaaacagaattgttagtttcccataattatatttcttgtaatttcttatgttttttaaaaatgctattttttaaggaatatatacttttatgatattataatttaattgtaaagtaccataaagttttaaatcagctttatcccatttaatgcatttgcctttctgaaattaacattgctatcattttctttcatttatgtatgtctgatatatatatatatttttgtctattccttcagttttacctttgtgtcaccatattttttatttagttagcttctatctttagtttgttgaatttttaaaatcctaatctgagttataatctttttatttttatttatttatttatttatttagaaatagagactcgctttgttgcccaggctggagtgcagtggtgcaatctcggctcactgcaacttccgcctcccaggttcaagtgattctcctgccctagcctccccagtagctggaattacaggtgcaaactaccacacctggctaatttttattagagacggggtttcaccatgttggccaggctggtcttgaactcctgtcctcaggtgacctgcctgcttggcctcccaaagtgctgggattatagacatgagccactgcacctggcctaatcttttaaaatagggatatctaaatccatttatgtttatcaaaactaatgtctttgcattaattgcatttctgacttttttgtgtttttcttccttgatagctttttggtcttttgttatgtgtactatggcttgtttgctccatcctctacagggatttagaatgtctatgttgtatttacaatgaagtttttggactataaggtttaatacactataaactgaaatatagaaccccatcgtgatcttgaaaagtccctcatccatgatgctgttagtgattagatctagattttcgaggttgatttgtattgctttccagaaggattttgttatttaatttttttgtattgtcatggtacctttttattattaaagatgattctttagttttgttatattttttcttttttgttgctttacttgtgtttgttgattttttaaatcctaatctgacagtcatactgttttaataaagatgtctaaatccatttatgtttatcataaccaacatgtttgatcttatgtaattgaatttctgacttttgtagaaagcattttattaaataaaagcaataacaatctaaacttcttagatgactttcttaactataaggggtgtgtgtgtgtgtatatatgtgtgtgagtgtgatgaagcaaatatgctcttaaattttttaaatttttcagcacatgagacagccttctcctatagttcctgctcttcagaacaaaattgcaagcaaactccaaagacctccttcagttgacagcatcatacgttcctttattcatgtatgtacttttgtttttatttgttcatcctagctcagttattttggattgggggatcgaatgaaattttctttttcattatatttggataggttaaattttttcagatctgaaatataggtgatatctacagtaatttgcctgctgcttcgattgtaactgatagtgcttggtgccctaaagtttcttttgacaaaccataatttagcccctcaagctaggtagctgtagatatgctcattgagtctgttatactttagattgaactacaaggaaaagagaacatggaaaatgttctaagattgatcctcaaggtgatgcttgaagaatatgcaggaatttgccttgaagaggagggtgagggattatcagcttgtggaaagtcgtggagagcaatgtaagctcatggcacatgtggagaatcttccatggtgtggtctggcctgatgatgcttgtgcattaaggcagcagaggaggtggaggtcagaacatgtgtggcatgctgtacggagtgctaagagctttgattttgttccataggctggtagattccagacaggctaattagcagaaggtaaagaaatgtgtcagaagaacatgtttctgaattccaccctttgagattctgatttagtaggtctgtggtagataatgcataggaattcattgtaatatttaagtaggggaatgacatggccacttttgtataatgtttttttaggcaatggtgtggagataagttttggaggtggggcaagactaaacatggagataagatgcttttgcacaagtccagatgtgagactgaggacccaaacaaaggcagtgacaccaagaactgtgaaggtgtgacagctttatgatacatttaagagacatagtagtactatttgttgagtgtgtggtgggtaggagtctatgataactttcaagtttttggtgagggttacatagagtaggcagttgaaaatatgaattgtggcagcagaatgagttctggactcgatttgtagttctggacgccatcaacatattggtgcttgttaaattagtgccattgtctacgatgagtgtctacaagagaagtaaaggaggctgagaatagaatactgggaaattaccaacatttgagaagcagtgaaaggaatggacagagggtgagagaggatggcagtgacggcagttgcgactggccaagtaaaatgcccactgaatgtgtcacttgggggtcacttgatgactttggtgaaggcagtattgttggagtgatgggtgtgaaagcaaaggccatagctgtgtgttgagaagtgaatgagagtaggcagtagacccaaaagtactgcatttactgttctttaaggaagctcagctgtgaagggaaggacagaatggacaggagacagtgagcaatgaaggatgaggtaaaatttttttttaagaaagggagaggtttttacacataggctgagaggaaggtgcttggagagaggaagttggaaaaaagaataatcggaggagaatgggagtcaattatcagatacagagtacaggtgaagggattctgtttgggtagaggcaaggacacttccatcgtgatgagaaggaagaatagatttacatggtagatacactctagaatagatataaaaggtggatatactctaccttgggtagagtatagctgggtaagttttggaggtaggatagtgtggagtttggtttcctttacatataaatacttcaaaaaattactcccttcaagcttctgtgtagggaagacatactgaacatgtctttgtcattattgttgaacaggaaagttccatgtccagggcacagtcacccccggtacctgccaggaaaaatcagctccgtgcagaaggtagagttaactactaaacctgttacctagagtatttctctttttaacttttcattttgaaataattataaactcatagaaaattgcagaaacagtatagagcggttaggtgctgtgtacccattctccaactttcccctggggtaacatcttagatagtatagtctcatagccaggaagtggacattgatgtggtccacagaccatcagattttaccagtttttacatgcatttatgtatgtgtatttctgtgcatttttatcatgcacagtttgtgcgactaccactgcaatcaagatacagaactgttccatcaccgtaaaggaacttccttgggcctctcctttatagttgcactcccccaagaatatcgcttctgaaattcctatattataaaaaatgtacttgtgggtcctaatgacgttcacaattatgatccatgtatgtgtgtatatataaaatgttaaaatatctttcataaaattgtctctctgagcagtttcactttattattagtcaggttgtgttttaatgtttagtcttttgttcttattcctgtcttgtgttttacttatcaatgggaatttgcagaggagaaaaaaaatgtaattatggaattatcagaaatgagaaaacagcttcgtagtgaagagaggcgtctacaagagcgattgctacacatggacagtgatgatgaaattcctatcaggcaagtttagaattgcagtttttgtgttcgcttgagttcttttatcttacttcacctatccagtaattttgtagtttgggaacaggactaattcatcttacttaaaatctccttactttccttttctttgtcttttacaaaatcagctgtagaaatttagttctcaaggggattcatgtaggaatggaaatttccgggttggaataattacagacagtagttgcattttagaactgttttttatattttccattaataacgtagctttctgaaatactttttttcaacaaaatcacgtacgggctaccgaacatttctgatcatttttgccaggagtcataaatttcatgaagcagtgttcttcaaacttcagtttgcactgttttagtaggttgtaaaatcaacatagtgggtaactaccacattttctttctttctctttttaaaaataaactttctattttggggtaattttgattataaaaaagttgcaggctgggtgcagttgctcacgcctgtaatcccagcacttttgggaggccaaggtgggcggatcacgaggtcaggagatcgagaccatcctgtctaacacagtgaaaccccgtctctactaaaaatacaaaaaattaactgggtgtggtggcacgcccctgtggtcccagctactcaggaggctgaggcaggagaatggcgtgaacccaggaggcggaggttgcagtgagccgagatcacaccactgcactccagcctaggtgacagagtgagactctgtctcacgaagaaaagttgcaaacaatacagagagtttctgtacacccttcatccagttttccctattgttaacatcttatattaccatggtatgtttgtcacaactcagaggctgacattagaacattactatgaactaaatttgagactctttggatttctccagttttctactaatgttctccttctgttcatgggccccatacaagatgtaccacattgcatttagttgtcatgtctcccagtctcctcgggtctgggacagtttaccagtcttctgttgtttttcttgtgaaagtctagatgggcactggccaggtatcctgtagaatgcctcctcctccagtctggatttgactgatgttttctgatgattagactgggattaagggtttctggaaagaagagcacaggcattgttctgacatcacatcatcacattgtatcaggggtacatgatatccacatgatacctctggaaatgttaaccttggttaaagtagtgtttgccaggattctccactagaaagttaactattctttggtcacaaatgactaaatctagcgcacctgcaagagtgagaagggggtggaattaagcttcatctcttggagcaggggttacctatatacagtttttagaattcttccataagaaagacttgtgtcttcttccatttatttatttattcaatcgtttatttattactgtcatctcatgtatatttatcatatactttgggttataagccagtgctacattattttatttcacaaattgttccaactttggccattgggagctctttcaggttggctcccgtgtctctttgacatgtccccatccttttgttttttgaagacttctttccagatgcctcaggatcatcttgtatttcccctgccccatccctagaatcagctatttctccaaggagccctggttccttttggagaatgtatttagaaaccagataagctgggtctgcttattgctgggtgtcactgcttctaggccctctggataatatatgtatgttatactaagtcataaatataaacatatctataattgttcctatgtctatttgtatacatattaagtttatgctgatgtctgactgtaatccagtatgtggtaggattttaacatagcacgttaatttgactacttatggtttgtttagatttttgtttgtattctccaggaatattgaaacaaggtaaacaaggtgaggaaatttcaaggtacagattggcttgataatgaaatgttaatccaaggtggtaattttcagtgattcaataattctcccatagtaggtcaatacgttccaagcaattgagaggtagtgttttttttctatatttacttttacagtgttataaatgccttaactgtgcagctttccaacttctaaacatgcatatttaattcagtttaacggtttttttttttttttaattgatcattcttgggtgtttctcgcagagggggattttgtagggtcataggacaatagtggagggaaggtcagcagataaacaagtgaacacaggtctctggttttcctaggcagaggaccctgcggccttccgcagtgtttgtgtccctgggtacttgagattagggagtggtgatgactcttaaccagcatgctgccttcaagcatctgtttaacaaagcacatcttgcaccgcccttaatccatttaaccctgagtggacacagcacatgtttcagagagcaccgggttgggggtaaggtcatagatcaacagcatcccaaggcagaagaatttttcttagtacagaacaaaatggagtctcctatgtctacttctttctacacagacacagcaacaatctgatttctgtatcttttccccacatttcccccttttctatttgacaaaaccgcaatcatcatcatggcccgttctcaatgagctgttgggtacacctcccagacggggtggcggctgggcagaggggctcctcacttcccagaaggggcggccgggcagaggcacccccacctcccggatggggcggcggctgggcggaggctgccccccacctcccacccggacggggcagctggccgggcgggggctgccccccacctccctcctggacggggcggctggccgggcgggggctgccccccacctcccggatggggcggctgctgggcggaggggctcctcacttcccagacggggcagctgccgggcggaggggctcctcacttctcagacggggcggctgctgggcggaggggctcctcacttctcagacggggcagctgccgggcggaggggctcctcacttctcagacagggcggccgggcagagacgctcctcacctcccagacagggttgcggccgggcagaggcgctcctcacatcccagatggggtggcggggcagaggcgctccccacatctcagacgatgggcagccgggcagagacgctcctcacttcctaaacgggatggcggctgggaagaggtgctcctcacttcccagactgggcagccgggcagaggggctcctcacatcccagacgatgggtggccaggcagagatgctcctcacttcccagacggggtggcggccgggcagaggctgcaatcttggcactttgggaggccaaggcaggcggctgggaggtggaggttgtagccagccgagatcacgccactgcattccagcctgggcaacattgagcactgagtgaacgagactccgtctgcaatcccggcacctcgggaggccgaggctggcagatcactcgtggttaggagctggagaccagcctggccaacacagcgaaaccccgtttccaccaaaaaagtacgaaaactagtcaggcgtggtggcgcgcgcctataatcgcaggcacttggcaggctgaggcaggagaatcaggcagggaggttgcagtgagccgagatggcagcagtacagtccagcttcggctcggcatcagagggagaccgtggaaagagagggagagggaggccgtgggggagacgggagagggggagggggagggggagagggagagggagacctaacggttttttgacattaatttttcttttcattaataaattcttttggcaagccaatatgatttaagaaagagtactcgagcagcgcctcaattttctcgcttgaaaattatacatgataatttctaccctttgagaatctagtgaagaataaataaatgtatgtatttgaaataaataaataaatatatgtatttgtgactcttaagttctaacttaagttataaaacatgttacatttatcatcatttagcaagaattggttaaatacatttactttggaataattttaatacatattctgattaaagacatctcagagttggttctttattgcaatttcatgaatatatgtacaaaaggaatcttgtattcactaaataatttgccatattcaactcctattatgtgctaggctcaaaacaaatgtgatgtggctcacatgtgaagatttagtaacctacttcctaacttatcagtgtataactattagcattaatggaaactagacagcagtccaatttaatggtctcttggatgtctttttagtattttgcattatagtaaatctccatagagttcctttcaccttaagtattagaggtctctgtcagccttgaccagagtcattttgtggccccagtgaatgctcccctgcaaaagggaaactccattagagcaggggcattgtctgtggggatcccagctatcttgtcttggtgcttagggaagatttaatgataaagaaatgatgggaggagtctgactaagcctcataatgaccatagcttagagctccattttcaaaaatagaggagacctagtgctgactgaagcagcagtaggtattttattttattttattttattttcaggactagaaacaccatccctcttttatcatcactccctcaaagccctggcagaaaacacccttactacctgctatctattaatttcttaggtaccacaggaatcagttaactagttaggttatcaagttccttgtaaagtccattgtaaagttaatgttgggtcctctgaataatgcccatattgaactacgtattagtaccatatttctgtttttatttttatttttttgagacggagtctcgctctgtcacccaggctggaggcatgatcttcggctcactgcaacctctgcctcccgggttcaagtgtttctcctgcctcagcctcctgagtagctgggattacaagtgcccacccccacgcacggctaatttttgtatttttagtagagacagggtttcaccatgttggtcaggctggtctcaaattcttgacctcaggtgatccacccgcctcggcctcccaaagtgctgggattacaggtgtgagccaccgtgcccggccagtaccatatttctttttatatttttggagacagagtctctttctgtcacctaggctggagtgcagtggcatgatcttggctcacagcaacctccgcctcctgattcaagtgattctagtgcctcagcctcccaagtaggtgggactacaggtgcaggctaccacacctgctaatttttgcattttttagtagagacgtggtttttccatattgcccaggctggtctcgaactcctgagttcaagcaatacgtcggcttctcaaagtgctgggattataggcgtgagccacagggccctgcctattaccatatttctatgtgtgatttgtgtcttaggctgaggggaaggtaatttattgattatctaatgcatgtcaggtactatactaggtacttaacagtatagcatttatctcaattctgaccggatatggtggctcacccctgtaatcccagcactttgggagactgaggcggatggatcacctgaggtcaggagttcgagaccagcctgaccaacgtggcaaaatcctgtctctactaaaaatacaaaaaaaaaaaaaaaaattagccgagtgtggtggtgcgtgcctgtagtcccagctacttgggaggctgaggcaggagaattgcttgaactgggaagtggaggttgcagtgagctgagattgtgccactgcattccagcctgggcaacagagcaggactctttcaaaaaaaaatttttttatcttaattctgttgttcaccgtaagactataaggggtagacatctgcattttacagatgatggaatcgaggtcaaactgctaataaataacagagctggtctttgaatctcagtttctctgacctcaaagactgtgatcttcatactccatgaacattttattttattttttccatgaacattttaaagtaaggctgaatcattctattgtaataaggtatcttgcatctgaggattttgaaaaatttcaataacgttataaatatgctatattttaaggtaaaggatggaactaatagagctgttcgaataatttatttatttatttatttttgagacggcttcttgctctgtcacccaggctggagtgcagttgcactatctcggctcactgcaagctccacctccttggttcacgccgttctcctgcctcagcctcctgagtagctgggactacaggcatgcgccaccccacccggctaattttttgtatttttagtagagatggggtttcaccgtgttagccaggatggtcttgatctcctgacctcgtgatccgcccgcctcggcctcccaaagtgctgggattacaggcatgagctactgtgcccggccaattttttttttttttttaagagacggggggccgggtgcagtggctcatgcacgcctgtaatcccagcactttgggaggccgaggtgagcagatcacgaggtcaagagatagagaccgtcctggccaacatggtgaaaccccatctttactaaaaatacagaaaaatcagctgggcctagtggtgcacgcctgtagtcccagctactcaggaggctgaggcaggagaattgcttaaacccgggaggaggaggctgcagtgagctgagatcacgccactgcactccagcctggcaagagagcgagactccacctcaaaaaaagagacagggtctccctctgttgtccaggctggagtgcagtggcatgatcacagcttattgtagccttggcctcctgggctcaatcaatcctctcatctcagcagtagccaggactacaggcacacactatcatgcttgactaattttgttgttgttgttgagatggaatcttgctctgtcacccaagctggagtgcagtggcgtgatcttggctcaccacagcctcctcctcctgggttcaagcaattctcatgcctcagcctcccgagtaggtggtactacaggcacacaccaccacgcccaactaatatttgtatttttagtagagacagggtttcaccattttggccaggctggtctcaaactcctgacctcaggtgatttgcctgccttggcctcccaaagtgctgggattacaggtgtgagccaccatgcctggccaacttttttttcttttttgagatggagtcttgctctgtcacccaggccggagtgcagtggtgtgatctcagctcactgcaacctccacctcttgggttcaagtgattctgctgcctcagcctcccgagtagctgggactacaggtgtgcgccatcacacccagctaatttttgtatttttagtagacatggggtttctccacgttggcccagtctggtctcgaactcctgacctcaggtgatccacctgtcttggcctcccaaagtgctgggattataggcatgagacaccatgcctggcctcataattttttttttttttttttttttgtagcgagggggtcttgctttataggccaggctggtattgaactcctgatttcaagcagtcctcctgtctgcctcccaaagtgctgggattacaagtgtgagccacagcacctgtcctagagtaattttttaataatatgatgtggtgaaaaagaccaaatttcttttacagtgaattagatgtgaactcacctatttttcctgtgaagcacatattatgatttgtcatttatctataggaaaaaggaaaggaatcccatggatatatttgatatggctagacatcggttgcaagctcctgtcagaagacagtcccctaagggcttagacgctgccacttttcagaatgttcatgattttaatgagctgaaagatagaggtgagtagattgctgctcttttaaagatgtagcagaagtgttctacccatatttaaatatctataaagatctttgtaccctttttctaaagtggaattttatctatggtatgtattttagttaaaatgaaatgaaacttatgtattctctaggtcttcagttaaccagtctggtagatgaagctttagtttgactaactgctttcttttggagagcatacagtgttaaagtctggaatggatgagatcgcatagactagtacgaagaatggaacttggcatttaatggaggatggacagacaaagatgagctcatgaaaaatactgaggagaagccagagagactggaggagaagcaggagaatgtaggatcctgaaacctgaggggaaggagtatcaaggagacaggatcatgtaaggtgaataccggaaaatgtcagttggatgaggtcattggtgacctcagctagagctttttaagtggaatgattgccgattaactttggaatgaggattgactaggaggcaagatgttggagacaataggcataagacttttagaagacccttggctgggaaagggaagggaaggagagggatcaggagctggaagagtccttagaatgtgaacgtgaggagctatgcaggagaaagaggttcaggctctaggagagggagagtgattgttgaagtgaaatctaggggatttgagggaagagttaggagaagctttgatgtagccacttagggctaatggaagagaaagtttagtaaggaaacgagatttccagggtacatgaggcctgggagatggagaatgtgtggaggaaccaaatgtgtgttgtgtaattttcctttaggcatattcagcagagcaggtgttggagcagaaggggcagattatgggatgtgtggtcgtatgacgtaggccagaaaactggaatttaggctttttatccttttgaaaatactatctgtttattatagcaaattttcaaaatacagaaagatagtaagaaggaaaaatcactttagtcaaactacctatatgtaagtaccattatcattttggatgttttctagtctttctgagcataattaaaagaaaaaaaaagataaattgtgttatttatttaattttctctattgtttttcacctagatttacacgtattatcaattacgtatactgttattttttatgctatcaaatattgattacttactatctgccaggcattgtgttaacccagtgggtctcatgaggagtttggtctgaagtcaaaactgtttgtattataaactaagacattatttgtctttttcattctcattctctcatgtgtatatagattggccagagactacatgacatgtaatgatttcatctctttgaagctagcaaaatgtgtccttgtgtattcttgtgttttaggaatctcttagttttaatttctaatatggcgtgtgtgtgtgtgacatacataagtaaagctctttggggtcctcaatttttaagagtgtaaaaaagatcttgagaccaaaaaggtttaagccatagaattgggctgttcatttccctgtgttactacatcttgccctcattcacccatgacttggtggttggtattgtttttttaatgagtttggaagcagtgaagccagggaccaatccaagtttatgtgtccagaaacttctgttaacttctgaaaatggctgttaaccattttcactattttgttcttttgataatttctgatcataaagctttatacatatttaggaccataaaactacatatatatttaggatcatttctttatattccagcagtgtaattagtgagtcaaagggaataatattttcaaggctttttatatgtatgaactgtatgtttcttctcaagattaaaaaatttttattcttggccaggcacagtggctaatgcctgtaatcccagcactttgagaggccgaggcgtgtggatcacgaggtcaggagttcaagaccagcctggccaacatagtgaaacctcgtctctactaaaaactacaagaaaaattagccgggcatagtggtgggtgcttgtagtcccagctacttgggagactgaggcaggagaatggcatgaacccaggaggcagagctggcagtgagccaagaccgtgccactgcactccagcctgggcgacagagcaagactccgtctcaagaaaaaaaaaaaaaaagaaatggcattccccctcaagttccagccagtctacatttatcttgctttctgcatgatatttgtaaggactaaaatattaattggccagtaacattattttttcacgtttccagtatattttagagatcagccgtgattacagtgtctcatggctgccttagtcatagccatgtgaccatctgcttggatatacctgcacgtagtctgtgttctgggtggcatcctggcagggctaggacaggtagagatggacaatgcaacatccactgcttgttctggggtattccttatgttggtaagtttgtgaaaagacacttattaaagaatattaatttcatattctttagttttgtggctattttactgtcctttgactttagtgatgtttcactatttctatcatttccttgattttgaaattaggttactcatgttacttacagtgaagttttacaaaatcccatttgaaaacaacatttaacttagttatataacatattttttataccagattcagaaacacgagttgatctgaaatttatgtacctggatcctccaagagatcatcacaccttagagattcagcagcaagccctgctaagagagcagcagaagaggctgaacagaataaaaatgcaggaaggtgccaaaggtaagaaataatcattgctgtgtcaaatagtatcagcacgctgtttttccgtaggctttctgcatctcttctattgatttcattcccaggcatcctcctttcactggcagccccatgctcacagggtccgtttggtctgtagtaccagaaaagaacaagtatgagagagagctctgagtggctccactagggtggtgtattcatgcatgagaggggcccagtcattcactgtagccaggaggactgaatactttgaccaggccaggtgacgtctgcatcaggaactaggaaccaaaggaaggagtgtcaggcagacatatcagtgccctgtcatgatgtgtcgggcatttgcctactgtgccatgtcaggcatttgtctactgtggtgtgagtgtgtttaagttttgatgtggcgtaaaatctgtaaagcatcagactggactatgaatatgttttcgtataatcaactaactgaaagatacttagtggttactaggagtgcaggtactggcctatatccaggggatatggtgatgagtgacatatgctgctgctcttgaggaggttatattttgttggagaagtgtgatgctaaagaagtacaactgtgatgaatatcgcacagaagaaatctaggatgctgttgggttggggtgggtgggcacctagaagcagagtggggctagttgtctcagagagcactgatgggccctgacgatagccaggtgtactgcatggccttcccatctgtatttcaccagccttcaggccatcgaggttaaccatggaaaatgagtaatgaaaacccaacaatcagataacaagagtggaagggatgctcctgctagttatttttaagaaaagttaagaccctatcttgggaggctggtctggcttgcagaatctgaggaagattttttgacttcatgagatagcatcacaggagtaagtgatgcagcagtttaggcccagatcataggtcaagacttcaataaacatttgtatagggattgtcgtcccttcatctggtacagaatttttaataacagcctcatagccctgtgacagaataagcctaattctaggataagcagtaggtatatcatctggagagaggagagaagcaagtgcattcttcaacctttgtacccagtctggtggcatttttctttagtctcaaaatgaagatctgatcttgtgggattttggcagcttagactgattagcccacaagtagtccccatgtggatacaggtacattttagcactgaaggtatctatctcccacagcagccactccccaacttccagtagacactatgaagacctaattcataggaatatgacctcactggccaggcgtggtggctcacacctgtaatcccagcgctttgggaggctgaagtgggcggatcatgaggtcaggagttcaagaccagtctggccaacatagtgaaacccccgtctctactaaaaatacagaaattagctgggcatggaggcgtgtgcctgtagtcccagctactccggagcctgagtcaggagaattgcttgaacccaggaggtggaggttgcagagagccaagatcgtgccactgcactccagcttgggcaacagagtgagacttagtctcaaaaaaaaaaaaaaaaaaaaaaagaatatggcctcactataaacaatcacaaacatgtctattaaaatatctgagaaggaatacaggctatcattcgcagcttgtttattttcaaaggcagtatctaaaaagggcaaaatgtactattcacaggaacacataggaaggctggtcatattggagaggctttgggatacctgatccaagatctttgcctctggaactaagtgcctggaattgagcttatttcagttccatgtgagggagcccctgtttaactccatgcaacaactttctacagattgtagaaatctgacaagatggtgaaggatcctgcattgatcattttctttttctgttggcattagttttacatttgcaatgattttacttgttatgttcattcatgtgaatgggagaattttatgcagctagaatggatgcagggctatgttttttaataagtgatatctttaaaatactctgaagtgtgatagttgaaaagtaatttccagtagagagctagtcaaaaaagatattctaaaatttaatttatatagtaagcattttctgaccttttaatttgcttttgttctccattgactacagttgacttagatgccatcccaagtgctaaagtacgagagcaaagaatggtaagcaaccagttacaatttttcaagttagtttttgggggattaaaaatctttaggcatatgatgatcaagtaattcaaattttgaattattcaggaatattgaattaagaacgtaagtcttatcagtaaagtggatagcttgagaagtgttagtgtaatatatatagaaaacatattgtaatggctaagaacaagattctagcactaggctgttccagtgagtctatttttagctgcgtgacttagggcaagttatttaatctctttatgcctcagcttcctaatctgtaaaatgaggataatagtacataaattaatatttgcaaggtacttagagacaggcctggcatataagttttatgtaagtgtttattaaataaataaaaatagctcaagtgctgttgtgagaactgagataatatattaaaagcccttacagcagtcctggcccattatgagtgcagtgtgagtgtttgctgtcattaccatgagcagtagtgggagtaggagtctgttatggaagtagtgttgaggtctacaaagaaaataagcaaaggaagggaacagagaatgataacacccacctgtatcctgaggggggtactttttgtgcaagactgaataaagggacaggatgagctcttttcaatcaacaaatatttattatttcctatggacaagaaactgttctaggtgccggggtataggagtaaacaaaagggacaaaaatccctgtcctgtgacaggttacattccagaaggagggagagacagtaatcaaataaatcaatagttttttgaatcatggtgctgtggagaagacaacagcagagaaggcagctggaggatcctgggtgggagggtttatagttggaaatacagtgggcatgggggctcactgggtaggcaacatttgagtaaggacatcagggaggtgtctatgggaaatgtgggggaacttctggaggaagaacattccaggaagaggccccagtggaagttggcctagtgcatgtaaggagcagtgggagagccatgagcaagggccagttgggcacatggggcagggggtgacgaggggaggcagcagggccttgggggccattctgggactttgcctttgacacttgtgcatgtgatgggaagctgccaaggtctttaagtggaggagtgacatgatctgcttgaggtttttacttgatccactgactgctgtgcattttgactgagtgggacaggaggctattgtagtaatttaggcaagagacaagctcactttctgattaaagaatgcagtgcatcattgtaattcattgccttaaaaattaatggacagctctttgctggagtgtcctactgaagcccagattatctggtaagaaggtgcagggaggtggagttggatgactttaggttccttctgacatgttggttattattctgtactgcaaaattctctatatgtaaatttaagttttctctaatttgggagctcattataataagcccaatcttagcattttttttcgttactatactatatgctccactatatctgtgctgcatcattgtggcaattgctgtcacatagggctgtcataatctgagagtatacccctctctctcccatgacactgtgatctactccagagcagaaactcttaattcatctttgtatccccagttcctagcatgaaagaaatagtaagtgggctatacaggtttatggaaattcggatgaatgaatcttggcagtggcttaaagacttaatgtttaattggggtctttgcttcatactgtattatattttccatcagtcataatgtgatccttttatttgacttcaaccataaaggggcaggaaggagtggagctagggagtaaatgtgttagcttgtagaatctgtagcctggagagagactgtcttctgttgctatcaccgtcttcgtaggaattgtgtgtgttaaggctttccagtattttctgagcattggaatgtagtcagtcctacctctacccatcctctgcttttagggagaacagtgtggaaacttgtgcctcttcttagtataaatttgttgtttttgtacacaaaactaataaaaatagtcattgaaacatgtttcttttagcccagagatgacactagtgatttcttgaaaaactcattattggaatctgatagtgcttttattggtgagtatatttattttattaaggctatattgtttaaatattaaacctttctccacacttaaaaaccagtactgtattccttgttgtacaaggtagtaaaaaaaaaaaaaggaatattcttttttctgttttaatcagatatgccttggaaagttttcaaaatcagaattactgaaatgaactttaaaagtcttaggaatagttgacaaacctgtacatgaatgttcgtaacagcctcatttctaatgccaaatgctggaatcagcccagatgtccttcagtagatgaatggttaaaaaaactctggtacatccatgccatggaataccacttagcaataaaaaggaacaaagttttgaaacttggatgactcttcagggaaatagtctgagcaaaaaagacaatcccaataagttacatactactgtatgattcaatttacataacatttttgaaattacaaaattaagaaattgagaacagattagtggttgccaggggttgagggatagggagaggtgtatatggttataaaagggcaagaagagggatccttgtggtttgggaactgttttaacaacttgtttgcaggggtagatacatacatgtaaatgggaaataaaataataataatagatcttaatacacacataaaaacacacaaatgagtattggtaagatggtaaatttgaataagatctgtggattgtatcagtatcgatatcctggttgtgagattatacttgagttttgcaaaatgttaccattgggggaaactggacaaagtgtataaggaatctctactatttcttatacctgtgtaccttaattattttaatctatttatagttctcttaatatttcagtcaaaaaagtcataagacttttatttagtcttcagaagataagtaaaggtaccatgggatcttcttttttttttaaagtagtatacacttacgattatgtactctgatcatgagtgtttctgctatcctagggccatcagggaatgatctagtctacatattagttgtatttcaggccaattactttagattttcatgtgataaaattccaaattaacttatatttttctcttaatggttttttttttgttgttgctgtttttgagagagggtcttgctctgtcgcccaggctggagtgcagcagcacaatcattgctcactacagcctcaaattcctggactcaagtgctcctcccatctcagcctccccagtagctgggactacagcatgcaccacgatacctggttatcttttttatttttttgtagagatgaggtctccctatgttgcccaggctggtctcaaacacctggactcaagggatcctcctgcctcagcctcccaaattgctgggattacaggcatgagccactgtacctggccatttttttttttttttttttttttaatgaatttttcctttccaaggaagatgcactgcggagagaaggaaagataaaaccagcaggagacagggatgggaagattgcttgtcagggaaatgagaccttccttcctaacagtgaagatggtctgggccactcaagatggtgtgttggagtattgcatgacactagagcaaagatacagcagtatttatggttaacagtcactgcaaatgctgcataagtaagtcatggctgtgttaaccactgctctaaggaatgtaaagctgatggtttcagtgcattattttaaaaaatagggtttttaaaattgtaaaatacacataaacataacatttaccattttaaccattttaaagtgtacattgactggcattaagtatttctattgtgcaaccaccactatcatccatctccagaattcatcttgaaaatagaaactcttcatatgaaacagtaattccccattgccctctccctccagcccctggcagccaacattgtactttccatctccataaatttgactactctaggacctcatgtaagtggaatcatacagtatctatcctttgatgactggcttatttcacttcacataacatctttgaggtttatccatgttatagcatgtgtcagattttctttttttaccccttagagacagggtcacccttgccacccaggctggagtgcagtggtgtgatcatggctcactgcagccttgacctccctgtgctcagatgattctcctacctcagcctcccaagtagctgagactacaggcacacactaccatgcctgaataatttttgtattttttgtagagacagggtttcaccatgctgcccaggttggtcgcgaactcttgagcttaagtgatcctcctgcggcctcccaaagtgccaaagtgctgagattacaggtgtgagctaccacacccagccagatttcccctttttttttttatgctgtgaataatattccattgtatgtgtgtaccacgttttgtttatccaatcatctgtcagtagacacttgagttgcttccaccttttggctgttgtgaataatgctcctatgaataggtgtacaattatctgttggagtcactgctttcagttcttttgggtatacactaagagatagcatttgctagatcatatagtaattctatttttaattatttgaagactcaccacattgttttccacagcagctgtaccattttacattcctaccagcagtgcacaaaagttccgatttctctacatccttaacacttgttactttgttttttgaatagtagcaatccttacgggtgtgacgtggcatctcattgtggttttgacttacatttctgtaataattagtgatgttggacatctttacatgtgcttattgactaattgtacatcatttttgaagaaatacctatttaagacctttgctaatttttaaaatcagagtttttttgttattgagttgtgggagttctttattatctattctggatattaccccttatcagatacatgatttgcaaatgttttctgcatagtgggttgccttttcactgtgttgattgtgtcctttgatacataggagcttttaattttgatacagtccaatttatcttttcttttgttgcctgtgcttttggtgtcacatctaagacatcgttgccaaatccaataccatgaagctttcctcatatgcttgcttctaagagttttatctataggtttagctcttaatgtttagatgcctaaccacagagtgtcaaaatacatgtcagaaagcaaaagaatggcaaggagaaatagatgaatccactgttacagttggagatttttaacacctctctatcagaaatggacagagacagaaaatcagtaaggacgtagttgagttcagcaacaccatcaaccaactggatataatggatgtcgaaagacaacttcattaacaacagcagaacccatattcttctcagggtcacatggaacattcaccaggacagattacaatctgggcaagaaaacaaaccttaacagatgtaaaagaagataaatcacacaatatctgtccccagaccacaatggaaataaactagaaatcaataacagaaagatagctggaaaaatctccaaatactttggagattaaatgccacatttctaaataacgcataggtcagagaaaaaatatgaaaatacattttaaaatactttgatctaaatgaaaatgaaaatacaacttctcaatttgtaggaggtagcagaaataatgcttgtctttctttctactttcctaatgtatgcattcagttaaatgtaaaatgccaaactctaaaactcacagaagataccaacagaaaatctagacgaccttggatatggtgatgacttttagataaaaaaccaaagccacaatttatgaaagaaataattgataagccagactatgtaaaaaattgggaattttttttttttttttttttttttttttagacaaagtcttgctgttgtccccaggctggagcgtgatggcgtgatcttggctcactgcaacctccgcctcccgggttcaagcgattctcctgactcagtctcccaagtagttgggattacaggcgcctgccaccacgcctggctaatttttgtatttttagtagagacggggtttcaccgtgttggccaggctggtctcgaactcctgacctcaggtgatcccccggccttggcctcccaaagtgctgggattataggcgtgagccactgcgcccggccaaaaattggtaaatttttaaggtgcttaaatttataggattgactgtgcatacatgaagaaagtagaaagatctaaaatcagtattctaagcttccacataagaaaattagaaaataattaaatccaaagtaagcagaagaagagaaataaaaattggagcagaaatcaatgaaattgaaaacaggaaataaatagagaaaatcaatgaaaccaagagttatttctgagaagatcagtaagcctctagccaagctaataaaagagaagacacaaattactaataccagaaacagggcatatctagctgggcatggtggctcacacctgtaatcccagtactttgggaggctgaggtgggcggatcacctgaagtcaggagttcaagaccagcctggtcaacatctctactaaaaatataaagattagctgggcatggtggtgtgtgcctgtagtcccagctatctgggaggctgaggcaggagaatcacttgaaccaggaggtggaggttacagtgagctgaaatcgtgccactgcactccagcctgcatgacagagtgagattctgtctaaaaaaataataataaaaaaatataataataataataataataataaaggttggggggcatatcactacaggtcccatgaacgttaaaaacagtcggccgggcacggtggctcaagcctgtaatcccagcactttgggaggccgaggagggcggatcacaaggtcaggagattgagaccatcctggctaacacggtgaaatcatgtctctactaaaaatacaaaaaaaaaaaaaaaaaaaaaaaggtggtgggcacctataagtcccagctgctcgggaggctgaggcaggagaatggcgtgaacccgggaggcggagcttgcagtgagctgagatcgcaccactgcactccagcctgggcgacagagcaagactccgtctcaaaaaaaaaaaaacaaaaacaaacaaacaaacaaacaaaaaacacaacatagtccaagagcctggtgtgattccgttctgcatggctgttctcttgagaagtggttgtttatctccgtccaccttctttcccacctaagtgcatgccaccagccaatggaagatttgatgagccctgaggccccagaactatcttttcggttgtgaactaaaggccgacaaagattatcactttaagatggataatgatgaaaatgagcaccagttatcttaaagaacgttcagtttaggggctggtgctggtgcaaaggatgaattgcacattattgaagcagaggcaatgaattacaaaggcagtccaattaaagtaacactggcaactttgaaaatgtacagccaatggtttcccttgggggctttgaaataacatcaccagtggtctgtcggttgatgtgtgcttcagggccagtgcatattagttgacagcaattagtagctgtggaggaagatgcagagtcagaagatgaagaggaggatgtgaaactcttgaagtatatctggaaagcagtctacccctggaggtggtagcaaggttccaaagaaaaaagtaaaacttgctgctgctgaagatgatgaagatgatgatgatgagtttgatgatgaggaagctgaagaaaaagcaccagtgaagaaatctatacaagatactccagccagaaatgcataaaagtcaaatcagaatggaaaagactcaaaagcatcatcaacaccaagatcaaaaggacaagaatccttcaaaaaaacaggaaaaaactcctaaaacaccaaaaggacctagttctgtaggtcctttgcacttaaagcaaaaatgcaagcaagtataggaaaaggtggttctcttcccaaagtagaagccaagttcattaattatgtgaagaattgcttctggatgattgatcaggaggctattcaagatctctggcagtggaggaagtctctttaggaaaatagtttaaacaatttgttaaaaattttccatcatttcatttctgtaacagttgatatctggctgtcctttttataatgcagagtgagaactttccctactgtgtttgataaatgttgtccaggttccattgccaagaatgtgttgtccaaaatacctgtttagtttttaaagatgcaactccaccctttgcttggttttaaatatgtatggaatgttatgataggccatagtagtagtggtggtcagacatggaaatggtggggagacaaaaatatacatgtgaaataaacctcactgttttaaattaaaaaaaaaaaaaaaaagtccaagaataccatgaacaactctatgcccacaaatctgataacctaaagtctaccacccatttatggtaactcagcaaacttggaatagagggggaacttctgcaacttgataaagaacatctacaaaagtcctacagctaacatcataatgatgagaaactagaagctttcctgctaagatcaggatgtcctttctcaccactgattaacatcatactggaagtcctagcttaatattagcagtaaggcagaaaaggaaataaaaggtgtgattggaaagggagaaatagaattgtttttcttcacagatgacatgattgtctatagaaaatctgaaggaatcaactaaaaaatgcctggaactagtaagcagttataatcaagttgtgggatacaagatgaatatataaaagtcagtcactttacaatatgccagcaatgtacaagtgaaatttgaaattaaaaattaaaaacacaataccacttacattagcattcccccaaggaatactgaggtataaatctatctatcatctatctatctatctatctatctatctatctatctatctatctaatctatctatctagaactgcctgaggaaaactacaaaactgatgaaattgaaggactactaaataaatggagatatatttcatgaccatgcacaggatgactcagtattgtcaagatgtcaggtcttctcaacttgatctatagattcagtacaatcccaataaaaatcccagcaagttattatgtggataacaacaaactgattctaaagttcatttggaaaggcaaaagatccagaatagccagcacaatgtttaaagagaagagttggaggactctcacagctgacttcaagagttatgataaagttataataaacaagacagtgtggcattggtgaaagaacagacaaatagaccagttgaatggaatatggagcccagaaatagactcatgcagcctgggcacagtggctcacacctgtagttctggaactttgggaggctacttgaggccaggagtttgagaccagcctgggcaacaaaacaacaccttgtctctacaaaaaaaatattttaaattagccgatgtggtggcacacacctgaagtcctagctatttgggaggctgaggtgggaggattacttgagcctggaagttcaaggctgccgtgagctatgatcacgccactaaactccagcctgggcaacaaagaaagaccttgtctcaaaaaaagaaagaaatagactcacgcaaatacagtcagctgatctctgacagaggaccaaaggcagtactgacaaaggaccaaaggcagtattatgatggagaaaagatagtcttctctacaaataatgctgggacaacaggacatctgcatgtgaaaaaataaacatagatcttacgcccttcacaaaaattaactcaaagtcgatcttacatctaaatgtaaaatgctaaattgtaaaactcatagatgataacaacagaaaatctagatgaccttgggtatggtgatgacttttagatacaaaaccaaaggcacaattcataaaagaaataattgataagccggactttgtaaaaatttaaaacctgctctgctctataaaagacactgttaattaagagaatgagaagacaggacagagactgtaagaaattatttgcaaaagacatgtcagataaaggactgttatccaaaatacacaaagaaatcttaaaactcaacaataagaaaacaaaatacctgattaaaagattcagcaagacttgcaccacacatcaccatacagataacaagacaaaggatgctactgagagacaggactagctggatttcaaatctaggccgactaagaattcctaagcctagctgggaaggtgactgcacccacctttaaacacagggcttgtaactcagctcacacccaaccaatcaggtagtaaagagggctcactaaaatacaaattaggctaaagcaggaggtaaagaaatagtgaaatcatatatcgcctgagagcacagggggagggacaatgatcgggatataaaccccaggcatttgagctgggagtggcaacccgttttgggtcccctcccattgtatgggaactctattttcattctattaaatcttggaactgcatgctcttctggtccatgtttgttacggctcgagctgagctttcgcttgctgtccaccagtgctgtttgccgccgttgcagacctgccactgacttccacccctccggatctggcaggatgtcctctacacttctgatccagcggggtggcacccactgctgctcccaatcaggctaaaggcttgccattgttcctgcacggctaagtgcccgggtttgtcctaatcgagctgaacactagtcactgggttccacggttctcttctgtgacccacggcttctaatagagctttaacattcaccgcatggcccaagattccattccttggaatctgtgaggccaagaaccccaggtcagagaacaagaggcttgccgccatcttggaagcggccctccaccatcttgggagttctaagaacaaggacccgcctggtaacacattaaagaatgtaaattaaaatgagataccaccacatacctgctagaatggccagcattcaaaacactgacaccaaatgctggcaaggttatggagcaataggaactctcattcattgctggtgggcatgcaaaattgtagtcaattttggaagacagtatggcagcttcttacaaaaataagcatattcttaccatacagttcagcgtatacactccttggtatttgcctaagggagctgaaaacttgtccataaagaaactggcacacagatacttatagcacctttattcataattgctaaaacttggaagcagccaagatgtctttcagtaggtgaatggataaagtgtggtacatccagacaatgcaatatttttcagcactaaaacaaaatgagctactaaaccatgaaaaggcatggaaggacccaaaacttattttagaattatagaaagccccatatcttattcaataaaagttattcctatttttaaaaacccatacagtatacatttggaaaatctgaatatcaattatatgttaaacaatgatagtgttgtataaatgttaaattttctgaatgttataattagatttttgcagtgtaggagccagtccttgttcttatgaggataaacactgaaatattgagagacaaaatgccatgatgtcaccaacttattggtgtagcaaagaggcttggcaataacatcatccccccaaatatatatagaaattggcaaagtaactaatggtgattctaagtatttgtattattctaacttttctttaggtataatttttttcaaaggagttgcggaggttaccgtagatgttgtaggctatttgtccatgtcaaattagctaccgatccactagaatgattataagcaaaaagaccgacaataccaagtgttggtgaggatgtggggaaattggaaccctcttacaatgtaaaatgtaaacaggttggtagttcctcaaaatgcagagtagagttaaccataatacccagcaatttcatttctggttctataacccaaagaaatgagaagatatgtccacacacaaaaacttgaatgtgaatgttcatagcagtgttattcataattgctagcagctagcaaatgtccatctactggtaaatgcatagacaaaatatgacgtatccatatgatggagtattattcagcagtaaaatgtaataaacaacttaaacatggcacagcatagatgaatctcaaacaccttattgctaagtgaaaagacaaaagattaagttgtagaattccatttatgtttggtgttaggtaaggtaaatctgttgaaacagagccgtgtttgcccggggccagcaggtggggagtgattgccagtgtgcacaaaggagctgtttaaggtgatgaaaatgttctactttaaagtgatgattgtacaactctgtaaatttactaaaaaaatcaccgaactgtgtatgtacatacattgagtgtgtttcatggtattgtaagcaaaatcttagtaattaaaaggctcttggtttagctctgggtaagatttgaagcagtattaagactccttctgcttttcggggtcctcttaggggcttacggtgagacatatcctgccattgaagatgacgtcctccctccaccatcacagttgccctctgcacgggagcgcaggaggaacaaatggaaaggactagacattgtatgtatgagacttttctcccccttttcaacttagaagaatgagaggtctgggttctgacctgtgctaaatctgtgtggcccaataaagagcacttgcttgaaattcagacatgggtctgaatctaggctctgccttgactggatgaccttgggtagctattgaattctgctgctttggcttcttccagataataatagtattttcttgtctcctggggtggctgtaagtagctcctcatcccaaccttccttcttctcctgcagaatatatggatttcagagaggcacaagaaggaactgatgtcatttattgaaaagcttcataataacctaattctgtgatataggcatcaccttcatttcggtcaaatgacttgccaaggtcacatgggcaagaaggctgagattcaaacccatgttctcctcactctgctccccagctttacaatatagccagtaaaaagtagaggctttggagtttatgtcccagcaatgtcacctccttgttgagtaggcagcttgggcaatttcttaaactctgtgtgtgtttccttatatatgacgtgaagatgcagttatatgtgaagcatttagcactgagccaagtatgcagagacctcaccaagtaacagatgttgctattagcgttattatatgtacagcattaccaggtgaaaatagctttgctttttgccttaggcaaccaccagtctactttggtttctatagatgtgccttttctggacatttcgtataaatgagatcatacactgtatgattatttgtgactggatttgtctttcttttgaaggtcattcatgttgtagcatgtgccagtactgaagcctctttagtgttgaataattttccactgtattagtatcccacattttgtttatccatttaacaatagatatttgggttgttttcactttttagctagtatggatactattaatgttcatgtagaagtttctgatgtttttattactctcgaatatatatacctagaaggaaattgttgggttatatggacactttgtatttagcattttgaggaagtaccagacttttccaaagtggctgtaccattttaccttcccatcatccactgagggttgtaatttctgtatatcctggccatcacttagtgtcttttgattttagccatctattgagtgtaaagtggtgtcatggtggttttgagttgcatttctgtaatgatattgaacatcttttcatggtttattagccagttgtatattttcttaggagatatgtctattcaaatcctttgctgatttgtttttttttttgttttttttttttgatacagagtcctgctctgtcacctaggctggattgcagtggcgtgatctcagtgcactgcaccctctgccccagtggggttcaagggattctcctgcctcagcctcccaagtagctgggattacaggtgcatgccaacacgcctggctaagttttgtatttttagtagagttggggtttcgccatgttggccaggctggtcttgaactcctaacctcgggtgatccacctgcctcggcctcccagagtgctaggattacaggcatgagccaccgcgcccagccctttgtccattttcaaattgaattgtctttttattgagttgtaagagttcttttacattctcactacaagtctagttatcaatgtgtgattttcagatcttttttcccattctgtatctttttaactttcttgatggtgttctttgaagcacagaagtttttaattttgatgaggtccaactcatcactctttcttgggcttttggtgtcttaattaagaaaccattgccaaccacaagatcatgaagatttacttgttttctttcagtttgttcttaattgtaggtccatgatacactttaatttttgcacagggtgtgaggtgcaggggtccaagtccattcttttgcatgtggccatccagttgttctagcagcatttgtttaaagactgttctcccactgcattttgttaactccgtccataaacgtaaggatttatttctatattcttcttaatcttccattgatctacatgtcttttcttatgtcagtaccacactgtcttgattatagctggactaagcccctgctgcttcagttttttccttttgtgtcctataattctcaagctttatcctgactggcagcatttctgtcatcacaaatgttactccttatccttgagagtcatctgagcttgcatggataagcataggagccataatatacgtgctctatattttcatgttttattttgttcatcacagtgtacatttgagggcaagaggatgttttgatttgctggtttttttctttttttttgagatagagtctctgtctcccaggctggagtccagtggcacaatctcagctcactgcagcctccacctcctgcctcagccacccaagtagccggggactacaggcgcctgccaccatgcccagctaatttgtatttttagtagagatggggtttcaccatgtttgccaggctggtcttgaactcctgacttcaggtgatctgcccacctcggcttcccaaagtgctgggatcacaggtgataggcaccatgcctggccctgattcactgatttgtgaacatattttgtgttaatgactttctgaagttctgttttctaactacaggatagcagtcgtcctaatgtagcaccagatggtctctctctaaaatctatatccagtgtaaatgttgatgagcttagagtgagaaatgaggaacgaatgcgaagactgaatgaatttcacaataaacctattaatacaggtaaatgaccaagtgtaatggcctatagtagaatcctgtatgaacttttaaactttcttactcaaggctttcactaacgtctgagggatagatggaatgagtttgaagacctttgagttgtatggcccaagacatagtaactattgagcaaaaccagacctcaggatgcagtttgcatcagattttctctatcagagagggtgcccattttagagtggagtctaaacaggtaaaatagtttttgcttattaaacatatccaggctttgctttcagcaaagaaaatgctatatgataatagtaatcactttactaaagtaaaacattattagaaattagcctaaagactttgagttctttaacacttatgctgtatatttgcagtactacaaagaaaatttttaccttcttctttggctttccacaccatggacaaagtctcagaagtcaaataaagctagtcgtctcctcattatgagtgcatttttgtgacttgcaggttaaagctagtcatagagcacaaggcaggatggttccttagacacctaacaagctaccctgccagccctacaccacccttttctataccagtgctattagtcaccgggataatgggacactttcatattggtaataataatagttttagcaaattactggagtggtctatttgggaaatactctttagtctgttaatctacattacaataatctgttaagatttttttagatcctacctttaatactgtgttaatttaaaactgtactcatatactatctatctagcagtcaaggtgtggtgtgttctaatggtggtaattccacaccaaacacaaagcagacatggttaattgatgggacagtaggaaaggatgtctttccagctataaggcattttcttttagacccaacaaactgaattaatatttaacaggaatatatttgagggaagatagcattttaagaatctttttcagaaggtttttaatgtctacactgttttttaacattgtcctttcaaacaggagctttttgttattatgtggattgactgcacataccaatccttcacagaccaggagaattaaaaaaaaaaaaaagaatatgatatcacagggtaggaagacagattttcctattattatacctaataataaataaaagtaaaatacagatagaagttgcgtacaatcaatcagattcaattaaagaatgaagcaagagctacctcttcattgactggacacggccttgttagattaggtgttttaagaatggaagtaatctcatgccaactagtgttttcccaaaataacttaataatttccttatagcagtgttgtaggttgaagagtattccccaaaccttgctttaaaaaaaataaaaagaaaaaagaaagaaattttatgtgtagccattaggcttctcctgaggtaacagttacaaaataagactacctacattcctcctgttgactttgttttatggagaggtgcctttgatatgcttagaatccctctggttgctagtgccatggagtcagcttactcagttgatcattttttgttttacaaaattggcctttgtgggcccactctcctccctctaaaatagggtggggtggggtgagtctaaccaaaacaaacaaacagtagagttcaggatatgagactgtggggaaatgctgagttgtaatgagttggactacaagagacctgcgcttatgtctcctgcctgccacctgtgttacctgagccacgtgtcccttgcctcctgtagatgatgagagttcactggttgaccctgatgacatcatgaaacacataggggatgacggatcaaactctgtagcaactgagccctggctccgccctggcacttcagaaacgctgaaacgtttcatggcagagcagctgaaccaggagcagcagcagattcctggaaaaccaggcactttcacttggcagggcctgtcgactgcacatggttaaaataaacctgtactggac

SEQ ID NO: 15527 - DNA, 37892 bp, Homo sapiens
gaaaaacaaaaatatgctgagtagtatgatccatacctaaggataactaaaatctgttgataactttaaaccagagacatgaatacctggttcccatgctgctgttcttccctgcctcattcatcgggcgtgtggactatctatctcttagggccttctttccttcaaatcttaggctctagagtactcaacgctgcagactccaggtagcattcaagatgaaacttaattgtgagtccttgtgacctaaatcctcctccacctaatagttttagttctttctccattaacctctatagttaggaaataacaaagggcatttgggagaaatggctcttgcattaaaaaatgattgaatactaaaatactaatttcactgttattttagaataatcaattccaagaattttgacacataatagcagcaatcactatagaataatataatcatgaattagttgcttagaaccttctatataggaggacttttatgttccttacattgtttcactttaattctttaagcactcctttgagatgtaggcgttaataactgtgtttaccagaaaaaagagaaaactgaggacaagcaagtttcttaaggtcacacggtctgtttggtggaactggaatttaactcaaagcttttaacagtacagtaaatcatgtagcctccctgaaaatacaggagactgaaaaatttaggaacatgcaaaaagagggtacaagtgttgagtttatatactatcaggaaaaaaataagtgatattctaacttttcaatagttttacaagataaataactaagtttaattctttagattgaggaaaagaaacaaagagaggaagcagagcgagagagactgagaattgcagaagaaaaagaagaaagacggcttgcagaacagagggcacgaattcagcaggagtatgaagaggaacaggaaaagaaaagagagaaagaggaggaggtacatcttttttccctattgtattttactacttagtctgaaggtgaaatctttgacttgaaaaggtatttcttacttataaaggagaacagtgttggagtacatttagaaaatatcagatcaatatacattctttggatattattttattaaggtgaaagggtaatttaagaaaggagataagtgatgactttaaaaatatagatgtaggctgactgaagactttataaaagatgcctaatattttatttttaagcagacaacttatgttaaagaacaccatatcatgtcatctatatctttatctcattttatcagataaataaggcagcacatttttgaatgtactatagaaggaatatatggaatgcatatttctctttttattttaaagcaaaggctaaaaaatgaagagcatattcggttagctgaagaaagacaaaaagaagcagaaagaaagaagaaagaagaagaagaaaaatataacctgcaacttcagcactactgtgaaagagacaatttgattggggaagaaacaaaggtaagtttcagacaaaaatgtcaatcaaacccatagtttaactcactttcactgtgagagttgtacagttgttagaaaaggggagaaagaggaggaggtgcttttgttcctgttctgtcttactgtttagtctgggcacaatgtactgaactttctgtaggaggtactgtcactgtgctttgttggtattttctgtccattgaaggtaatggatttacttacttgagccattcttagtctcattcccatggtgtatgcggtgccacccaagaatatggtctgcagacagtacaacatgaactgtttgttatggttcatgacaagactaatacagaaagtgagagtggtttatatatatatatatatgtattctttttttttttttttttttttttttttttgagacataatctcgctctgttgcccaggctctggagtgcagtggcacaattttggctcactgcacctccacttcctgggttcaagcagttctcctgcctcagcctctcaagtagctgggactacaggcacacgccatcatgcccagctaatttttgtatttttagcagagacggggtttcaccatgttggccagactggtctcaaactcctgacctcagatgatccacccacctctgcctcccagagtgctgagattacaggagtgagccaccacgcccggccttctctctctttctttctttctttctttctttttctttctttctttctttctttctttctttctttctttctttctttctttctttctttctttctttctttcctttccttccttccttccttccttccttccttctttcttttcttttcttttcttttcttttcttttcttttcttttcttttcttttcttttcttttcttttcttttctttttctttttctttttctttctttttgttttaagagaccaggtcttgctatgttgcccaggctgatctcaaatttttgggctcaagttatcctcctgcctcagcctcccaaagtggtgggattgcaggtgtgagccaccacaccctgcctcacagataattttttattgtaaaattcatcatttaagaatttaaggtcgaggcaggcggatcacttgaggccaggagatcgagaccagcctgggcaacatggtgaaaccccgtctctataacaaatacaaaaattagctgggcgtggtggcaggcacctgtagtcccagctactcaggaggctgaggcaagagaatcgcctgaacttgggaggcggaggttgcagtgagccgtgactgcactgtggcactccagcctgggtgacagagcgagactccatctcaaaaaaaaaaaaaaaagaattaaacagaattgttagtttcccataattatatttcttgtaatttcttatgttttttaaaaatgctattttttaaggaatatatacttttatgatattataatttaattgtaaagtaccataaagttttaaatcagctttatcccatttaatgcatttgcctttctgaaattaacattgctatcattttctttcatttatgtatgtctgatatatatatatatttttgtctattccttcagttttacctttgtgtcaccatattttttatttagttagcttctatctttagtttgttgaatttttaaaatcctaatctgagttataatctttttatttttatttatttatttatttatttagaaatagagactcgctttgttgcccaggctggagtgcagtggtgcaatctcggctcactgcaacttccgcctcccaggttcaagtgattctcctgccctagcctccccagtagctggaattacaggtgcaaactaccacacctggctaatttttattagagacggggtttcaccatgttggccaggctggtcttgaactcctgtcctcaggtgacctgcctgcttggcctcccaaagtgctgggattatagacatgagccactgcacctggcctaatcttttaaaatagggatatctaaatccatttatgtttatcaaaactaatgtctttgcattaattgcatttctgacttttttgtgtttttcttccttgatagctttttggtcttttgttatgtgtactatggcttgtttgctccatcctctacagggatttagaatgtctatgttgtatttacaatgaagtttttggactataaggtttaatacactataaactgaaatatagaaccccatcgtgatcttgaaaagtccctcatccatgatgctgttagtgattagatctagattttcgaggttgatttgtattgctttccagaaggattttgttatttaatttttttgtattgtcatggtacctttttattattaaagatgattctttagttttgttatattttttcttttttgttgctttacttgtgtttgttgattttttaaatcctaatctgacagtcatactgttttaataaagatgtctaaatccatttatgtttatcataaccaacatgtttgatcttatgtaattgaatttctgacttttgtagaaagcattttattaaataaaagcaataacaatctaaacttcttagatgactttcttaactataaggggtgtgtgtgtgtgtatatatgtgtgtgagtgtgatgaagcaaatatgctcttaaattttttaaatttttcagcacatgagacagccttctcctatagttcctgctcttcagaacaaaattgcaagcaaactccaaagacctccttcagttgacagcatcatacgttcctttattcatgtatgtacttttgtttttatttgttcatcctagctcagttattttggattgggggatcgaatgaaattttctttttcattatatttggataggttaaattttttcagatctgaaatataggtgatatctacagtaatttgcctgctgcttcgattgtaactgatagtgcttggtgccctaaagtttcttttgacaaaccataatttagcccctcaagctaggtagctgtagatatgctcattgagtctgttatactttagattgaactacaaggaaaagagaacatggaaaatgttctaagattgatcctcaaggtgatgcttgaagaatatgcaggaatttgccttgaagaggagggtgagggattatcagcttgtggaaagtcgtggagagcaatgtaagctcatggcacatgtggagaatcttccatggtgtggtctggcctgatgatgcttgtgcattaaggcagcagaggaggtggaggtcagaacatgtgtggcatgctgtacggagtgctaagagctttgattttgttccataggctggtagattccagacaggctaattagcagaaggtaaagaaatgtgtcagaagaacatgtttctgaattccaccctttgagattctgatttagtaggtctgtggtagataatgcataggaattcattgtaatatttaagtaggggaatgacatggccacttttgtataatgtttttttaggcaatggtgtggagataagttttggaggtggggcaagactaaacatggagataagatgcttttgcacaagtccagatgtgagactgaggacccaaacaaaggcagtgacaccaagaactgtgaaggtgtgacagctttatgatacatttaagagacatagtagtactatttgttgagtgtgtggtgggtaggagtctatgataactttcaagtttttggtgagggttacatagagtaggcagttgaaaatatgaattgtggcagcagaatgagttctggactcgatttgtagttctggacgccatcaacatattggtgcttgttaaattagtgccattgtctacgatgagtgtctacaagagaagtaaaggaggctgagaatagaatactgggaaattaccaacatttgagaagcagtgaaaggaatggacagagggtgagagaggatggcagtgacggcagttgcgactggccaagtaaaatgcccactgaatgtgtcacttgggggtcacttgatgactttggtgaaggcagtattgttggagtgatgggtgtgaaagcaaaggccatagctgtgtgttgagaagtgaatgagagtaggcagtagacccaaaagtactgcatttactgttctttaaggaagctcagctgtgaagggaaggacagaatggacaggagacagtgagcaatgaaggatgaggtaaaatttttttttaagaaagggagaggtttttacacataggctgagaggaaggtgcttggagagaggaagttggaaaaaagaataatcggaggagaatgggagtcaattatcagatacagagtacaggtgaagggattctgtttgggtagaggcaaggacacttccatcgtgatgagaaggaagaatagatttacatggtagatacactctagaatagatataaaaggtggatatactctaccttgggtagagtatagctgggtaagttttggaggtaggatagtgtggagtttggtttcctttacatataaatacttcaaaaaattactcccttcaagcttctgtgtagggaagacatactgaacatgtctttgtcattattgttgaacaggaaagttccatgtccagggcacagtcacccccggtacctgccaggaaaaatcagctccgtgcagaaggtagagttaactactaaacctgttacctagagtatttctctttttaacttttcattttgaaataattataaactcatagaaaattgcagaaacagtatagagcggttaggtgctgtgtacccattctccaactttcccctggggtaacatcttagatagtatagtctcatagccaggaagtggacattgatgtggtccacagaccatcagattttaccagtttttacatgcatttatgtatgtgtatttctgtgcatttttatcatgcacagtttgtgcgactaccactgcaatcaagatacagaactgttccatcaccgtaaaggaacttccttgggcctctcctttatagttgcactcccccaagaatatcgcttctgaaattcctatattataaaaaatgtacttgtgggtcctaatgacgttcacaattatgatccatgtatgtgtgtatatataaaatgttaaaatatctttcataaaattgtctctctgagcagtttcactttattattagtcaggttgtgttttaatgtttagtcttttgttcttattcctgtcttgtgttttacttatcaatgggaatttgcagaggagaaaaaaaatgtaattatggaattatcagaaatgagaaaacagcttcgtagtgaagagaggcgtctacaagagcgattgctacacatggacagtgatgatgaaattcctatcaggcaagtttagaattgcagtttttgtgttcgcttgagttcttttatcttacttcacctatccagtaattttgtagtttgggaacaggactaattcatcttacttaaaatctccttactttccttttctttgtcttttacaaaatcagctgtagaaatttagttctcaaggggattcatgtaggaatggaaatttccgggttggaataattacagacagtagttgcattttagaactgttttttatattttccattaataacgtagctttctgaaatactttttttcaacaaaatcacgtacgggctaccgaacatttctgatcatttttgccaggagtcataaatttcatgaagcagtgttcttcaaacttcagtttgcactgttttagtaggttgtaaaatcaacatagtgggtaactaccacattttctttctttctctttttaaaaataaactttctattttggggtaattttgattataaaaaagttgcaggctgggtgcagttgctcacgcctgtaatcccagcacttttgggaggccaaggtgggcggatcacgaggtcaggagatcgagaccatcctgtctaacacagtgaaaccccgtctctactaaaaatacaaaaaattaactgggtgtggtggcacgcccctgtggtcccagctactcaggaggctgaggcaggagaatggcgtgaacccaggaggcggaggttgcagtgagccgagatcacaccactgcactccagcctaggtgacagagtgagactctgtctcacgaagaaaagttgcaaacaatacagagagtttctgtacacccttcatccagttttccctattgttaacatcttatattaccatggtatgtttgtcacaactcagaggctgacattagaacattactatgaactaaatttgagactctttggatttctccagttttctactaatgttctccttctgttcatgggccccatacaagatgtaccacattgcatttagttgtcatgtctcccagtctcctcgggtctgggacagtttaccagtcttctgttgtttttcttgtgaaagtctagatgggcactggccaggtatcctgtagaatgcctcctcctccagtctggatttgactgatgttttctgatgattagactgggattaagggtttctggaaagaagagcacaggcattgttctgacatcacatcatcacattgtatcaggggtacatgatatccacatgatacctctggaaatgttaaccttggttaaagtagtgtttgccaggattctccactagaaagttaactattctttggtcacaaatgactaaatctagcgcacctgcaagagtgagaagggggtggaattaagcttcatctcttggagcaggggttacctatatacagtttttagaattcttccataagaaagacttgtgtcttcttccatttatttatttattcaatcgtttatttattactgtcatctcatgtatatttatcatatactttgggttataagccagtgctacattattttatttcacaaattgttccaactttggccattgggagctctttcaggttggctcccgtgtctctttgacatgtccccatccttttgttttttgaagacttctttccagatgcctcaggatcatcttgtatttcccctgccccatccctagaatcagctatttctccaaggagccctggttccttttggagaatgtatttagaaaccagataagctgggtctgcttattgctgggtgtcactgcttctaggccctctggataatatatgtatgttatactaagtcataaatataaacatatctataattgttcctatgtctatttgtatacatattaagtttatgctgatgtctgactgtaatccagtatgtggtaggattttaacatagcacgttaatttgactacttatggtttgtttagatttttgtttgtattctccaggaatattgaaacaaggtaaacaaggtgaggaaatttcaaggtacagattggcttgataatgaaatgttaatccaaggtggtaattttcagtgattcaataattctcccatagtaggtcaatacgttccaagcaattgagaggtagtgttttttttctatatttacttttacagtgttataaatgccttaactgtgcagctttccaacttctaaacatgcatatttaattcagtttaacggtttttttttttttttaattgatcattcttgggtgtttctcgcagagggggattttgtagggtcataggacaatagtggagggaaggtcagcagataaacaagtgaacacaggtctctggttttcctaggcagaggaccctgcggccttccgcagtgtttgtgtccctgggtacttgagattagggagtggtgatgactcttaaccagcatgctgccttcaagcatctgtttaacaaagcacatcttgcaccgcccttaatccatttaaccctgagtggacacagcacatgtttcagagagcaccgggttgggggtaaggtcatagatcaacagcatcccaaggcagaagaatttttcttagtacagaacaaaatggagtctcctatgtctacttctttctacacagacacagcaacaatctgatttctgtatcttttccccacatttcccccttttctatttgacaaaaccgcaatcatcatcatggcccgttctcaatgagctgttgggtacacctcccagacggggtggcggctgggcagaggggctcctcacttcccagaaggggcggccgggcagaggcacccccacctcccggatggggcggcggctgggcggaggctgccccccacctcccacccggacggggcagctggccgggcgggggctgccccccacctccctcctggacggggcggctggccgggcgggggctgccccccacctcccggatggggcggctgctgggcggaggggctcctcacttcccagacggggcagctgccgggcggaggggctcctcacttctcagacggggcggctgctgggcggaggggctcctcacttctcagacggggcagctgccgggcggaggggctcctcacttctcagacagggcggccgggcagagacgctcctcacctcccagacagggttgcggccgggcagaggcgctcctcacatcccagatggggtggcggggcagaggcgctccccacatctcagacgatgggcagccgggcagagacgctcctcacttcctaaacgggatggcggctgggaagaggtgctcctcacttcccagactgggcagccgggcagaggggctcctcacatcccagacgatgggtggccaggcagagatgctcctcacttcccagacggggtggcggccgggcagaggctgcaatcttggcactttgggaggccaaggcaggcggctgggaggtggaggttgtagccagccgagatcacgccactgcattccagcctgggcaacattgagcactgagtgaacgagactccgtctgcaatcccggcacctcgggaggccgaggctggcagatcactcgtggttaggagctggagaccagcctggccaacacagcgaaaccccgtttccaccaaaaaagtacgaaaactagtcaggcgtggtggcgcgcgcctataatcgcaggcacttggcaggctgaggcaggagaatcaggcagggaggttgcagtgagccgagatggcagcagtacagtccagcttcggctcggcatcagagggagaccgtggaaagagagggagagggaggccgtgggggagacgggagagggggagggggagggggagagggagagggagacctaacggttttttgacattaatttttcttttcattaataaattcttttggcaagccaatatgatttaagaaagagtactcgagcagcgcctcaattttctcgcttgaaaattatacatgataatttctaccctttgagaatctagtgaagaataaataaatgtatgtatttgaaataaataaataaatatatgtatttgtgactcttaagttctaacttaagttataaaacatgttacatttatcatcatttagcaagaattggttaaatacatttactttggaataattttaatacatattctgattaaagacatctcagagttggttctttattgcaatttcatgaatatatgtacaaaaggaatcttgtattcactaaataatttgccatattcaactcctattatgtgctaggctcaaaacaaatgtgatgtggctcacatgtgaagatttagtaacctacttcctaacttatcagtgtataactattagcattaatggaaactagacagcagtccaatttaatggtctcttggatgtctttttagtattttgcattatagtaaatctccatagagttcctttcaccttaagtattagaggtctctgtcagccttgaccagagtcattttgtggccccagtgaatgctcccctgcaaaagggaaactccattagagcaggggcattgtctgtggggatcccagctatcttgtcttggtgcttagggaagatttaatgataaagaaatgatgggaggagtctgactaagcctcataatgaccatagcttagagctccattttcaaaaatagaggagacctagtgctgactgaagcagcagtaggtattttattttattttattttattttcaggactagaaacaccatccctcttttatcatcactccctcaaagccctggcagaaaacacccttactacctgctatctattaatttcttaggtaccacaggaatcagttaactagttaggttatcaagttccttgtaaagtccattgtaaagttaatgttgggtcctctgaataatgcccatattgaactacgtattagtaccatatttctgtttttatttttatttttttgagacggagtctcgctctgtcacccaggctggaggcatgatcttcggctcactgcaacctctgcctcccgggttcaagtgtttctcctgcctcagcctcctgagtagctgggattacaagtgcccacccccacgcacggctaatttttgtatttttagtagagacagggtttcaccatgttggtcaggctggtctcaaattcttgacctcaggtgatccacccgcctcggcctcccaaagtgctgggattacaggtgtgagccaccgtgcccggccagtaccatatttctttttatatttttggagacagagtctctttctgtcacctaggctggagtgcagtggcatgatcttggctcacagcaacctccgcctcctgattcaagtgattctagtgcctcagcctcccaagtaggtgggactacaggtgcaggctaccacacctgctaatttttgcattttttagtagagacgtggtttttccatattgcccaggctggtctcgaactcctgagttcaagcaatacgtcggcttctcaaagtgctgggattataggcgtgagccacagggccctgcctattaccatatttctatgtgtgatttgtgtcttaggctgaggggaaggtaatttattgattatctaatgcatgtcaggtactatactaggtacttaacagtatagcatttatctcaattctgaccggatatggtggctcacccctgtaatcccagcactttgggagactgaggcggatggatcacctgaggtcaggagttcgagaccagcctgaccaacgtggcaaaatcctgtctctactaaaaatacaaaaaaaaaaaaaaaaattagccgagtgtggtggtgcgtgcctgtagtcccagctacttgggaggctgaggcaggagaattgcttgaactgggaagtggaggttgcagtgagctgagattgtgccactgcattccagcctgggcaacagagcaggactctttcaaaaaaaaatttttttatcttaattctgttgttcaccgtaagactataaggggtagacatctgcattttacagatgatggaatcgaggtcaaactgctaataaataacagagctggtctttgaatctcagtttctctgacctcaaagactgtgatcttcatactccatgaacattttattttattttttccatgaacattttaaagtaaggctgaatcattctattgtaataaggtatcttgcatctgaggattttgaaaaatttcaataacgttataaatatgctatattttaaggtaaaggatggaactaatagagctgttcgaataatttatttatttatttatttttgagacggcttcttgctctgtcacccaggctggagtgcagttgcactatctcggctcactgcaagctccacctccttggttcacgccgttctcctgcctcagcctcctgagtagctgggactacaggcatgcgccaccccacccggctaattttttgtatttttagtagagatggggtttcaccgtgttagccaggatggtcttgatctcctgacctcgtgatccgcccgcctcggcctcccaaagtgctgggattacaggcatgagctactgtgcccggccaattttttttttttttttaagagacggggggccgggtgcagtggctcatgcacgcctgtaatcccagcactttgggaggccgaggtgagcagatcacgaggtcaagagatagagaccgtcctggccaacatggtgaaaccccatctttactaaaaatacagaaaaatcagctgggcctagtggtgcacgcctgtagtcccagctactcaggaggctgaggcaggagaattgcttaaacccgggaggaggaggctgcagtgagctgagatcacgccactgcactccagcctggcaagagagcgagactccacctcaaaaaaagagacagggtctccctctgttgtccaggctggagtgcagtggcatgatcacagcttattgtagccttggcctcctgggctcaatcaatcctctcatctcagcagtagccaggactacaggcacacactatcatgcttgactaattttgttgttgttgttgagatggaatcttgctctgtcacccaagctggagtgcagtggcgtgatcttggctcaccacagcctcctcctcctgggttcaagcaattctcatgcctcagcctcccgagtaggtggtactacaggcacacaccaccacgcccaactaatatttgtatttttagtagagacagggtttcaccattttggccaggctggtctcaaactcctgacctcaggtgatttgcctgccttggcctcccaaagtgctgggattacaggtgtgagccaccatgcctggccaacttttttttcttttttgagatggagtcttgctctgtcacccaggccggagtgcagtggtgtgatctcagctcactgcaacctccacctcttgggttcaagtgattctgctgcctcagcctcccgagtagctgggactacaggtgtgcgccatcacacccagctaatttttgtatttttagtagacatggggtttctccacgttggcccagtctggtctcgaactcctgacctcaggtgatccacctgtcttggcctcccaaagtgctgggattataggcatgagacaccatgcctggcctcataattttttttttttttttttttttgtagcgagggggtcttgctttataggccaggctggtattgaactcctgatttcaagcagtcctcctgtctgcctcccaaagtgctgggattacaagtgtgagccacagcacctgtcctagagtaattttttaataatatgatgtggtgaaaaagaccaaatttcttttacagtgaattagatgtgaactcacctatttttcctgtgaagcacatattatgatttgtcatttatctataggaaaaaggaaaggaatcccatggatatatttgatatggctagacatcggttgcaagctcctgtcagaagacagtcccctaagggcttagacgctgccacttttcagaatgttcatgattttaatgagctgaaagatagaggtgagtagattgctgctcttttaaagatgtagcagaagtgttctacccatatttaaatatctataaagatctttgtaccctttttctaaagtggaattttatctatggtatgtattttagttaaaatgaaatgaaacttatgtattctctaggtcttcagttaaccagtctggtagatgaagctttagtttgactaactgctttcttttggagagcatacagtgttaaagtctggaatggatgagatcgcatagactagtacgaagaatggaacttggcatttaatggaggatggacagacaaagatgagctcatgaaaaatactgaggagaagccagagagactggaggagaagcaggagaatgtaggatcctgaaacctgaggggaaggagtatcaaggagacaggatcatgtaaggtgaataccggaaaatgtcagttggatgaggtcattggtgacctcagctagagctttttaagtggaatgattgccgattaactttggaatgaggattgactaggaggcaagatgttggagacaataggcataagacttttagaagacccttggctgggaaagggaagggaaggagagggatcaggagctggaagagtccttagaatgtgaacgtgaggagctatgcaggagaaagaggttcaggctctaggagagggagagtgattgttgaagtgaaatctaggggatttgagggaagagttaggagaagctttgatgtagccacttagggctaatggaagagaaagtttagtaaggaaacgagatttccagggtacatgaggcctgggagatggagaatgtgtggaggaaccaaatgtgtgttgtgtaattttcctttaggcatattcagcagagcaggtgttggagcagaaggggcagattatgggatgtgtggtcgtatgacgtaggccagaaaactggaatttaggctttttatccttttgaaaatactatctgtttattatagcaaattttcaaaatacagaaagatagtaagaaggaaaaatcactttagtcaaactacctatatgtaagtaccattatcattttggatgttttctagtctttctgagcataattaaaagaaaaaaaaagataaattgtgttatttatttaattttctctattgtttttcacctagatttacacgtattatcaattacgtatactgttattttttatgctatcaaatattgattacttactatctgccaggcattgtgttaacccagtgggtctcatgaggagtttggtctgaagtcaaaactgtttgtattataaactaagacattatttgtctttttcattctcattctctcatgtgtatatagattggccagagactacatgacatgtaatgatttcatctctttgaagctagcaaaatgtgtccttgtgtattcttgtgttttaggaatctcttagttttaatttctaatatggcgtgtgtgtgtgtgacatacataagtaaagctctttggggtcctcaatttttaagagtgtaaaaaagatcttgagaccaaaaaggtttaagccatagaattgggctgttcatttccctgtgttactacatcttgccctcattcacccatgacttggtggttggtattgtttttttaatgagtttggaagcagtgaagccagggaccaatccaagtttatgtgtccagaaacttctgttaacttctgaaaatggctgttaaccattttcactattttgttcttttgataatttctgatcataaagctttatacatatttaggaccataaaactacatatatatttaggatcatttctttatattccagcagtgtaattagtgagtcaaagggaataatattttcaaggctttttatatgtatgaactgtatgtttcttctcaagattaaaaaatttttattcttggccaggcacagtggctaatgcctgtaatcccagcactttgagaggccgaggcgtgtggatcacgaggtcaggagttcaagaccagcctggccaacatagtgaaacctcgtctctactaaaaactacaagaaaaattagccgggcatagtggtgggtgcttgtagtcccagctacttgggagactgaggcaggagaatggcatgaacccaggaggcagagctggcagtgagccaagaccgtgccactgcactccagcctgggcgacagagcaagactccgtctcaagaaaaaaaaaaaaaaagaaatggcattccccctcaagttccagccagtctacatttatcttgctttctgcatgatatttgtaaggactaaaatattaattggccagtaacattattttttcacgtttccagtatattttagagatcagccgtgattacagtgtctcatggctgccttagtcatagccatgtgaccatctgcttggatatacctgcacgtagtctgtgttctgggtggcatcctggcagggctaggacaggtagagatggacaatgcaacatccactgcttgttctggggtattccttatgttggtaagtttgtgaaaagacacttattaaagaatattaatttcatattctttagttttgtggctattttactgtcctttgactttagtgatgtttcactatttctatcatttccttgattttgaaattaggttactcatgttacttacagtgaagttttacaaaatcccatttgaaaacaacatttaacttagttatataacatattttttataccagattcagaaacacgagttgatctgaaatttatgtacctggatcctccaagagatcatcacaccttagagattcagcagcaagccctgctaagagagcagcagaagaggctgaacagaataaaaatgcaggaaggtgccaaaggtaagaaataatcattgctgtgtcaaatagtatcagcacgctgtttttccgtaggctttctgcatctcttctattgatttcattcccaggcatcctcctttcactggcagccccatgctcacagggtccgtttggtctgtagtaccagaaaagaacaagtatgagagagagctctgagtggctccactagggtggtgtattcatgcatgagaggggcccagtcattcactgtagccaggaggactgaatactttgaccaggccaggtgacgtctgcatcaggaactaggaaccaaaggaaggagtgtcaggcagacatatcagtgccctgtcatgatgtgtcgggcatttgcctactgtgccatgtcaggcatttgtctactgtggtgtgagtgtgtttaagttttgatgtggcgtaaaatctgtaaagcatcagactggactatgaatatgttttcgtataatcaactaactgaaagatacttagtggttactaggagtgcaggtactggcctatatccaggggatatggtgatgagtgacatatgctgctgctcttgaggaggttatattttgttggagaagtgtgatgctaaagaagtacaactgtgatgaatatcgcacagaagaaatctaggatgctgttgggttggggtgggtgggcacctagaagcagagtggggctagttgtctcagagagcactgatgggccctgacgatagccaggtgtactgcatggccttcccatctgtatttcaccagccttcaggccatcgaggttaaccatggaaaatgagtaatgaaaacccaacaatcagataacaagagtggaagggatgctcctgctagttatttttaagaaaagttaagaccctatcttgggaggctggtctggcttgcagaatctgaggaagattttttgacttcatgagatagcatcacaggagtaagtgatgcagcagtttaggcccagatcataggtcaagacttcaataaacatttgtatagggattgtcgtcccttcatctggtacagaatttttaataacagcctcatagccctgtgacagaataagcctaattctaggataagcagtaggtatatcatctggagagaggagagaagcaagtgcattcttcaacctttgtacccagtctggtggcatttttctttagtctcaaaatgaagatctgatcttgtgggattttggcagcttagactgattagcccacaagtagtccccatgtggatacaggtacattttagcactgaaggtatctatctcccacagcagccactccccaacttccagtagacactatgaagacctaattcataggaatatgacctcactggccaggcgtggtggctcacacctgtaatcccagcgctttgggaggctgaagtgggcggatcatgaggtcaggagttcaagaccagtctggccaacatagtgaaacccccgtctctactaaaaatacagaaattagctgggcatggaggcgtgtgcctgtagtcccagctactccggagcctgagtcaggagaattgcttgaacccaggaggtggaggttgcagagagccaagatcgtgccactgcactccagcttgggcaacagagtgagacttagtctcaaaaaaaaaaaaaaaaaaaaaaagaatatggcctcactataaacaatcacaaacatgtctattaaaatatctgagaaggaatacaggctatcattcgcagcttgtttattttcaaaggcagtatctaaaaagggcaaaatgtactattcacaggaacacataggaaggctggtcatattggagaggctttgggatacctgatccaagatctttgcctctggaactaagtgcctggaattgagcttatttcagttccatgtgagggagcccctgtttaactccatgcaacaactttctacagattgtagaaatctgacaagatggtgaaggatcctgcattgatcattttctttttctgttggcattagttttacatttgcaatgattttacttgttatgttcattcatgtgaatgggagaattttatgcagctagaatggatgcagggctatgttttttaataagtgatatctttaaaatactctgaagtgtgatagttgaaaagtaatttccagtagagagctagtcaaaaaagatattctaaaatttaatttatatagtaagcattttctgaccttttaatttgcttttgttctccattgactacagttgacttagatgccatcccaagtgctaaagtacgagagcaaagaatggtaagcaaccagttacaatttttcaagttagtttttgggggattaaaaatctttaggcatatgatgatcaagtaattcaaattttgaattattcaggaatattgaattaagaacgtaagtcttatcagtaaagtggatagcttgagaagtgttagtgtaatatatatagaaaacatattgtaatggctaagaacaagattctagcactaggctgttccagtgagtctatttttagctgcgtgacttagggcaagttatttaatctctttatgcctcagcttcctaatctgtaaaatgaggataatagtacataaattaatatttgcaaggtacttagagacaggcctggcatataagttttatgtaagtgtttattaaataaataaaaatagctcaagtgctgttgtgagaactgagataatatattaaaagcccttacagcagtcctggcccattatgagtgcagtgtgagtgtttgctgtcattaccatgagcagtagtgggagtaggagtctgttatggaagtagtgttgaggtctacaaagaaaataagcaaaggaagggaacagagaatgataacacccacctgtatcctgaggggggtactttttgtgcaagactgaataaagggacaggatgagctcttttcaatcaacaaatatttattatttcctatggacaagaaactgttctaggtgccggggtataggagtaaacaaaagggacaaaaatccctgtcctgtgacaggttacattccagaaggagggagagacagtaatcaaataaatcaatagttttttgaatcatggtgctgtggagaagacaacagcagagaaggcagctggaggatcctgggtgggagggtttatagttggaaatacagtgggcatgggggctcactgggtaggcaacatttgagtaaggacatcagggaggtgtctatgggaaatgtgggggaacttctggaggaagaacattccaggaagaggccccagtggaagttggcctagtgcatgtaaggagcagtgggagagccatgagcaagggccagttgggcacatggggcagggggtgacgaggggaggcagcagggccttgggggccattctgggactttgcctttgacacttgtgcatgtgatgggaagctgccaaggtctttaagtggaggagtgacatgatctgcttgaggtttttacttgatccactgactgctgtgcattttgactgagtgggacaggaggctattgtagtaatttaggcaagagacaagctcactttctgattaaagaatgcagtgcatcattgtaattcattgccttaaaaattaatggacagctctttgctggagtgtcctactgaagcccagattatctggtaagaaggtgcagggaggtggagttggatgactttaggttccttctgacatgttggttattattctgtactgcaaaattctctatatgtaaatttaagttttctctaatttgggagctcattataataagcccaatcttagcattttttttcgttactatactatatgctccactatatctgtgctgcatcattgtggcaattgctgtcacatagggctgtcataatctgagagtatacccctctctctcccatgacactgtgatctactccagagcagaaactcttaattcatctttgtatccccagttcctagcatgaaagaaatagtaagtgggctatacaggtttatggaaattcggatgaatgaatcttggcagtggcttaaagacttaatgtttaattggggtctttgcttcatactgtattatattttccatcagtcataatgtgatccttttatttgacttcaaccataaaggggcaggaaggagtggagctagggagtaaatgtgttagcttgtagaatctgtagcctggagagagactgtcttctgttgctatcaccgtcttcgtaggaattgtgtgtgttaaggctttccagtattttctgagcattggaatgtagtcagtcctacctctacccatcctctgcttttagggagaacagtgtggaaacttgtgcctcttcttagtataaatttgttgtttttgtacacaaaactaataaaaatagtcattgaaacatgtttcttttagcccagagatgacactagtgatttcttgaaaaactcattattggaatctgatagtgcttttattggtgagtatatttattttattaaggctatattgtttaaatattaaacctttctccacacttaaaaaccagtactgtattccttgttgtacaaggtagtaaaaaaaaaaaaaggaatattcttttttctgttttaatcagatatgccttggaaagttttcaaaatcagaattactgaaatgaactttaaaagtcttaggaatagttgacaaacctgtacatgaatgttcgtaacagcctcatttctaatgccaaatgctggaatcagcccagatgtccttcagtagatgaatggttaaaaaaactctggtacatccatgccatggaataccacttagcaataaaaaggaacaaagttttgaaacttggatgactcttcagggaaatagtctgagcaaaaaagacaatcccaataagttacatactactgtatgattcaatttacataacatttttgaaattacaaaattaagaaattgagaacagattagtggttgccaggggttgagggatagggagaggtgtatatggttataaaagggcaagaagagggatccttgtggtttgggaactgttttaacaacttgtttgcaggggtagatacatacatgtaaatgggaaataaaataataataatagatcttaatacacacataaaaacacacaaatgagtattggtaagatggtaaatttgaataagatctgtggattgtatcagtatcgatatcctggttgtgagattatacttgagttttgcaaaatgttaccattgggggaaactggacaaagtgtataaggaatctctactatttcttatacctgtgtaccttaattattttaatctatttatagttctcttaatatttcagtcaaaaaagtcataagacttttatttagtcttcagaagataagtaaaggtaccatgggatcttcttttttttttaaagtagtatacacttacgattatgtactctgatcatgagtgtttctgctatcctagggccatcagggaatgatctagtctacatattagttgtatttcaggccaattactttagattttcatgtgataaaattccaaattaacttatatttttctcttaatggttttttttttgttgttgctgtttttgagagagggtcttgctctgtcgcccaggctggagtgcagcagcacaatcattgctcactacagcctcaaattcctggactcaagtgctcctcccatctcagcctccccagtagctgggactacagcatgcaccacgatacctggttatcttttttatttttttgtagagatgaggtctccctatgttgcccaggctggtctcaaacacctggactcaagggatcctcctgcctcagcctcccaaattgctgggattacaggcatgagccactgtacctggccatttttttttttttttttttttttaatgaatttttcctttccaaggaagatgcactgcggagagaaggaaagataaaaccagcaggagacagggatgggaagattgcttgtcagggaaatgagaccttccttcctaacagtgaagatggtctgggccactcaagatggtgtgttggagtattgcatgacactagagcaaagatacagcagtatttatggttaacagtcactgcaaatgctgcataagtaagtcatggctgtgttaaccactgctctaaggaatgtaaagctgatggtttcagtgcattattttaaaaaatagggtttttaaaattgtaaaatacacataaacataacatttaccattttaaccattttaaagtgtacattgactggcattaagtatttctattgtgcaaccaccactatcatccatctccagaattcatcttgaaaatagaaactcttcatatgaaacagtaattccccattgccctctccctccagcccctggcagccaacattgtactttccatctccataaatttgactactctaggacctcatgtaagtggaatcatacagtatctatcctttgatgactggcttatttcacttcacataacatctttgaggtttatccatgttatagcatgtgtcagattttctttttttaccccttagagacagggtcacccttgccacccaggctggagtgcagtggtgtgatcatggctcactgcagccttgacctccctgtgctcagatgattctcctacctcagcctcccaagtagctgagactacaggcacacactaccatgcctgaataatttttgtattttttgtagagacagggtttcaccatgctgcccaggttggtcgcgaactcttgagcttaagtgatcctcctgcggcctcccaaagtgccaaagtgctgagattacaggtgtgagctaccacacccagccagatttcccctttttttttttatgctgtgaataatattccattgtatgtgtgtaccacgttttgtttatccaatcatctgtcagtagacacttgagttgcttccaccttttggctgttgtgaataatgctcctatgaataggtgtacaattatctgttggagtcactgctttcagttcttttgggtatacactaagagatagcatttgctagatcatatagtaattctatttttaattatttgaagactcaccacattgttttccacagcagctgtaccattttacattcctaccagcagtgcacaaaagttccgatttctctacatccttaacacttgttactttgttttttgaatagtagcaatccttacgggtgtgacgtggcatctcattgtggttttgacttacatttctgtaataattagtgatgttggacatctttacatgtgcttattgactaattgtacatcatttttgaagaaatacctatttaagacctttgctaatttttaaaatcagagtttttttgttattgagttgtgggagttctttattatctattctggatattaccccttatcagatacatgatttgcaaatgttttctgcatagtgggttgccttttcactgtgttgattgtgtcctttgatacataggagcttttaattttgatacagtccaatttatcttttcttttgttgcctgtgcttttggtgtcacatctaagacatcgttgccaaatccaataccatgaagctttcctcatatgcttgcttctaagagttttatctataggtttagctcttaatgtttagatgcctaaccacagagtgtcaaaatacatgtcagaaagcaaaagaatggcaaggagaaatagatgaatccactgttacagttggagatttttaacacctctctatcagaaatggacagagacagaaaatcagtaaggacgtagttgagttcagcaacaccatcaaccaactggatataatggatgtcgaaagacaacttcattaacaacagcagaacccatattcttctcagggtcacatggaacattcaccaggacagattacaatctgggcaagaaaacaaaccttaacagatgtaaaagaagataaatcacacaatatctgtccccagaccacaatggaaataaactagaaatcaataacagaaagatagctggaaaaatctccaaatactttggagattaaatgccacatttctaaataacgcataggtcagagaaaaaatatgaaaatacattttaaaatactttgatctaaatgaaaatgaaaatacaacttctcaatttgtaggaggtagcagaaataatgcttgtctttctttctactttcctaatgtatgcattcagttaaatgtaaaatgccaaactctaaaactcacagaagataccaacagaaaatctagacgaccttggatatggtgatgacttttagataaaaaaccaaagccacaatttatgaaagaaataattgataagccagactatgtaaaaaattgggaattttttttttttttttttttttttttttagacaaagtcttgctgttgtccccaggctggagcgtgatggcgtgatcttggctcactgcaacctccgcctcccgggttcaagcgattctcctgactcagtctcccaagtagttgggattacaggcgcctgccaccacgcctggctaatttttgtatttttagtagagacggggtttcaccgtgttggccaggctggtctcgaactcctgacctcaggtgatcccccggccttggcctcccaaagtgctgggattataggcgtgagccactgcgcccggccaaaaattggtaaatttttaaggtgcttaaatttataggattgactgtgcatacatgaagaaagtagaaagatctaaaatcagtattctaagcttccacataagaaaattagaaaataattaaatccaaagtaagcagaagaagagaaataaaaattggagcagaaatcaatgaaattgaaaacaggaaataaatagagaaaatcaatgaaaccaagagttatttctgagaagatcagtaagcctctagccaagctaataaaagagaagacacaaattactaataccagaaacagggcatatctagctgggcatggtggctcacacctgtaatcccagtactttgggaggctgaggtgggcggatcacctgaagtcaggagttcaagaccagcctggtcaacatctctactaaaaatataaagattagctgggcatggtggtgtgtgcctgtagtcccagctatctgggaggctgaggcaggagaatcacttgaaccaggaggtggaggttacagtgagctgaaatcgtgccactgcactccagcctgcatgacagagtgagattctgtctaaaaaaataataataaaaaaatataataataataataataataataaaggttggggggcatatcactacaggtcccatgaacgttaaaaacagtcggccgggcacggtggctcaagcctgtaatcccagcactttgggaggccgaggagggcggatcacaaggtcaggagattgagaccatcctggctaacacggtgaaatcatgtctctactaaaaatacaaaaaaaaaaaaaaaaaaaaaaaggtggtgggcacctataagtcccagctgctcgggaggctgaggcaggagaatggcgtgaacccgggaggcggagcttgcagtgagctgagatcgcaccactgcactccagcctgggcgacagagcaagactccgtctcaaaaaaaaaaaaacaaaaacaaacaaacaaacaaacaaaaaacacaacatagtccaagagcctggtgtgattccgttctgcatggctgttctcttgagaagtggttgtttatctccgtccaccttctttcccacctaagtgcatgccaccagccaatggaagatttgatgagccctgaggccccagaactatcttttcggttgtgaactaaaggccgacaaagattatcactttaagatggataatgatgaaaatgagcaccagttatcttaaagaacgttcagtttaggggctggtgctggtgcaaaggatgaattgcacattattgaagcagaggcaatgaattacaaaggcagtccaattaaagtaacactggcaactttgaaaatgtacagccaatggtttcccttgggggctttgaaataacatcaccagtggtctgtcggttgatgtgtgcttcagggccagtgcatattagttgacagcaattagtagctgtggaggaagatgcagagtcagaagatgaagaggaggatgtgaaactcttgaagtatatctggaaagcagtctacccctggaggtggtagcaaggttccaaagaaaaaagtaaaacttgctgctgctgaagatgatgaagatgatgatgatgagtttgatgatgaggaagctgaagaaaaagcaccagtgaagaaatctatacaagatactccagccagaaatgcataaaagtcaaatcagaatggaaaagactcaaaagcatcatcaacaccaagatcaaaaggacaagaatccttcaaaaaaacaggaaaaaactcctaaaacaccaaaaggacctagttctgtaggtcctttgcacttaaagcaaaaatgcaagcaagtataggaaaaggtggttctcttcccaaagtagaagccaagttcattaattatgtgaagaattgcttctggatgattgatcaggaggctattcaagatctctggcagtggaggaagtctctttaggaaaatagtttaaacaatttgttaaaaattttccatcatttcatttctgtaacagttgatatctggctgtcctttttataatgcagagtgagaactttccctactgtgtttgataaatgttgtccaggttccattgccaagaatgtgttgtccaaaatacctgtttagtttttaaagatgcaactccaccctttgcttggttttaaatatgtatggaatgttatgataggccatagtagtagtggtggtcagacatggaaatggtggggagacaaaaatatacatgtgaaataaacctcactgttttaaattaaaaaaaaaaaaaaaaagtccaagaataccatgaacaactctatgcccacaaatctgataacctaaagtctaccacccatttatggtaactcagcaaacttggaatagagggggaacttctgcaacttgataaagaacatctacaaaagtcctacagctaacatcataatgatgagaaactagaagctttcctgctaagatcaggatgtcctttctcaccactgattaacatcatactggaagtcctagcttaatattagcagtaaggcagaaaaggaaataaaaggtgtgattggaaagggagaaatagaattgtttttcttcacagatgacatgattgtctatagaaaatctgaaggaatcaactaaaaaatgcctggaactagtaagcagttataatcaagttgtgggatacaagatgaatatataaaagtcagtcactttacaatatgccagcaatgtacaagtgaaatttgaaattaaaaattaaaaacacaataccacttacattagcattcccccaaggaatactgaggtataaatctatctatcatctatctatctatctatctatctatctatctatctatctatctaatctatctatctagaactgcctgaggaaaactacaaaactgatgaaattgaaggactactaaataaatggagatatatttcatgaccatgcacaggatgactcagtattgtcaagatgtcaggtcttctcaacttgatctatagattcagtacaatcccaataaaaatcccagcaagttattatgtggataacaacaaactgattctaaagttcatttggaaaggcaaaagatccagaatagccagcacaatgtttaaagagaagagttggaggactctcacagctgacttcaagagttatgataaagttataataaacaagacagtgtggcattggtgaaagaacagacaaatagaccagttgaatggaatatggagcccagaaatagactcatgcagcctgggcacagtggctcacacctgtagttctggaactttgggaggctacttgaggccaggagtttgagaccagcctgggcaacaaaacaacaccttgtctctacaaaaaaaatattttaaattagccgatgtggtggcacacacctgaagtcctagctatttgggaggctgaggtgggaggattacttgagcctggaagttcaaggctgccgtgagctatgatcacgccactaaactccagcctgggcaacaaagaaagaccttgtctcaaaaaaagaaagaaatagactcacgcaaatacagtcagctgatctctgacagaggaccaaaggcagtactgacaaaggaccaaaggcagtattatgatggagaaaagatagtcttctctacaaataatgctgggacaacaggacatctgcatgtgaaaaaataaacatagatcttacgcccttcacaaaaattaactcaaagtcgatcttacatctaaatgtaaaatgctaaattgtaaaactcatagatgataacaacagaaaatctagatgaccttgggtatggtgatgacttttagatacaaaaccaaaggcacaattcataaaagaaataattgataagccggactttgtaaaaatttaaaacctgctctgctctataaaagacactgttaattaagagaatgagaagacaggacagagactgtaagaaattatttgcaaaagacatgtcagataaaggactgttatccaaaatacacaaagaaatcttaaaactcaacaataagaaaacaaaatacctgattaaaagattcagcaagacttgcaccacacatcaccatacagataacaagacaaaggatgctactgagagacaggactagctggatttcaaatctaggccgactaagaattcctaagcctagctgggaaggtgactgcacccacctttaaacacagggcttgtaactcagctcacacccaaccaatcaggtagtaaagagggctcactaaaatacaaattaggctaaagcaggaggtaaagaaatagtgaaatcatatatcgcctgagagcacagggggagggacaatgatcgggatataaaccccaggcatttgagctgggagtggcaacccgttttgggtcccctcccattgtatgggaactctattttcattctattaaatcttggaactgcatgctcttctggtccatgtttgttacggctcgagctgagctttcgcttgctgtccaccagtgctgtttgccgccgttgcagacctgccactgacttccacccctccggatctggcaggatgtcctctacacttctgatccagcggggtggcacccactgctgctcccaatcaggctaaaggcttgccattgttcctgcacggctaagtgcccgggtttgtcctaatcgagctgaacactagtcactgggttccacggttctcttctgtgacccacggcttctaatagagctttaacattcaccgcatggcccaagattccattccttggaatctgtgaggccaagaaccccaggtcagagaacaagaggcttgccgccatcttggaagcggccctccaccatcttgggagttctaagaacaaggacccgcctggtaacacattaaagaatgtaaattaaaatgagataccaccacatacctgctagaatggccagcattcaaaacactgacaccaaatgctggcaaggttatggagcaataggaactctcattcattgctggtgggcatgcaaaattgtagtcaattttggaagacagtatggcagcttcttacaaaaataagcatattcttaccatacagttcagcgtatacactccttggtatttgcctaagggagctgaaaacttgtccataaagaaactggcacacagatacttatagcacctttattcataattgctaaaacttggaagcagccaagatgtctttcagtaggtgaatggataaagtgtggtacatccagacaatgcaatatttttcagcactaaaacaaaatgagctactaaaccatgaaaaggcatggaaggacccaaaacttattttagaattatagaaagccccatatcttattcaataaaagttattcctatttttaaaaacccatacagtatacatttggaaaatctgaatatcaattatatgttaaacaatgatagtgttgtataaatgttaaattttctgaatgttataattagatttttgcagtgtaggagccagtccttgttcttatgaggataaacactgaaatattgagagacaaaatgccatgatgtcaccaacttattggtgtagcaaagaggcttggcaataacatcatccccccaaatatatatagaaattggcaaagtaactaatggtgattctaagtatttgtattattctaacttttctttaggtataatttttttcaaaggagttgcggaggttaccgtagatgttgtaggctatttgtccatgtcaaattagctaccgatccactagaatgattataagcaaaaagaccgacaataccaagtgttggtgaggatgtggggaaattggaaccctcttacaatgtaaaatgtaaacaggttggtagttcctcaaaatgcagagtagagttaaccataatacccagcaatttcatttctggttctataacccaaagaaatgagaagatatgtccacacacaaaaacttgaatgtgaatgttcatagcagtgttattcataattgctagcagctagcaaatgtccatctactggtaaatgcatagacaaaatatgacgtatccatatgatggagtattattcagcagtaaaatgtaataaacaacttaaacatggcacagcatagatgaatctcaaacaccttattgctaagtgaaaagacaaaagattaagttgtagaattccatttatgtttggtgttaggtaaggtaaatctgttgaaacagagccgtgtttgcccggggccagcaggtggggagtgattgccagtgtgcacaaaggagctgtttaaggtgatgaaaatgttctactttaaagtgatgattgtacaactctgtaaatttactaaaaaaatcaccgaactgtgtatgtacatacattgagtgtgtttcatggtattgtaagcaaaatcttagtaattaaaaggctcttggtttagctctgggtaagatttgaagcagtattaagactccttctgcttttcggggtcctcttaggggcttacggtgagacatatcctgccattgaagatgacgtcctccctccaccatcacagttgccctctgcacgggagcgcaggaggaacaaatggaaaggactagacattgtatgtatgagacttttctcccccttttcaacttagaagaatgagaggtctgggttctgacctgtgctaaatctgtgtggcccaataaagagcacttgcttgaaattcagacatgggtctgaatctaggctctgccttgactggatgaccttgggtagctattgaattctgctgctttggcttcttccagataataatagtattttcttgtctcctggggtggctgtaagtagctcctcatcccaaccttccttcttctcctgcagaatatatggatttcagagaggcacaagaaggaactgatgtcatttattgaaaagcttcataataacctaattctgtgatataggcatcaccttcatttcggtcaaatgacttgccaaggtcacatgggcaagaaggctgagattcaaacccatgttctcctcactctgctccccagctttacaatatagccagtaaaaagtagaggctttggagtttatgtcccagcaatgtcacctccttgttgagtaggcagcttgggcaatttcttaaactctgtgtgtgtttccttatatatgacgtgaagatgcagttatatgtgaagcatttagcactgagccaagtatgcagagacctcaccaagtaacagatgttgctattagcgttattatatgtacagcattaccaggtgaaaatagctttgctttttgccttaggcaaccaccagtctactttggtttctatagatgtgccttttctggacatttcgtataaatgagatcatacactgtatgattatttgtgactggatttgtctttcttttgaaggtcattcatgttgtagcatgtgccagtactgaagcctctttagtgttgaataattttccactgtattagtatcccacattttgtttatccatttaacaatagatatttgggttgttttcactttttagctagtatggatactattaatgttcatgtagaagtttctgatgtttttattactctcgaatatatatacctagaaggaaattgttgggttatatggacactttgtatttagcattttgaggaagtaccagacttttccaaagtggctgtaccattttaccttcccatcatccactgagggttgtaatttctgtatatcctggccatcacttagtgtcttttgattttagccatctattgagtgtaaagtggtgtcatggtggttttgagttgcatttctgtaatgatattgaacatcttttcatggtttattagccagttgtatattttcttaggagatatgtctattcaaatcctttgctgatttgtttttttttttgttttttttttttgatacagagtcctgctctgtcacctaggctggattgcagtggcgtgatctcagtgcactgcaccctctgccccagtggggttcaagggattctcctgcctcagcctcccaagtagctgggattacaggtgcatgccaacacgcctggctaagttttgtatttttagtagagttggggtttcgccatgttggccaggctggtcttgaactcctaacctcgggtgatccacctgcctcggcctcccagagtgctaggattacaggcatgagccaccgcgcccagccctttgtccattttcaaattgaattgtctttttattgagttgtaagagttcttttacattctcactacaagtctagttatcaatgtgtgattttcagatcttttttcccattctgtatctttttaactttcttgatggtgttctttgaagcacagaagtttttaattttgatgaggtccaactcatcactctttcttgggcttttggtgtcttaattaagaaaccattgccaaccacaagatcatgaagatttacttgttttctttcagtttgttcttaattgtaggtccatgatacactttaatttttgcacagggtgtgaggtgcaggggtccaagtccattcttttgcatgtggccatccagttgttctagcagcatttgtttaaagactgttctcccactgcattttgttaactccgtccataaacgtaaggatttatttctatattcttcttaatcttccattgatctacatgtcttttcttatgtcagtaccacactgtcttgattatagctggactaagcccctgctgcttcagttttttccttttgtgtcctataattctcaagctttatcctgactggcagcatttctgtcatcacaaatgttactccttatccttgagagtcatctgagcttgcatggataagcataggagccataatatacgtgctctatattttcatgttttattttgttcatcacagtgtacatttgagggcaagaggatgttttgatttgctggtttttttctttttttttgagatagagtctctgtctcccaggctggagtccagtggcacaatctcagctcactgcagcctccacctcctgcctcagccacccaagtagccggggactacaggcgcctgccaccatgcccagctaatttgtatttttagtagagatggggtttcaccatgtttgccaggctggtcttgaactcctgacttcaggtgatctgcccacctcggcttcccaaagtgctgggatcacaggtgataggcaccatgcctggccctgattcactgatttgtgaacatattttgtgttaatgactttctgaagttctgttttctaactacaggatagcagtcgtcctaatgtagcaccagatggtctctctctaaaatctatatccagtgtaaatgttgatgagcttagagtgagaaatgaggaacgaatgcgaagactgaatgaatttcacaataaacctattaatacaggtaaatgaccaagtgtaatggcctatagtagaatcctgtatgaacttttaaactttcttactcaaggctttcactaacgtctgagggatagatggaatgagtttgaagacctttgagttgtatggcccaagacatagtaactattgagcaaaaccagacctcaggatgcagtttgcatcagattttctctatcagagagggtgcccattttagagtggagtctaaacaggtaaaatagtttttgcttattaaacatatccaggctttgctttcagcaaagaaaatgctatatgataatagtaatcactttactaaagtaaaacattattagaaattagcctaaagactttgagttctttaacacttatgctgtatatttgcagtactacaaagaaaatttttaccttcttctttggctttccacaccatggacaaagtctcagaagtcaaataaagctagtcgtctcctcattatgagtgcatttttgtgacttgcaggttaaagctagtcatagagcacaaggcaggatggttccttagacacctaacaagctaccctgccagccctacaccacccttttctataccagtgctattagtcaccgggataatgggacactttcatattggtaataataatagttttagcaaattactggagtggtctatttgggaaatactctttagtctgttaatctacattacaataatctgttaagatttttttagatcctacctttaatactgtgttaatttaaaactgtactcatatactatctatctagcagtcaaggtgtggtgtgttctaatggtggtaattccacaccaaacacaaagcagacatggttaattgatgggacagtaggaaaggatgtctttccagctataaggcattttcttttagacccaacaaactgaattaatatttaacaggaatatatttgagggaagatagcattttaagaatctttttcagaaggtttttaatgtctacactgttttttaacattgtcctttcaaacaggagctttttgttattatgtggattgactgcacataccaatccttcacagaccaggagaattaaaaaaaaaaaaaagaatatgatatcacagggtaggaagacagattttcctattattatacctaataataaataaaagtaaaatacagatagaagttgcgtacaatcaatcagattcaattaaagaatgaagcaagagctacctcttcattgactggacacggccttgttagattaggtgttttaagaatggaagtaatctcatgccaactagtgttttcccaaaataacttaataatttccttatagcagtgttgtaggttgaagagtattccccaaaccttgctttaaaaaaaataaaaagaaaaaagaaagaaattttatgtgtagccattaggcttctcctgaggtaacagttacaaaataagactacctacattcctcctgttgactttgttttatggagaggtgcctttgatatgcttagaatccctctggttgctagtgccatggagtcagcttactcagttgatcattttttgttttacaaaattggcctttgtgggcccactctcctccctctaaaatagggtggggtggggtgagtctaaccaaaacaaacaaacagtagagttcaggatatgagactgtggggaaatgctgagttgtaatgagttggactacaagagacctgcgcttatgtctcctgcctgccacctgtgttacctgagccacgtgtcccttgcctcctgtagatgatgagagttcactggttgaccctgatgacatcatgaaacacataggggatgacggatcaaactctgtagcaactgagccctggctccgccctggcacttcagaaacgctgaaacgtttcatggcagagcagctg

SEQ ID NO: 15528 - DNA, 31195 bp, Homo sapiens
agctggagccttaagagcgggatgtggagggcggaaagtgtttttgtgtgggtataggtaccttaaatgagataagtttgttgaaagactaaaaggtaaggctgtctgttgtacaactgagctaaaagtcgttctggaagctggttgagaggaagataaacatggcattcccgtttacttcaagatgactcactgtacatgcgtaaaagctaacgggctcgtggtggcttggcacttcacttgcagatgggctttttctatcgatgcgaggaggcagtgggtactccttgattgcttttttgcgctttggtaaaagttaacatctacgtatatataatgtgccattactgatctgaaaatgtccagtactcagttctcgtaacaggttacagttaaatctttggcactcctgtgaaccgcatttgttcccaaagcgtaattaatctgggtaactggtttgttttcttcctacagttaatacaatgtttaatttttttattagttcacgtgttttaggttttcttttttctccatctcattcttccatccgtgcaagattttaagtttcaagacacagggagcaggtctgcgttccttgttttatctcctagcacctagcataggtgttcaagatttttttttcttttatttcctgaaaagatagcatgacaggccaggcgcggtggctcacgcctgtaatcccagcactttgggcagccgaggcgggctgatcacttgaggtcgggagttcaagaccagcctggccaacatggtgaaaccccgtctctactaaaaaaatacaaaaaaaaattagccgggcgtgatgatgtgcgcctgtagtcccggctactcatgaggctgaggcaggagaatcgtttgaacccaggaggcggaagttgcagtgatccgagattgcgccactccagcctgttagacagagccagtctcaaaaaaaaaaaaaaaaaaaaaaagaaagaaagaaagaaaaaagaagaaaaaagaaaagatagcaccacagctgttaacaacctggcccctatgcacctcttccagcttcatctctttttagtccccccttgaaacttttcattctagcaatgcagatatctttactttggctttgcatatgtggtcagcattgcttgaaacgctctttcgtaaattttctgcctgggaactcctattaatctttaaaaatgcagtccagtgagatcgaccacgaactctttcttgacgctccaattaccattccttccattatgtctgtaagtctccgtaggtgcttctataactgttacaatgcgttgtaataatcagttaagacaaaaacattagaattattgaatccacaccacagcttgctgttttggcactgactttccgttgaagaaaatttcctttaaaaccatcttacaaagaaatttagggtaaaatagtacattaatacctacccttagttccactctcctgggaaactagaggtctcttttctagtggtagcatatggccatatgcgattgtattggggtgaactgaataatatgttgaaaatggtaatgaaagcccaggacccaacgttgaccacactcctgggctaggagtaatgccctgagaggtatgccaacacttttcctctcactaccacccctccccatttttctttccaggctcttacactgttcctaagctggctggtgcatgggaggctggagaggctgcaatagatttagcctgagaagtggcccccacagtttaatagcccctgggcacagcaggagaacgagttgaccaagtccccggccagcgtactggcgaaccgagagcagcgggcagctatgcggcctccaggacagcagggggcgatgtcttgccgcgcggccgcctgcagtgggggcggggccgtacccggcggttggcgaagggcgagcggagggctgggcctgaggggcggagccccggcccggaggtctgtcatgctgttcccgctccaggtggccgctgtaacctcttcggtccgcgacgatcctctagagcactgtgtgtctccccggacgcgagcccgctcccctgagtaagagtcagccagccgcggatggggagcgtgagtggcgaggtgtggcctggggtggtgtaggttgagggtggagggtcctggggctgcattcgctgccccggagcgggggcaggggcagtggctccctcggggcgtaggtctcgaggcaactaggccggcgacgtgccagagttacaggctctggaatctgggggtgggggtggggtttcttgtcggcagggggtctcgtggcggctgggtgcggtgggggaggtgcccgagttaagggtgtggagagttgggatttcgccgccgtgaggccggcatcggtgactacgagttatgagggttgggggcgggagttctgtgagcaggggtcttgcagctgccggggtcggggaggttccctggttacacggtccggattcctgggccactgcggtcgctgctgcccgcggtgttgttgatagctggttgcctgacgacgcttcctagtcagccacctccagggcccgggggcgagcggttccttggttcccatgcgccttctctccccaacggccaggccccccctgctccgtcaagcctccccgagcgcctttcttgcccctcggtgcttgttattgttaacgtgggagcgcttgtgcgcactgctttgctagtaaaacttatttaatcttcaccgtagctcgtagctcgtactgttgtgaccgtatttccccccgtgattgcccgactgcttgagcttgaacctcttgtttctaactgccttgattttaggaatcttatgtgggactcaaatccagttgtcagtacatgttattaatgggactcatcttttgagagaggctagctctcaagattgtaggattaagacgcttaactaggattgcggggaagactaaattctgaagtaaaccatcacctactttccaaacaccttggaaaatgcaggggcttaaaagcaaccgataggaatttataaaaagcctaaattaggctttattctgtgtgaaggaatgacttgtaatgttgacaagctccatggaagctattgaggtattttcttttctccatatcattcttctccctaggaggtcgctagctttctggtgattaaatgtctgctgaaatgctccacaaggatcaagtttttttgtttgtttgttttgttttgtttttggagacagggtctcgctctgttgtacaggctggagtgcagtggcattagtagagaagggggtttcaccttgttggccaggctggtctcgaactcctgacctcaagtgatccgtttgcctcggcttcccaaagtgctggaattacggccctgagccattgtgcccgttcaagtttgggtcttctgccagatggccgcctgggagggagtgggtgagtttagacagagtaaattgaaacaggctactttcggtacagtttttctcagatgaagctttcagacaaatatgaattaactgttacacatttgagcagatttcagattatccttttaacatcattctgacttaggttctgatgtactttcctgagtggcaggcaagggtgtttgagcaagtgtttcagcaatttggcataacccaaaggctaatttatgctactgccgttaatcaccattaagggtgtattattaatagctactgaaagacttcaacatggttttatatatttattcactctctctttgtatcctgtctcccagcctccctctctttcccccagcaacagtatttacatcttagcaatatttagggaaatttgtcaaaattttggtgtacccatgggaggaagttgctcatgtggatgccatctgccaggaggaagatggagaacctttcattcggtagatggatctctggatggatgagaagtgagaaacattgtcctggtcactttgtccctccctttcttctaaagctctttcactggcccctccccccaccgcacatgttatcacactttgacacctgttctaggtcctgttcccctactctagggtctctttttccagacaaaactcttctcccacagccttaatgattattttaaacactgctagatctttatttccagcctgggttctattctgagttgtagacattttcagattgatttcttcgtatctccggtgtatccattatggatatctcacattcagctcctaaacccctgtcagcctctgtagcagggggcattatcttgtccaaatttgaggacaagaatcatgtttatatatatacatatatatacacacacacatatatacacacatatatatttgttttttgtttgtttgtttgtttgttttttgagacagagtctcactctgttacccatgctggagtgcagtggtgtgatctcggctcactgcaacctctgcttcccattttcaagcaatggttctgcctcctgctacacccagctaatttttttattcgtagtaaagatggggttttgtcatgttggccagcctggtctcaaactcctgacctcaagcgatccgcccgtcttggcctcccaaagtgctgggattacaggcgtgagccacggtgcccagccacattttatatttttgactacgccagcctctagcacaatgtcatgctttaggagggaagtcattttccatttctcatgctcccatagtggggaggaaatttgtactccactccttgagagggaaaaggataggagcaacattttcccatctttttgtgactgatggatttgggagaaggaattgggcaaactcagttttaactgggttctgtttgtttattggatttgactagacttagcagaatgggtatgctctggtctgcttatatctatatgataagcataaagagccaaaggttaaggtttagagatgttggtgtggattatgataaccaagtatcaattattgattatttaaatctcagcatactttacgtttgcaggctctgttttttttgtttgtttgtttgtttgttttggtttttgagacaagagtctcgctctgtcacctaggctggagtgcagtggcacgatctcagctcactgcaagctctgcctcccaggttcactccattctcctgcctcagccttctgagtagctggaactacaggcgcctgccaccaagcctggctaattttttgtacttttagtagagacggggtttcaccgtgttagccaggatggtcttgatctcctgacctcgtgatccgcccgcctcggcctcccaaagtgttgggattacaggtgtgagccacaacgcgcggctgcaggctctgtttttaagaggtaaatcttcatatatgcaaagactgtaaagatacaaccataaacaataaaagaattgatctgttgatttcttttttttttttttttgacagagtattgctctgtcatcgaggctgtagtacagtggcgtgatctgggctcactacagcctctgcttcctgggttcaagcaattctcctgcctcagcctcctgagtagctgggactacagaggtgtgccaccatgcctggctaatttttgtatttttagtggagatgggttttgctgtgttagccagactggtctcaaactcctaacctcaggtgatccactctccttggcttcccacagtgctgggattacaggcatgggccactgcgcctggcctgatctgttgatttctaagtgttaggttctctgtcataatttttatatgcattattttcttttttcttcataatatactagaataaatgatatttctgttttatagattaggcatagagcagttaaggaacatgcttgaggtcattcatgttgagatcaataagtgatagaagtatatttcaaactcagttctttcaattaaactattttcctgaaaactgtttatcatctacatactatgtacacagctactggagaaataatacttggccatgatgtcttgaaaaaagttgtgagtgactttatattgtagagtgtcatatataaataatctcatttaggtttctttcagctgatttatttttggcaacttaatccttaaattataaactttcttactctatattgtacctatgccatatttattaacccagtctctgtgattcaccaagtaattcttgaataattgtgtagttgaaatatgttttctgtaagttaccacatgcttttaggagtgagaaaaagaaaagtggccgtgatatctagaaactggtattgctagaaactagcctggcattcacagtaactttgtgtttttctgttgaagataaactattgtacagaatgtcaacatcagataaggccgctctgtgtctatgatggatcaagacaaaaacattccatcagtgtctccaaacacagacaaaacgtaaatattgtccaagaaccgagataccaaacattccctttcccagctgatgtgaatgactactgcttgtttaccagttacagcattagcctccccctatattttagatttattgagtggtaccatcatagaattaaccccacttctaacagtgttcaatcctgagcaaagctccacttcctcaaattaagccttcccccaaatcacccaacacatataagtcttttccaataccctcttaccacgataccacagggttccccatggtgtgtgttctccgtgcattccttaatgcaatgagtagtacatccaacttaactgtggtagttttcctggtgttctttggctggagatcattaccaggagaaagctcattagtgtctttgactctttaatattaaagtcattataatctaatcagattagatacaggaaaaatttagaaatgattagaaatgtacttatatctcggataaatcttatgttttagttatggcatatgctatatttactatggttgtttaaaagtatgttttatttgtactttttgtacttttgattactgtaagttaaaatcagttctataatttataatgttaaataattacagtaaagagaaagataagcatctataaattcaagagggagatctttcaaagcctggttagaacaacatgtaaatgaacatgttaaattaataattgttattaggtggtatggaaaccttagttccatgtgaaggtggcatgttactgttttttttttctttttagataaatgacatttcttttttttcttttctttcttttttttttttttgagatggagtctcactctgttgcccagactggagtgcagtggcatgatctcggctcactgcaacttccacctgcctggttcaagcgattctcctgcctcagtgtcccccggtagttgggattacaggtatataccaccatgcctggctaatttttgtatttttagtagagacggggtttcgccatattggccaggctggtctcgaactcctgacctcaggtgatccacctgcctcacactcccaaagtgctgggattacaggcgtgagccaccgcccccaacctagataaatgacatttctgtttaaattctgtgcaaaattctatagcaaaatatatgcgttatctcatcattttattcctatcagacatagaatatttagggaagattagaggattttgaggattgattgttttaaacatgaaaacttgtttgctgttgagttcagaatttttactaggaaaaatctttcgtgactattagcaaattaaaaatggctgaaataagtcgggacggtggctcacacctgtaatcccagcactttgggaggccgaggcaggcggatcacgaggtcaggagattgagaccatcctggctaacacagtgaaaccctgtctctactaataatacaaaaaaattagctgggcatggtggtgggcacctgtaatctcagctactcgggaggctgaggcaggagaatggcatgaccccgggaggtggagcttgcagtgagccgagatcgcgccactgcactccagcctaggtgacagagcgagactccatctcaaaaaaaaaaaaaaaaagctgaaataagctgagtgtggttgctggcagttataatcccagtgattctggtggccaacatggaggatcacttgagcttagcagttcaaagttacaatgaactatgatcgtgccactgcacactagcctgggcagcagagcgagacctcatctctaaaaaacaaaaaacaacaaaagaaattggccagaatttatcaacttttgttgatttgaagtatattttgctaaaactatatatgtaaatatatatatatatatatatttctatttttagtgtttttttttgagatggggtcttgctctgttgcccaggctggagtacagtggcatgctcataagctcactgtagccttgatctcctgggctcaagtgatccaatcctcctgcctcagcttccccaatagctgggactacaggatgcaccactatgcctggctaattttatttttatttttagtagagacaagatcttactatgttgcccaggctggtcttgacctcctgcgctcaagtgatcccacctcagcctctcagagtgctgggattacaagtgtgagccaccaagcccagcctacggctatgttttaaaatcagtgtttcttttggcattacataatggcgtgaagtttacattaggtactgtttacctgttataagtttcaacatattcttttaggtaaagcctgcttttctacaatgatatatatatatattttacaaattattattgtcccaaacattaagttcaggggatactttttttctttaacttgcttgcatttgatattgtttaccagttctattttgtacctctttcctcttttcctcaactaattatgctgattgggtttgtttcatatccctgttttaattattatttaattattccctctgttttttttttttcccccagcttcaattcttctgtcactccctcaagtgaacattggctgttgtttagttctgggtcatctctctttttccctccctgtgctcatttactgtggcttcaactgttacctttaaaatacatagttaatgtagttcattttcttgaatttgaatcttgaatttctaaccgtctactgtaaatttccagtagcacatcttactagctccaacttaacatatgtaaaccaaacctttctaaatcttccaacttgctctgacttacttctgtccaagattctatccacatttagcttccaggccttaaaactttgatcattagtggcttcttttttgtctacgtacccaattagatgctaactttaatgggactttggaagatgtgtttggaaaaaaattctaggttaaatgaagaaaggttagtcttttcaaaaaatggtgctggaatactctattcatatgcaaaaaagttgagccttgacacttacagatttgcaaaaattaactttgaatggatcacagacttaaatgtaagagaaaaaactaaaaacttctaaaaggaaacataaaagaaaatatttgtgatcttgggttaggcaaagattttttttagctgggcgtggtggctcacacctgtgatctcagcactttgggaggccaaggcaggtggatcacaaggtcaggagattgagaccatcttgagaccatcctggctaacacggtgaaatcccgtctctacaaaaaatacaaaaaattagccaggtgtggtggcgggcgcctgtagtcccagctgctcaggaggctgaggcaggagaattgtttgaacccaagaggcggaggctgcagtgagattgcgctactgcactccagcctgggcgacagagcaagactctgtctcaaaaaaaaaaaagattttttttagataggacacaaaaagtacaaacaaatttaaaaattgataaattggacttgataaaaattataaactttcactgttaaaaatatatcaagaaaacttacaaaccacagattggcagaaaatatttttacaaagcaagttttgtaaaatattgctttgtaaaaataaagcaagtttaataaatgacttttatcaagtgtatataaagaaatcttacaattcaatggtaataaaacaacctgctgggcttggtggctcatgcctgtagttggaacactttgggaggccgaggcaggaggatcacttgagtccaggaattgaaggggtaacattgagctatgatcataccactccagcctgggcaacgtagtgagatcctgtgtctgcaataaacaaacaaatgaaaaaactagctggggatggtggtgcttgcctatagtcctagctgttcaggaggctgaggtgggaggattgcttgagcccaggagttcaaggctgaaggtgtactatgatggcaacactgtactctctagcctgtgaaacaacgagagagcctgtctcaaaaaaaaaaaaaaaaaaaaagaaagaaagaaaagctaattttaacaaaagggcagatttgagtagatactttcccaatgattatatgtatggtaaaaaaatagatgaaaagatgctcaacatcatagttatcagagaaatgcagattaaaacactcagagagataaccactaaataaatacacaatagaatgactaagataaaaatgactgaaaatatcacgccctggcaaggatgtgtagaaattgcaattgtcattacaacccacatacattcttatacattggaatgtaaatatggtactttgtactttgaggaacagtttagcagttcaggaattagacaacatcttgaccatataataaaaaataacatcactaacaaggggcaggtaaatatcacgtgccttctctttgtgacaccttaaaatttcacctaatatttctggtgagaatgcataatctaaatttagtcattaagaaacatcaggcacaccctagatgagggatgttctattgaaaaggatgttctgttacacaggattcttttacctgtgtaaattggtaaaagacaaagaaagatggtagagatagatattccaaattaaagaaggcaaaagagatatagcagtgaaatgcaatcagtacctaacttagatgggatcccgaattagaaagagaaaaataggctgtaaaggctgctattgagtcagttgacaaaagtggaatatggacaatagattaaaaaatcagtgttacaaaagttgataattatgttgaggttatataagaaaataacccaattcttaagacacacacactgaagagcttaggggcaaagggctatgatatatatactttattctctgaataattttagaaaaaattgtgtttgtgtgtatggagagaatgaccttgtgtgcacaagcaaaggatgaagcaagtggagccaaatcttaatagggaattaataaagactctttgtgtgttcttggtattattactgtaacttctctgtaggtcagaaattatctcccaatatttaaaaaaaactttttttttgaagtgctttggcttaaggatttaaagagctttttgtttgcttgccttcgttttttgccggagagggagtgtatatggagggtggtggtagtttttcattttctttttatttcagatattttaaagtatattgtaggctttttggggaagctgggagaggcagtaggcaggcatatttatgatcaatcttaagtttgaatttctcaatttgataagtgagattgaaaactaaatgtggactaagcctacatgttgataattaggctaaaaatactgtgatatagatacgctcactgaaatttttttttaaagaatctgcaaaatggctgataatttggatgaatttattgaagagcaaaaagccagattggccgaagacaaagcagagttggaaagtgatccaccttacatggaaatgaaggtaaatttaataattttctttgaacatgttttattataattgtctatggagattactcctgtgtaaatacaaaacatcctcttctatgagtgagaatcttctgttttgtagtatgctgtcattctaggagcctgactccagacaagattgcagtaattttgaatgcagtttttcttttgtggtggtttatatctcacagtgtttctcttatctcttgttgaagaattatttggttataaaatgattatgagaccagttctattacaaagaacttccacaacataaacagaatagttgtaaaagcaagtttatagtctatgtgaaaaaattcaatttaattagtttaaaaagtttttttgaaatctgaaaaagtgaatttattaatttattttgtactatttgtgtttcttaatataaatttcttaaaataattgcttttttttttttgagatagaatctcgctctgttggccaggcaggactgcaatggtgtgatctcagctcgccacaacctccgcctcccaggctcaagtgattcttctgcctcagcctcatgagtagctgggactacaggtgcccgccactatgcctggctaatttttgtatttttagtagagttgagatttcactatgttggccaggctggtcttgaactcctgaccttgagatccacccacctcggcctcccaaaatgctgagattacaggcatgagccagtgtgcccggcctaaaataattgtttcttaaagcaatgtcttaaaggctttcttaaagctttccttgtttaggtgaaactgatttatccatttagcaaatacttactgagattgtgttaggtattatgctaagctctgagaatgcagcactgattagagtgttgtggcaccttctcagggctcagtgtatgtaataagatacagcatgtagtttaatctgtgccatatggttcatcataatgacagtaaccatatatattggtttgttcaagatgatcctggtttacctgttgtccagtgtttttttctggtttagcatttgtcctggacaaaggtaccttggctgagatgataaataatatagataccctgattacaattttactcacatggctaacatttattgagtactagctatggacaaggcatattcttaagaggttatatttcacagtaatctatgaggtaagtgctgttattgtaattttccagatgagtaaactgaggcaagttaagtaatgagactaaggcagtagagttggtggaactaggctttgacccctggcagcctggcttcagtgcttgtcctcggaaccaacataataggttgcctttcttccagataacctgtcatgtaccaggaatgccaaggactttatatgtatcattttatttaatcataatatccctgttaagcaggtgaattttttttgttttatggattaagaaagtgaagctcacaggagttaagtaatttgtccaggtccacacagtggtggattcaggagtggaacctttatgcagctccagagtctatctcttaaccactctccagtagttaggaccagcttacggctttggagttacatgatttggagtacatagctttaaagacagttttgttataatttctaacattaatttgtacataaataattttaagtcttagttcaagtatcacctgctcagtgaggccttatagtcccccagcatttctgggcctccttactttaatctgcttttttttttttccataaccacttcctgccactatctacatatcacataatctaatcatgtgttgagttcattatgtgtccccccaatagtttataagcttcatgatggcagaaattcttctattttttaaaactcttatactttcaatgcttgacaaaatgtttggcacttaatgggaactcagtaaatatttgttggtaagtgaatgagttaaatattagaatatctattataaaattaaaatacctttggctaattcctcaaaccttacacttaatttcttctatgatgtactgtgtaatttcatcaagctgtttaattaaaatttgagatgagttgtatatttcatggttttttttttcctcttgcttttgtaaacattatgtctctttcagggaaagttgtcagcgaagctttctgaaaacagtaagatactgatctctatggctaaggaaaacataccaccaaatagtcaacagaccaggggttccttaggtatgtcattagatgtgctaaacttattttaagatatccttagtgggctcttctgaaagaggtttgtcttgtcagaaaaaaagatttatttggaatcctagtagtttttctttctggaatcttacgtaagtcaatatggtctacatatgaaatagaactcatactgaaaactttgtacttgttttatgtgatactgcattggttatgatttatggaacttatagaagaaggtgtgtataacataacttaaaaattgaaaactttgaaaggaatttgtgtgtgtgagagagagagagaagagaaacttttatttgttgattgaaaatggtgaacttgcttatttaaaaattaaagaaatatgcttaaagggtacaaaatgctgtttggtgaaagactattttaattattgatgatcatgttggaattgtaaagaagttaatactgtagccatactaatgctttgattatggtatggtatgaaaatatttggaaactttttaccacattttggcttgttggtaggtatacattttaaaaaaagaaaatgtatgaatatgtaaaaatttttgtttatttattaaagacagggtctctctctctctctctctgtcactcaggctggagtgcagtggcatgatcatagttcagtgttatcttgaactcctgggttcaagcaatcctcctgccttggcctcccaaagtactacaattacaggcctgagccaccatgcccagtctgtatgaatatatataattttttttttttttcttcaaggctgagtctgaccctgtcgcccaggctggagtgcagtggcacgatctcggctcactgccgcctccacctcccaggttcaggcgattctcctgtctcagtctctcaagtagctgggattacaggcgcatgccaccacactcagctaattgtttatatttttggtagagacagggtttcgcagtgttggccaggctggtctcgaactcctgacctcaggtgatctgcctgcccgcctcggcctcccaaagctggggttacaggcgtgagccactgtgcccgacctgtatgaatattttcaatgtgcattttgtgatttattgatgatgacaaactttttcacaaaaagaaaatcaactatgataagttcatttgattaaagcattgttctcaaatggacagcttttcatggatgtaggtatactcctaaattgtttttgtgtgccagtggatacaaggggatgccggccaagaaactggatagtcagtaagctttgtctctgcattagacaaatagctcaaagtgagtgccctacttttaatatcagatagataactctttccattttgaatctcttataaattattaatatacagcattagtgaactaaagtattatatattggtaaaattttttaatctctaaggctctcaattttttttctgtgaaataagtttgattatcttccagccctacgtttttatgaatctaaattttaattattccaagagataatttttaaaaagtttaatagtaggttatctcaagcactaaggtcgctaaggttagacagaatcccttttaaattctagggttacagcttgctttggattgggctgtgatgcctttatgacctgtcaggagctacactttgtttccttatcttatgacatctatctcaaaaagtcgttatgggcgaaagttaaatacgtgaaaagatggctggcacgtaattggtacacaataaatattaatttctttttctccttaacatcttttttttttgagacaggatcttactttgtcgcccaggctggagtgcagtggcataatcttggctcactgcaacctccactgtccaggcttaagtgattcatcctccctcctcagcctccaagtagctgagaccacaggtgagcaccaccatgctggctaacttttttttatatacatatattttctgtagaggtggtgtttcgctatgttgcccaggctggtctggtctcgaactcgctagctcaagccatccgcctgcctcggcctcccaaagttctgggattacaggtgtgagccacttgtgcctggccttccatctttttaaaagtagtttttcgggctgggcgtggtggctcacacctgtaatcccaacactttgggaggctgaggccagcagatcacttgagatcaggagttcaagaccagcctggccaacatggtaaaaccccatctctactaaaaatacaaaaaaattagcccagcatggtggcgcaggcctataatcctagctacttgggaggctgaggtgggaggatcacttgaacctaggaggcggaggttgcagtgaccgagatcatgcccctgcactccagcctgggtgacagagagagactccatctcaataaaaaaaaagagtagttgtttgaattgtcttaggaattattctttgatcattacattcacatattatggagagttaacagtataactgaaagatggtgacctctgccttttcattaattggtgttacttcggcctctgacctaggctgacttctcatcttatacattccccgagtgtccatatctgctcacagggctttatttactgttagtgtgttcatgacttctgaatctgtatccccagtcccaggttctattgcgaacttgacccatatgtctgattttccattggacatctgtacttgtatggtcatgtatggcatgggctcaaaatcaaaatttgcaaaattaacttatactcttgtcaaactttctagtgctccccatctcactgagctggctgcctagtcatccttgattcctgtcttctcctgtctcctatatcaagcagttacacaagtctagttgattctaatgcataaatctcaagtaaggtcactctgctgtaatcccactgactttcttttatgaggcctctgttgtctgtcagatttttgtaaaagcttcctagtgtttttggtggttgttttgttttacagtctagccccgtgtatcaaatctctatgttttctatatatttgcataaaacaaatctgatcatattagtctctgcttcaaaccctttgatggcttctttttttcttatatgataaatttgccatcttaatacttctgctagattgggttggtcaatcctgtcatgtgcttctagaggatttgttctcctcttgaagagtagttttgaacttattcagcttctcttttgtaccacaatgacatgccaacttgcatcccgttgtatttccactgcctagcacagtgcgcagcacttactgcttggaaaagttgttttaaaccaacgggttaatgtccccattgcaaaaataaaaccaattctcttgggtgtgttgactttaattttcatggaatgcttcttccattgccatctgaaaccatttgatgcacatggaattttattaaagaacaatatataattgactaattttatactgcataagcatttagttactgacctcctgcctgattaattgtggctttaaaattcagtcaaatacatagtttctcacactgggaaaaatgtaaaattatttggcaactaagggttttccttaagtggtctcatttaggaattataaaaaacaggtctaatataggtcagatttggaaatgaggtattgacttaaagcactgtaacatcgtagtttgaataagtaattaagcatagtgtagtaatcagtgatatataaactggacatactcattttatccaatgaaaacaatctattgatagctcatagtacaactatcatacaacactatgattttataaattcttttctgttagatactgatgatattcatggttaattccatgtggctctttctaccaccatttatacctttcataaaaggatttgaggtagcgttacagtgacttctgacaccagctacctggagttggaccaaacttcacaggttaagggcataggcctccacaagactgccttcacttcagactccagctgcaagttcaagggtcaccaggacaccttcaggtctgaccatctggctataaatttgggggtttcccctatcccctcaagttcaataattcataagaatgactcacagaactcaagaaagtgctgtacttatggtcacagttttatagcataagtatacaaattagaaatagccaaaggttgagacacatagggtaaggtctgggacggtccaaacattaattatctgttagtctcagggagacattaccctcctagcacatcagtatgtgacaggatacagaatattgccaatcagcctcacctaagcctgagtgtccagagtttttactggattttccttatgtaggaatgattggttgaattgttgctccttggcttgatctccagccctgctgtattcattccccttaggcctggctgatgtcacatggcgcaaaggcccaaccctcaaatcacatggttggtttttctggcatgaccagctcccgtttttgtcttctctgtagcataaactctctaggggttcacaatgattcacttcgttagtataaactgttaggtatggtccaaggtacccactgtgaataataaagacattcccatcatctggtaaattttaaggtcaaacccactaggggctcacaatgatttacgttgttcgtgtaaactattaggtgtggtccaaggtgtccactgtgaataataaagacattcccattgtctggaaaattttaaggatttagaggttacctcccagaaactggagacaaaggattcaattttttttttcttttttcttttccaagccaattttttaattacacataggatgtacatgatttagttcatataagctaatgaaaaaatgtctttaataaggagtttgtcagaatactagtaatattaaattaagagaaagtcacctgaaagtgatctataaaagatcttttatctccctaaactgtttctaggcataatgtttgtgtttatttcattaaaagaaattcttactaacttattattgtttaacaaccattactggtattattaacaataatcaatattgttgaaatacttatattaatcatttaaatgctcccattaatcttttaaaaatgttttgatacaaatgtgtcaaggtcttaaaacatgtagtttctccccaccacccagtttttttaagggagaggatcttgctctgtcatccaggctcgtgtgcagtggcaccataatagcttactgcagcttaaaactcctgggctctggggatcttcctgcctcaacctctcgactagctaggactacaggctcaggccaccatgcctaatttttaaattttttgtagagatagagtcttggtatgttgccccggctggttttgaactcttgggttcaaacgatcctcccttctctggctcctaagtagttgagactataggtttgtgccactgcatctgtctagttgtagttttaattatttgttttgagatagagtctcgctctgttgcccaggctggagtgcagtggcgcgatctcggctcactgcaacctctgcctcctgggttcaagctattctcctgcctcagcctcctgagtagctgagattacaggtgcctgccaccacacccagctactttttttgtgcttttcatagagacagggtttcaccatcttggtcaggctggtctcgagctccttacctcaagtaatccacccaccttggcctcccaaagtgctgggattacaggcgtgacccacagcacccagccttgtagttttaattatcattcctctttgtcttaggtttatcctattgtaaactaaatcacagatactcttctacagtttttattcattttgtatgagtgaaatgggtccttgtagtgatacctttatagctgaaatttaagagtacagtgtctcctcaattagtcacatctccttgtaagtcacccattgtgtaaaggcctattattatttcctataatttgtcttttgattatttttacataatgctttttcatggtagtataataatgaaaagaaagtaaatgttctatggtaatttgtttcatagagtaattatgatgaatgctctgttagaaggtaaattaattatgaagaagttatatactttagtcttaagtattttatgtaagccacaactgttatagaaaccaaatacttctaattactatagttctgaagcataatgttaactatcttagggtcattgatgttatacttgatgaagtgacatcacttcaaatgaccctaaaatgacacaaatgctttacttgctgctagatccatcagaagacaacaggcacaataagtaagcctcaccgtgttccttagctcattaagtcaattgagatgctattgttaatgcatggtttaaaagaataggatatttacattgttctatacagttcctaattttatgtctgtgacttacctctaatgccataaaatgttggtacaagatgacaaaataagaattaaaaagttagtgttttctgttgactaaacattaaattaataaagttataaataactcagaaggcattatatattgttacttgtcaagacaattttacaatactatttgaattaatagtgaaaaacaaatactcttagtaaataaaaatttaacttaatatgaataataggccgggcgcagtggctgaggcctgtaatcccagcactttgggaggccaaggtgggcggatcatgaggtcaggagtttgagaccagcctggccaatatggtgaaaccccgcctccactaaaaatacaaaaattagccaggtgtggtggcaggtgcctgtaatcccagctacttgagaggctgaggcaggagaatcacttgaacctgggaggtggaggttgcagtgagccaagattgcgccactgcactccagcctgggcaacagagtgagactttgtctcaaaaaaaaaaaaaaaaaatatatatatatatatatatatatatgtatatatgaataataatgtaaatgaaaatgaattatgtttttctttccattcttccacataaacccccaagtagaattgaaaaacagcagtaaaagccaccttaaacttacactttttgtaaatttgtaaattgcttgttcctggatgggcaggtagtgtgttggcatcatcctggcagcattgttgtcttttactccttggcacaatagaacatccattgtgaccctgtgtgactagtgatatgtaactttggtaactacctctctctatgcagtcagaccgctaacaggagaaatggaatattaagtatagtatattgttccccctcaccttttctcatttcttcctctgtctcaggcactcattcatatattcatttgcagatttattcaatgaacattttcttgggttaaagttatgtgccagcattataaaattgaatagcgcatgggccttgccttcatagattttatagtttagttttatatatgatgttccattctgaacatgagaatcaaaactttctctccttaggcttaaattctgtatctttaaaaaaaggtttagattccttcaaaaggaaacagttcctttctaggatgatttaaaattccaagcatatggaatgctttagtttcttttggaagagagttagaagcatgtgtaagaggtgtccctaaggaatcctctgttataccctctatcatcaaggagttaaataggccagaaatgtttatcaagagaattccagtgttgatagcggtaagtggattttagtattctgtaagaatccataaacatccacttatgtttatattacactggccttttccctgcctgaaatgtttcagtgatgtagtaagcagtgatatgacacattcttgaaaagttcccatcattcagctacattgtgagaaataaggcacaaaatggtgatttttatatcagtttataaactacagtcaaattttatttcatctatagtgctcatagctgaatctttaaggaaagttttggccaggcgtggtggtgcatgcctgtagtcctagctactcgggaggctgagatgggaggattgcttgaggccaggaggttgaggctgcaatgtgccatgatcacgccactgcactcaagcctaggtaacagagcgagaccctgtctaaagagagagaaaaaaaaaaaagccaagttttattttgtttagaaatgataattttttaatactatagtattatgtgtatagtaggactaaaaaagggatgaagcttcagatctgaatactcatctaatgtctatgcttcttgacatagtattttattattgaaggtttgaaaagtatataatttgatttttgatagctttgttgagatataatttacacaccataacatttacctatttaaagtgtacaattcaatggtttttagtatatttacaagttgtacagtcatcattgtcatcatccctaaatgtaatttgatttttaaattttgtgtaaggaaatactactcaaattcgaagtttttcttcaaaaattaacatccatttacagagtttctgtttgggatgatgaaaaaattctggaaatggatagtgatgatggttgtacaacattgtaaatgtacttaatgccactgaattgaatgcttaaaatgattaaaatggtaggttttatattatatacattttaccacaataaaaattaatatccatttttatgaaatcagaagtggtttaactttagaagtttttaggaatttcatcctatctgaatgctctttgatacaaaaagaaaattaaaaaaaaaaaaagaaatgtgattctaagcaacacatggccctaataattttttctcagaaacatgttatattaaagatattcttgtatgctaaaaaaaatcatgttattagttttcctagactgaaaatgatgcattaaaattgttgttggtatttatttttatagaaattagtgtataattaagtgaagatgtaaagataattagtttttctttaattttgctgttcttgagaaagcaagatgccaaacaatgctggactacttgtcttaactggaggaaaaagtgaatataatgcacacatgcatataaatatgtatatgataatataaaagtatctgtttataggtgcattaaaaaattatctgcatggagacaagaaataacaatgtttgttgttctggacaggagaacagggtggctagggctcatggatgagaatgatatttttgataatatttttgattatctgaatgtattatctattgagacattttaagtaaaaaacttaccctaatcctactcttggaataagcataattctgttccttcttactgtgctttgttacaggaagtagaactttgagattggtttgaaaatgaattatactaagaagttgttttttttctaggaattgattatggattaagtttaccacttggagaagactatgaacggaagaaacataaattaaaagaagaattgcggcaagattacagacgttatcttactcaggtaatgagttctattaatgagttgggtttaatgtttcagaattcagctcctaaatttgttttcataaggtattagtcatatgtgttaatttttaggttttcagtggtactagcaaagtagtagtatagtcaaagttaagtggcatatatgacattggtagagaaaaaaatattgctgagaaccggtgccatagaatgatacagacttttgaccttttgactaaggcagtggattctaattttaagtgagatcgttaattatggtttttcatgttttctgtaaagttgtcatggtttgaagtagtccaatcatggtttcccactcttctacaccccccaactatgtattaaaatgacatatggagttctagttgctaattattttcctatgagccaagcttataaaattacatttaattatttagccactaaagcttttgttttatgatctcatgttttacttagcagaactcttgagtatttttgttaaattatataatggccaaagtaaggtttattgtaagttttaaatttaggttataaaattattttaaacaattatgatatttgttgtcatctcaaaatattctttagttttttactgctttatgtttgttccaagtgtacaaatgtctcttattctgatttacacatggagagaatgaactttgacttaatacactttgtcaatggtttgtttcccttgactttagggcattacacaagggaaaagaaaggtagggttgtctgcaatacgtcctccttcagttttttctttctttttttttttttttacgatctagaaggttgcaatcatttgcatttatgagattcaaaccaattaggaaaacgggttcatttgtgattttgagatgtttgaatggcaccattttgtattcttgcttttagcagatgacagcatacacattataattttccgttaatatagtcattacttttgattcctgctttgcatttgtgtttattgctttcttatgcattctttttgaatattctgcagttaagtctgttttcagcatgcaattttttatttctcaaattacactaatcacagtaagattaatagagtagtagaatatccaagatatttgaactacatgttgtgagaatttggattactctgtttttccaccaaaatctatagattgcattgtccatttatattggaaaacaaagagaaacagtttatggttttacaaaactggttttaaaaggaatctcacagattcaccattcaactaacatattttaaacacttattatgaagatatatcaggtatgcatcctgtcttcaagaggcttagaatttagttgtagagatagcattcatacgattcagaaagtggtaactacaagaaggatataatgatcaagatagtcctcatagtgggaatttctattttgtgaggcaatctagatttgggtgatctggagagagaatcgaagcgagaaagcttttcagatggaaagcatagagtaaaggaggacctagagggtagactttagctttgtatgaatgaggcatattaggtttaccagcctgactgggtcagagtatcattctttttgagagtagtaagaaataatgatgtatataggataggatcaaattagaaggcagtggatttttaacttgttatatgtaatagtcagtgatgagcatcatactttcttaaatagcttgtgaagagcatggtaactgtgttttaggacagttagttctgcatgtagagactctcattgtgttaaattgctgcccaacttcttaactgatttcctcgcgctaattttcacttcaccctccaagctattttccagaatgattcagtccctaacttatttaaatatgtcagtatcctctaactgcctccaggataaaaattcaaattccttagcatggcacatgtctttcgtgttccagcctgactccctgggcttatacctcattatcttccccttccctactttttcttattgggtggagttttcctctggtatcagatatctaccattttctcttgtaggttttgcattactccctaggtaagatttttaaaaaggatagtggtgggggacatgagaagaaattgccgtcatgaaagtacaaatctttaaattcaaagggatgtgaaggagttttttaagatttttttgtttgttttttggtttttttttgagacagagtcttgctctgtcgcccaggctggagtgcagtggtacgatcttggctgactgtaatctcagcctcctgggttcaagcgattcttttgcctcagctcccggagtagctggaactacaggcgtccaccaccatgcctggctaatttttttgtacttttagtagagacggggtttcaccatattggccaggctggtctcaaactcctgaccttgtgatctgcccacttcggcctcctaaagtgctgggattacaggcatgagccaccgcacccggccagtttttgagattattaagaatatagtcggccgggggcacggctgacgcctgtaatcccagtactttgggaggcagaggcgggcagatcacaaggtcaggaaatcgagaccatcctggctaacacgttgaaaccccgtctctactaaaaatacaaaaaaattagcctggcgtggtggcaggcgcctgtagtcccagctactcgggaggctgaggcaggagaatggcgtgaaccctggaggcggagcttgcagtgagccgagatcgcgccactgcactccagcctgggcgacagagtgagaatccgtctcaaaaaaaaaaaaaaagaatatagtcttgtagaggagcactatttccttaaaattagagagacagtcttttgttcacatttgagaaggtgggactggaagggaaagcaagagaaaaagaaaactacacagactatagggagctggctgcagcttcctggaccccctgaaatatgtatggtttccaagtcccactcatatctcttgtggcttccagacttggattgcatggatatttgagtttttaaaaaaaatcaaatcttttaattttgtcaagaagagttattaaaacaaacaactaccatcttttttcgtgttttaattaatttttttttcctgtgcccttcctgcccagagatggtttcctgtttttagaataaaagatgcttgaccatctaaacacagaaaagacatgttctcaggggaacagtttttaaattgagtcagttaattaatatccccagcccagacctccatcctgaacttcagagttttctagctggctgcataattcacattttcactttgaaatctacctgatatcttatgtagaccatgtccaaaagagaattcttgatttctgttcttcccaccctcatggctgataaacctgcactatccgtagcctgtccttttaatttcctttttgtcacagtaattattaccttctagcatgctgtataattactcctcattatgtttattatttctttttcattttccccagcttgaatgtatgcttttggaggacaggaatctttatctgtttttttcagtcccaaatgtatcagaaagtttgggcacatggtaggcactcagtatttattgaatgaatgaatgaatgaatgattaaaatttagctttttgaaaaaactcactatgttgttctttttttaagaattaaagtttttttggtagagacagggtaataaaaaaaagttttttttttgtttttttttttaaatactcaagctggtcttgaactcttgggctcaagtgtccctcctgccttggcctcccaaagtgctgggattacagacatgagccaccactccctgcctatgttgttgttattgtttattcttttcattttattgaaaatttcaaacatcattcttgacccatgtttggaatgggaaattgcccagtgaaggagtgaggatgttaaatctatcttcctggttggaactatgaatgggtttttcatgcatttataactctacaaaataattaggtttatagtgtacttcagtatataggaggtaaaatcactcagggatctggtcatgtgtcttattttttccttgtcaggtaagtttagagttccatacagccaactttcaaattagcttttgtagcacaactcatttgtaaattcagatttaatgacactttatttatttatttttgagacagattctcactctgtcacccaggctagagtgcggtggtgctgatcttggcttgctgcaacctccgctttttgggttcaggtgattctcctgcctcagcctcccaagtagctgggactacaggtgcgcggccccaagcccggctaattttttgtgtttttagtagagggggtttcgccttgttgcccaggctggtccgaactcctgagctcaagtgatctgcctgcctcaacctcccaacctgctaggattacaggtatgagccaccctgcctggccagatttaatgaaactttattaatcacttagttttgctaattactatctttccataatgttttgaatacaacgctattgtagttaatacgttgttttgcggttatttgcttacatgtctgtttctgctactgaattgtaaatcccttgaatatagggaaaatatatttgtatccctaccatctgaaaatagtacctgcatagtattagatggttgctaattgcttgtttaatgaataaataaaaggcatggaattaggcaggttgacaattattgattgattttatccttataacctagtgatgtgtagatggcattatttctgttttatagacaaggaaactgaaatgaagtgaagtaaattattccaaagtatttgactgctaagtaacagtaccagaaagttggagatcatatgtatttttttaccaattggggatcatgtgtattttttttttccagttctttgtatttgctttacagctttcaaagcgattttatattttttgtcctccttcatccttataccagctttggtaggtaggcagagcaggtactattctcattttgcagaagaagaaagtgtctgtcagaaaagttaagtgacttccccattgttacacaactgataagtgcttgggctagttgtagatcctaggtcttttgactgctagtctaatgctgcctctactacactgcattacttaaatgcttaatgaacaagattggaggaacacataaacaacattcatagtttatatctattggcatttcagtagatattcactcacataattataggaaaaatagaaaaaaaacttgtggcatgcattaagatatttgtgaggaagtttaaatttgccttgagaacaaaaagacagtagagcactgataatgaagagtacatgcttagaagacgaaattgggaaattttttttcatgcttctaatcatcttgaatcaatagacgtatatattgcacatgaaaattaaggcctgattttccctttcagggagttgttgattggaagaaaattctcttttttccaaatgcttttggtatggtctatatagatttgtagtttctgtcttcattccatttcattcatttgctctgcataatataatactagtttagaatatagaatgcaaagacacatttatgcaacatattttataaaggcaattaggtaatatatttttttaatgtgtatatatacagaaaaattttctatctacgagtgaaacagatccatctactttgggagtttctcttcctattggtgagaggttatctgctaaggtaggtggataggagtagttattgtgggtaccagttttccgaggcatcaaaatcattaaagaacatactgctgatttaaatgcaaatggaagatcacatcatttccccacacttgaatatatttctatttcaaaaatccgtggagtcatatttatgctgtttaaaaaaattttcttgaacacaacatttgtaaccatataattttatatttctttaatatgttgattcttttgctgtattcagttatacttaactgaatattcagaattcatttttttcagcattgatttctgactataaagtttatgctatgtaacacagttattggaataagtggatgtgaaattatagtgagcttttatatagggtgagggtaagggttctttgaatgtgtgattctgacactccattaatacacgtccatattccttagagatgaaagtaataaagcactgtacacctcttgtagtgactcaggtctcaccagagtatatcagagatcatgaaatagtatataagacaaaatggacagttaataaatttcaaaagacagacctagtttctttttttttgagacgaagtatcaccccgttgcccaggctggagggcagtggcggggtcttggctcactgcaacctccacctccccagttcaagcgattctcctgcatcagcctcctgagtagctggaggcaggattacaggcccctgccaccaagccccgctaattttttgtgtttttagtagagatggtgtttcacaatgtaggccaggctggtctcgagctcctgacctcgtgatccacccgcctcagcctcccaaagtactggcattacaggcgtgagccaccgctcccagctgacctagtttctttagtacttttttagattgtgttgttttagcgacacgggagtattaaaatttaagaacattttttaatcatatatttatgttttaacagaacatttcattataatattttataatctgtgataatttttctttttaagtttaaaatataaaggatcattttttaaccttggaaagcaaatggttagcagcaggtgcttcaggggagtgggttgggcattaggagagggaggtgtccctgagaaggaaagaaggaaggtaaccccatcatatctctttggaaacatgctaatgacagatctcctggcaaacacaatcatcatatttactagtgggagagatttatctctgaatgcttttggcagaatacacctggtttgtctaggattgctgttgggaatcaaacctggaatctatggatttatgtggcatggctctttggaaaatgtcatctaagctctgttaactattggagtgtaaaatggagatgtttcatgaacgaagcaactcccttctgttagagacctcatgtattaatggaccaaagcatgtagtcatgcatattctcatgtgacaagaaagacctggggagctgtatgtgtgtcctcaaacctcttccgacttctcccatgcctttcagtgacatctgtccttgaaattattagtaaagcttgattctgggtaagagttctgatatgtatgattcagatttgacattctgataggacattgagggatttttttttcctgaagttgaattttaacattgccttttgatttttattttaaggaaaggttgaaacttgaacgtaacaaagaatacaatcagtttctcaggggtaaggaagaatccagtgaaaagttcagg

SEQ ID NO: 15529 - DNA, 31803 bp, Homo sapiens
gctgtgcagggcagggaagctccaggcaaacagcccagcaaacagcagcactcagctaaaaggaagactcacagaacacagttgaagaaggaaagtggcgatggacctcatcccaaatttggcggtggaaacctggcttctcctggctgtcagcctggtgctcctctatctgtgagtaactgtccaaactcctctctttgtttccttggacttggggtgctaatcgggccccttttcccttatctgttttgaagatcaaaagagatgttcaaggagaagtagctgaagtgttggacgctacaaacgcatagaagttattattatcttatgcagatctatgaatgaataaataagcatttctcccatccaccttctaattttggtgactaggagggtttagggacagcatttggtagtgggaatgatttgattagcttagatctgacgaagactaatcaatgaaaacatggcagcggcagattacaaactgctgatcatgatggacagtgtgatcctcatccccttcccaggctctggggattctgggtacaggaaggagtggcttgcatttttgtctcattaattcgctttctgggttctgtgtctgctggaagggatgtgtagctgtattgcccctgtagacctggttcctgctcccccgccttccaacccaggatatcatttacataacgcaccaggggacaccaagacttcatgggaagctgtcccctggctcttccctctttcctgtgccatgcccctgaaaatcccctccctcctatgagtcactcctccaccctgtcatacacaggatggtttatcttgcaatgattaacctctagagcaaaggagacctggaggaagtttcgaggatttattctttgctttaatctttttcctcccgtctctgggaggctaggattaatatagagctttgtttctcacctaatgggaatctactagcagcctgaaaaggcaggagccatgaaagccaatttggattttacatatttttcccctttatgttacagtacaggagggcaaaccctctcactggtgggattcctggcatcctagagcaggtggagagaagagttactttccactgtgggtagtggaggctccacctgtcccattaacttctacctcaatttgacttttattaagagcagggaaccacaatgacatgaaaatagacactataaacctcattttaattctttcacagaaagcttaggaattcagtgagttgtggcaacatggtttccattgtctaacatttttaaatgaattgatatggtttaaattcattcatttttaaaccagaattttttggagatagactatttccagcatgttccttctggatggtaaaacagggctgttagttcagtatttgtgacaataagtgtgtgtaaaataatgtcacctttcctgaatgtcaggaatatgagtctaatgcacaaatgtatacctctaagacaagactgcacgtcttttcaaatatacctgtccggccatttattttaataactccttttcgaatatacctgcttagcagattgtcttaaactctcaggacaggggagtaagcaagactgtgagccagtgacgatagcaaaggcttccaggtaggatccatatgaagtgagaaaatattcctcagctctcagggtagaactccaaagagatattcatgggtcctggccccaccgtggaggtcactcaaagggcaaacaggttggcatctcatctgcttcaagcctggacacaggggcaccatctgtgtcactctgtgtgtggtctgccatgttgtgggccggtcactacagactcgggcagccaggcagacaatgccttagccttagacaatgctggtgcagcccaggagtcagaaaatgcagtgtagaccaggccctccttaggccaacacaattacatgcaatagatgactggcttttctgttagtctcttcactggacccaaaggctgcattactctaccagaggggagctggaaagaaactaaagagttcgcccagcacagcatctgccttgacatggtaccatgtgaatctagacactcaccaagatctttccttgggggccaatgctgctgacacattaactcaatagcttgtcctcacctgagaggtcaggtaatgtgtttaaagttcaggagcagagattagtgtcattgatttgacatggctgtgacaacaaaggagggaactgaagtgggaatacccaaggccaccctggctttggcaggtggtgcacgcacttccactaactgttctggggcagggaaccaaatgtatgactgggcctgctcatgctgcccctgctgagtcctccaaaccctgcccttcatgtaatttctcagttttattttatcacattttataagtcactggatgtttacaaaatgtttggaacctatactgccttgaaggctaacctctaaagaggagtaaacaaggtcttaatacaactctccgggacgttttatcattacttatcttatatgccatactgcaccatttgctatcaacaggaaagtacctggactttggaaggtccctctgtgtcttttagctgaaagtacatatgaggcatgtggattcttttatgcacatcatctttttcagccacatttttgtagtttgcctctctggagccaactgtgtggggctagcagcttcacagctgaatcagtgtctggcaacctcttccttcagcctctcttcttcctccagttttccatccctcagtcacaccggagggggaaggtctgcaaggatccagaaccatcagttggaggagtttgcacatgactcatgaaagatgagttccaggcaggcctgccatagtgaacaccaggcttaatgggtttttcctcagagatacttcacgtacagaggcagtgaactgactgctttctggttgaccaccttgaaaaagatgagtgtgcctggcactgtgcttctcaggtgagtatgacctgagaagtattagttgctggttcttctgcacacaatcattcaaggacatatggatcaaccatcctcctcaacagctcaaatcaaccagatcatctgaccacagagactgaggtgtacctgaaagctgcccacatttctataaggccaatagaagccatgaacacagttgtcaatctgtagaaataaggactccatgactcctccaaggcctctctgtgaatgaacgtttaagaagggctagatcctaaaacagggtcagagcttagagggaagaaaaagcataaacatttctgagcaaattgtaagggcagtgtcaccataggctcccagtgaccctctgtgattgagtgcatacagtgatgcaaaatctcatcatcagtgcaaaagacaaaaaaaatcttactctttctacctaggatgagagtccccaaatcagcgaagagtccacttactaaacagacataaggaaatgaagtgtcctggaagaattcctgcctgaacctctcaggagcatttgaggacatttatcaagtattcactccaggattgggactatgaagacttcagctgctttcagctaatcattgagacttttcaggggtctcagaatagtcaggaaaggacctgatgagtgaatgcaattactgatgttggagttgctgttattatttatcgtgtacatattacctccctctcttgaccattccagttcctgagtaactcaccagccctctgatctataaagtcacaatccctgtgacctgatttctgtttcactttgtagatatgggacccgtacacatggactttttaagagactgggaattccagggcccacacctctgcctttgttgggaaatgttttgtcctatcgtcaggtgagttgcttgagcttcctcttttgcttcttatggttgcaaacatcagcttagttccatcagtaaaaatgcccctccttgggagggagttctgaggtttcacattttcagaaatggtgggactgggtgcagtggatcatgcctgtaatctcagcctctgtgaggccaagactggcaaattgcttgagcccaggagtttgagaacagcctgggcaacacagtgagacacctgtctctagaaagaaaaaattacctgtgcatgatatggtagcccatgcctgtagtcccagctactctgaatgttaaggtgggaggattgtatgaacccaggaagtcaaggctgtattgagctgtgatcgcaccactgcactccagcttggtcaacagaacaagacagaaaggaagaaagaaagagagagagagaaagaaagagagaggaaggagaggggaggggaggggaggggaggggggaggagaggagaggagagaaaaggagaggagagaggagaggagaggaaaaggtgtgtaggctccacccaaagcatggccaggtttacccctggagggaaagtcacaagctcatgtccagaaggccagtagcagcaagctgctctccagcccagatttcctatcctgtgtacctggagcttgtttctcagattctaactctcacaactgaagcctctgttgtctgattactatctgagaattctacacaattttaccctcgataaaagcagtaatttcttcttcatctttcccagatcaactcttgtagtagatcaacatttctgggaccttcttttgcatggttaaaacatcacagctgaatcttagcaacaggaaggtttgtttttatgtttcagaagtgaaagctcagagcacgcattgtaatttgctgggtgtgatgtgtagaggtggcatttctccatcttttctgtgttaagctagaaaactggaaaggaagtctactttctcattcactcactcactttctcactcaacaacatgccttagacttatctaaatctgcaagactaaaagaggttcctggtttctttaactttctaattctgctagagttctagagagagcacatgagataaatgaaaaggatactgatggaggagattaaaaaattgtgcattccctgcagacactcacttttcctcacctcagtttcacccctgcccttgcaggtgatcattcacggggttaggagactttagagagaataaaagaaaaagcaaaaatacatcagaaagacaaggaattacttactggtcatagacaagggtgagtccttcagtacttagagaaaattcaagagtgactttaaattccccacttcaaatatattctctgttttcttgtctttcccttaagacatctctgaatagcttccttcaactgccagtgaaagatagcaggcctgatttcattggacgcaactgttttcagccccaattagaggtagggtttattctatttaaaataataatcaacttgtattttgtttcctctcccagggtctctggaaatttgacacagagtgctataaaaagtatggaaaaatgtgggggtgagtattctgaaaacctccattggatagacctgctactgtgaggaggttaccccactgcaggatagtctctgcccaggtcttcatgggatgaagctcttgtcaacctaaatacaaacagagagaggttctctgaaagaagaggataattacttgggagtagaatattgcaatgggaatctgcttgccgttataaactatgtgcaaattcagggaggtaaacaagacaaagatgctccatagaaaatatgagaagaatctcataactgttttgagataattattgttagctacaaagatcaataacaagggtgatgccacaccaaggttggacaggcagttgctggacaggtgtccttgcagaaatatttttgtgtaaagttgaaatagcctttgtgcaaagttgtggtttttgtagacacttttgtaatagttttgtttccaggaacacaagcataagaatcctctcttcatagccttcttgggatttatttgtcagggttaaaaaacaattagtgacatcactttggttctgataaagttcacactcgctattgtaaaacttttcgaggcttgtcctaccaaggatcccatgtgtcaccaggtatcgaggtcttcagtctgaactaggctaggagcattgtggttaccacttttctgcaggttttggtggcccagggactcccagcatcgccttctgtccagtgtctgcctattcccctcttctttttttcttccttaggtgcccttttatcacatgcattgtctcagacccttctaatatgtgctcataaatgcatggcatcatctccttcccacattgattcactttcaattaaaagccaaaactccttcatttagactgaatttaacatgtgcttttgaaagaagggttgagagataatagagaaacagattgggaaaccacttatgctccacttttttaaactttctctgcaagtatggaattttttgttctgctttgttgtttaaatttaagccaaaacttcttaatagaaggatatacaaatatttattggtttataccattgcacttactttgaagaagagatgctgaatattattaaaccattgtgttccctggtgggctgatggactgtgattttataaggtggtctcagccaattgcagcagctgttccctgtcagaggggctagaggtttggtgagagcagtggatgaggtgcagtggtgtgtttgttcactagaagcaagtgggagaaagctttgcctctttgtacttcttcatcttctcccctcaagtcctcagaatccacagcgctgactgtggagtgctgtggagctggcatggcccatacaggcaacatgacttagtagacagatgacacagctctagatgtccatgggccccacaccaactgcccttgcagcatttagtccttgtgagcacttgatgatttacctgccttcaatttttcactgacctaatattctttttgataatgaagtattttaaacatataaaacattatggagagtggcataggagatacccacgtatgtaccacccagcttaacgaatgctctactgtcatttctaaccataatctctttaaagagctcttttgtctttcaatatctcttccctgtttggaccacattacccttcatcatatgaagccttgggtggctcctgtgtgagactcttgctgtgtgtcacaccctaatgaactagaacctaaggttgctgtgtgtcgtacaactaggggtatggattacataacataatgatcaaagtctggcttcctgggtgtggctccagctgcagaatcgggctagtgaagtttaatcagctccgttgtccccacacagaacgtatgaaggtcaactccctgtgctggccatcacagatcccgacgtgatcagaacagtgctagtgaaagaatgttattctgtcttcacaaatcgaagggtaagcatccattttttgaaatttaaataatgattgatccactgattaaatttttattttgaaaaaaacatatattcacagaaggttacctaaaaaatgtacaggaaggttccatgtactcttcatcctgtcccgcccagtggtaacatcttgcaatcttgtatattgcaatatatatctagtatattcatattatcaggttggcacaaaagttaaaatggcaaactacaggctgggcataatggctcatgcctgtaatcccagcactttgggaggccgaggcaggtggatcacgaggtcaggagttcgagatcagcctgaccaacatggtgaaaccccatctctactaaaaatacaaaaattagctgcgtgtggtggcatgcgcctgtagtcccagctactcagtagtctgagacaggagaatcgcttgaacctgggaggcggaggttgcagtgagccgagatcacgccattatactccagtctgggcaacccaatgagactccatctcaaacaacaacaacaacaacaacaacaaaaaccggcaaactgcaataacttttgcaccaacctaatactatagtacaggaaattgactttgatatagtttacagagcttttcagatttcaccagttttacatgcccttgtttgtgtgtgtttatgtgtgtgggtagttctaagcaatttttcacattcgtagatttgtgcaacgaccagcaccatcaagatgcagacccattccgtcaccatgtggctccctcctgctgtcctacagtcacaacatggagtttgtctttttctctgacaggttctatatcagagcaaacttttatttatttgaggaggccaatgtattaatatttccttttatggattgttcttttggtgttaagtctgaaaatcctttgcttagccctccttcctacattgctttttctaagagttatatagtttaacactttacaaaatgtaactctattacccattttgtgttaatatttgcataagttatgagatttagatcaaggttcattttctgtggactatggctgtccaaatgttccaacaccattttggaaaggtaggcatattgtcaaaactcagctgagtatattttgtgaatctatttcttattgtttactcctccactaataccacactgtggtgactctagtagctgtacagtaactcttaacatcatatagggcaattctttccactttattgatttatattttcagaatggctttagcttttcttgtcccttgcctttccataaaaattcagaataagcttgtaagtgtctacaaacaaacctgccataattttgataagaattaaagcagaggtgtccaatcttttggcttccctgggccacagtggaagaagaagtgtcgtgggccacacataaaatacacacacacacacacacacacacacacacacacacacacacacacaaatggtctgtgtatagttttcattatatatctaccaccacagataagcaaaaatgtccttgcataataatcctaattatgcactgccccattcagagggtctttcaaaatcattgaacaggttccaagtttgcaatcactgatacagaaaatgtacatatctagctaaacttcactacttttttgatattttttattataaaagaaaagagaacaacataaaactagtggggtacttgacattgtttttgagaaactaatccatcagtatctggcttgatggaagtagttgcaattctcagtgagttctcaaggtgctcatcagatattttggttctaattttactcttcgtgttcttcatccttgaaaatagtagctcacaaatgtaagtgctgccaaaaagcaatgacatgaacaaggtgtgattgtgaagcaagggatatttgtcattgggaagacaggtcttacaaaagtccagtaaagaggcaaaatcaaatttttctataagttgaacatcagattgcagctctaggcattccatttcaaaattgccaggtaacatatatatgtcgactgaaaatggagttgcaaatataccaaaatattgatgattttttcagaaatcttgaaatacctgttttcaaattcctgtatcaaattgaaaagcaaggctgcgtatttttggctgttcacaggaccatgtttagccaacatgtcgaaatgcataaaattgtttgccttaatttgagcttgccataatttcagtttcatatggaatgctgttatggtttgaaacattgtattgttaagttggttttcaacttgaagacacaggtttaactcacttaaatgggccgtcaaacccactaaaaatgctaaatctgtaagccagttttcattgtcaagttctggcaccaattttgtttgataccataaacagcttgatttcacatcacaaagcataaaatctttacattttgccttgacttaaccatcttacttctaaaaagtgaatgacttgctagagtcagcatccatacttttaaggaattcctgaaactagcgatgattcaattcctgggcccttgtgaaatttacagccttgatgacaatttgcatgacgttatctacttttaaagcttgtgcacatggattttcttgatgtattatgcaataatacttcatcaaatgtgagttttgtgtggcaactgcatcatctattaattgtacaagtccctctcttttacctaccatcgccagggcagcatctgtagctatatcacatatgtttacaaaggacaaagaaaattgctttaacatatttttcactgcttcatataaatctcttgatttagttgtgtcttttaatagcatggtgacatttcgatttcttcagtgacattatattcatcatcaatacctctaataaaaatagcaagttgtgccgtatctgtagtgtcagtgccttcatccatcaccaaagcataaaattttaaattagcagttttactctccaaacgtctttcaatagatttcccaatttctccaattctcctggctatagtctggtgagacaaactgattttagaaatatcagtttctcaaggcaaataatatctaccacatcttccagacattgcttaataaactcaccatcagtaaatggttttgatttttttgctattaaatttgctaccacataactaggttttaccttacgattgagtccgagttgtaactttttaaaaaatcttttttgttgaaaagacagactttttttcagttctgctattttgtccttacaacacatacacaccaaatttgtcagcacgtttttgcatataatgcctcttcaaattgtagtctttgaaaactggcacaaattccgtggaaattaagcagagtgcttcgctatttgcctcaacaagaaaaagtcatttgtccacttttcattgaacaatcttccttcatccataatttttgttttttagggttttctttttaagacattgtggaagccattctggaattaaaagcattataatagataagcaactatatttacttttattatggaaattaacagataggaaaatagaacagaaagcaaggtttaataatcaaataagaatacttacatgtcttctaaataatattaaacacctatcatctacaaaggtaggttgaaatattattgataattgctgggttttacttgccaaattgccacaaacacacctaatacctgacagtgtcaattcaactgtccgtgattagaagataacacactggaagtcgcacaccaccataaaactgaagccacacatgcgtacaaatggcgacagtgtctggtgtacagcagcgctctgccttgtccagaatacacacttgaattctttgtcacaattcacttcacgtggcactgcaatagcgtcctctcgctctttgttagttaattttaatggcttttaatttcttcttgctgaactgtttgcaattataatgcaaattatggatactagtccattatttgtggatgtgacatactctgattacccctttccattccattgttgtctacgaagttcacacttgagaatcacatagtcaaattacaaaattacaaaaaaaattgcaaaaaaactcaaaatgttttaagaaagtttccacatttgtattgggatacattcaaagccatcctggactgcatgaggcctgcaggccacaagttggacaagcttgaattaaaccaatagaacaatttgggtataatctatatctttactatgttcagcctttcatcccgtgaatatagtatgcctctccatttctttagcttttattactttcctcaacattttatagttttcagcatagaggtcctgtacatcttttgttagatttacaccagaaatatttcatttttgttggagtaactgtaaatgatactgtttttcttgtattttcagatattgattattgttacatagaaatgtgaataattttgtttgttgatcttgtatcctatagccttgcagaacttacctattcgttctagaaatttttttgtatattccttgacattttatacattgacaattatgtcacctgaaaatagagacaattctattatttcctttccaatctgtatgccttttatttctttttcttgtctagtgtattaagacatcaggtatgctctttagtaagaatgttgagagtgggcattttttagttcttcttgatcttggaaaaaccattcagtccttcatcattaaatgtgatttaactgaatgatttttttacagattgtctttatcaaatgaaggaactgtctctctcttcctagtttattgagattttatcatgacagctggaagtacacattttaaaacaaaacatagttgtggaagataagagaaagttccaagcatgctggcttgatagtccagccccaagttgggaaaagtaattatccctttctttttccttctatttatggaataaaaaattaagagaaaagaattttcaaggaaattgcattattccttcaaaacaggtttctagtctttaagtattacctacttttcaaaaaaaaatcaccacatcatggcatccctttttcaagttgcccatgctgtaggtgtattaaagacagagctggtctgaggcaacatacagtctgcccatctgtcaccaatccttttctactctgcacactcctggggaagggctaggtcttgttcctgtctattccactggaagaacagttccctaccacgtggagcatttgcaattaaaaggagactgagatatagaggcaggagaccacaccagatggctgggtctccccactcccacccccgccccacatacactcagaagaggctaggcatctaggatctccattgagcatcttgaatatggcttgccataatatcatatacagtcaataaatatttgttaaataaggatgcctcttcaatatattttgtgcaaccatgaagatcaccacaactaatgtgagaaaaaatgtttctgttgaactctagtctttaggcccagtgggatttatgaaaagtgccatctctttagctgaggatgaagaatggaagagaatacggtcattgctgtctccaaccttcaccagcggaaaactcaaggaggtatgaaaataagatgagtcttaattagaaatgtaaagaatgaatctggggacaggtagaaagtaagatcacagtccgtttccaaggggtagtccactgagttcgagcttcctaaaaatggtcttttatctttatgtacagaaaagacatcacaaaattcattacaaaatgtcacttactgctccatgctggagaaagccatatccttctgggacttgagtctgcacatttaactacaggtactgatctgttttgtgcttagatgttccccatcattgcccagtatggagatgtattggtgagaaacttgaggcgggaagcagagaaaggcaagcctgtcaccttgaaagagtaagtaggagcacagccatggggttctgagctgtcatgagcccttccagctgcctgccatggagtcgacagtcgcactgttgggttactccagtgaccagacaaaagcagggcagcgctgcaactccaaagagccacctaagagggagtggctcccatgaggcggcaagtcagcaagggaaaagggccttctctcctgtgcacaggagccaggatttacttatctgttaacttgtcaccataaatattctgggagattaaatacatactttagaaattaaaaaaacatgattgtatcaaagttttgagtgtagtggatatggaactgtgggtaagcaagcatttggtacttgttgccttgcattgggtaagatgggaaagttacaatggggaacttggaacaatttcaatcccttcatggtttttctgagaatatcagcaaactatgaactattaaaccttcccactacttccttttcctccaatctcaaaaaagaaagggtgctagaaatgctatgtgtagagcaagcctattatttgctgtctacaatggtatgtgcttcaattatgcaggaacgacaggtgtaatctgagcctgtcctgttcagacttgggacatgtggtcactcagttttgggttctccaaatcaatgttggagagatctattttttttaaccagaacattcttgattgtcacatcttacaaaaatgactctgctctcagcgcaacttcaggtcagaggagctggggatagtggggttttccagagcattagcagggagtgtagagaataaaggatgatatttctaggaactcagaacagggtgttactgttttgtaaagtgttgaagaggaattggctctgggcatagagtctgtagtcagacaacgccacctttcttgaatccactaggaagagttaattattctactcttgttctgctgaagcacagagcttacatatcttatatcatccacactcaacacatgctactgtagttgtctgataatgggtctctgtcttcctatgactgggctccttgacctcagaggtgagtctaactcagcttggtgtctccatcacccccagcatagggccagctccatcactggcaccagataaccaccttctgagggagtagatggaagatgattcagcagatagttctgaaagtctgtggctctttatgtgtcttgactggatatgtgggtttcttgctgcatgtatagtggaaggacggtaagaggtgctgattttaattttccatatctttctccactcagcatctttggggcctacagcatggatgtgattactggcacatcatttggagtgaacatcgactctctcaacaatccacaagacccctttgtggagagcactaagaagttcctaaaatttggtttcttagatccattatttctctcaataagtatgtgggctattatttctttctctctttttaaaaataactgctttcttgacatataattcacatatcgtataattcatccacttaaaaggtacaattccattgtttttaagataatcaaaaatatgtatgaccattactattgtaaactaaaatgtttttgtcaatctagagccctcacacactttagctgtcaacaccccaccacaaaccccactgccctaagcatccaataatcaactttctgcctctatagatttgcctattctggacacttcatagaaataatatcattgatttttctctgttgttttttattctctatttcatgagtttattttagtctgttattttctttcttttgctggctttaggtttcatttgctcttcttcttttagtgttttgtggtgtaaataattataatcaatttgagatattttcttcttttaaatttagatattacagctataaatttccctctgagcactggtttggctacatcctgtgttttggtacatcatgccttctttttgttcatctcaaaacaatttcttgttgcccttttgatttctgctttgactcactggtcacttaaaactgtattgtttaacttccacaaatgtatgagtttcccaaatttctttcccttattgatttctagttttattccatggaagttgatgtacatatgctgtgttaattctatcttgactatcatttcctgaacagcatgattaagttaagcagcagattatggtctacattaatccaaaaactctagtccaatagataaaggctaagaggtcagggaatttaattctattactttggtcactccaaagactcagaaggtgccattgatctcactgctgtagtggtgtttcctatgtatagacctgcccttgctcagtcgccggcctgaaagaagggcaaacatgataaaaggaatgggttccagttgagaatcatgatgttcttattcttattactggtagagaaaattataattgctccaggtaaagtttgcattttcaatgatttccttttgtttgttttgtttttcccacagtactctttccattccttaccccagtttttgaagcattaaatgtctctctgtttccaaaagataccataaattttttaagtaaatctgtaaacagaatgaagaaaagtcgcctcaacgacaaacaaaaggtaaaatctgatggtggttaaatgacgatgtttaggttttgataaatttagattttatacacatgatagagcatgtatctgtatttttaaaaataaagacagagaacttatgtttagaacaagagaagccatttggtagaaataaagaaggagattggggaaggagatgagaatgagtcagagagatagcatttaaaacttgaaatcaggcacaacaattagtatgtcatgatataaacagtattgagataaaattttaccacttctcttccctttaataaattgtcaaaggataaagtttcctgtttgaaaatatattttactggtattgtgctttcctcatatcacagattggtaaagaatcattttaagtccaagactcttattttacatattctgcaattaaaggtcctatgaggctacctgccgactgctgacatgtagtgtgtggtaaatgtgagtgtttcacagcctggagtgaacaggggtcttctctgagaattgaggttgcaaggctggctaactcagctttgccttcacgagccctagaggccagccgaaggatgtctgcaggtcagggagacaggaccaggtaacccagctgtcactgaagattatatagagtttgagaatgttggaatatttgaaaatgctcccccaaaaaagctgctgatgagttctggaaatgtcaggagattaatctatacggacactgctgaagaaaaaggtagaagaataaaagatccagtacttcttcctgggtaagcagttatgaccagagatggaaccggcaactctttggccagaaagctgtatccaaaagacagagaagatgagaaacagggagggcaaaggcgaaaaagcaattggacatgatagctagatttgtttcaggaaaacatcctgctttccaaggatttagatgaatgtttttgttcactggtgactcaggtaacacgtcttcaagaagccatagggaggttgagggagggaagtcaagaagggaggttgaggactgcacttttgatttacttctgacttcacgagtcactttctgccaaagaaatctctccttttgcttctagcaccgactagatttccttcagctgatgattgactcccagaattcgaaagaaactgagtcccacaaaggtaaccaaggagtgcttctgagggctactggcggggacactaagagggagggccttgttctgaaaatgtgcaggaagtattccaggaagatgagaatttttgccacatagcagaacaacacacatttagatgttataaatggtagctggaggcactttccagaagcccacaggtatagccatgttccaggctgaaagggcaaccctaagcaaacctagaatgcttggaggacagtcagtggtttgtggatcacctacatgagatcaaatgccagttctcagcctcctccagatccaccaagtgagaacctctacttggaaatttatatcaaacataccgatcaggaagcacactatcccagtaagggtgattttaactggcagtacttgaaagtgtgttcgcaaggttaatctactgcaaagttttatttttccctttgaaatgcataagtaactaatgggggacacctctgataccatgtaaatctacttcaatcttcagtcttgtatctactagttttatgacccatggatggttttaaccaaaaccattattactaagacagtggcaaaatgataaccatggtcaatttcaagctaccaagatttggcaaccatctcacaaaatttttgaatatttaacaattggttctagagagcaggactcagcagactccagtataccactttaaacatgtccatgtctacatctacttctgtctgtctatctatctgtcaatcatctatctgcctataatttatcaattaatcatctatctatctcaacaaaacttgctgtgataaagaaaatagtctatcatttcactgtttcatatagaaatcactagacacatatggctattgagtactggacatgtggccaatgccactgaagaacaatttttaagagtatttatttttaattgaataaaatttgaatttaaatagccacatgtggatagtggctaccagattggacagcagagctcccaactttaaaattacagttcaatttcaactcagtataatggggttcaatgtaactgagtaaaataattggatggttgaatttacccacagcagcatacagaaatattcactgataaatcagaactctgtagacctttctcacactcattttatattgtgtttggttgtgagttacatgattgctgcaggcaccatatttatttctgtgctccaggtctctaaaggtcctaatccagtcctgaccaaacagactagtgatggaccatcgtgagcttctctcaggagaaatatcaagagggaggccaacctgtaatcataagaacttctgctattttaatgccattcatcagactacagtcaatcaccatgcttctggctttttgtctatctctgctgtcttgtacatcctgagatagtccattctgagaactgtaccctagatcttgtattgcctgatgcctgtcaaagatgtaatccatgctgcttaagtgaggttgtgcacacaaatcaccatatctcctgcaagtttggattttgattcagtagttcgatggtggggtttgagattctgcatttctaataagctcccagatgtggctggtgctgctggtccatgaaacacactttgagtagcaagaggtgatctgtagctcagtattggtcctttaagttccctcaaacatatatagagaaaaggtcctaaatattgcaaattctctcaaagtttgtcaagctatattggaattctctcaaagtctgtcaagctctattgtagaaaatcaaatttttattgggaaaaagcctaccccatatttacttacagataaagtacttttaggatcattcaaggcacacacccataacactgagtatgtaagacagaaatgctctctctggaaattacagcagtgctggtgctgggatgccatgatgaggagtgtgtggcccacaatcatgtagaccttgggaaaacctggattaaaatgattttgcgtcatcctggccctgtataagatacatatcagaatgaaaaccactcccagtgtgactttgaattgcttttccattttttcttcttgggattagagagcttcacttagatttcatctaagctgtgatgttgtacgttgacctgatttacctaaaatgtctttcctctcctttcagctctgtctgatctggagctcgcagcccagtcaataatcttcatttttgctggctatgaaaccaccagcagtgttctttccttcactttatatgaactggccactcaccctgatgtccagcagaaactgcaaaaggagattgatgcagttttgcccaataaggtgaggggatgacccctggagatgaagggaagaggtgaagccttagcaaaaatgcctcctcaccactccccaggagaatttttataaaaagcataatcactgattccttcactgacataatgtaggaagcctctgaggagaaaaacaaagggagaaacatagagaacggttgctactggcagaagcataagatctttgtacaatattgctggccctggttcacctgtttactgttatcacaataatgctaagtaaaaaaaaaaaaaaaaaaaaaaaaaaaaaaaggagtgtggcgagaagatggccaaacaggaacagctccagtctacagctcccagcgtgagcaacacagaagacgaatgatttctgcatttccaactgaggtaccgggtgcatctcaatggggattgttggagagtgggtgcaggacagtgggtgcagtgcacccagcctgagccaaagcagggcgaggcatcacctcacctgggaagtgcaaggggtcagggaattccctttcctaggggtgacggacagcacctggaaaatcaggtcactcccaccctaatactgcgcttttctgatggtcttagcaaacggcacaccaggagattatatcccgcgcatggctcggagggtcctacgcccatggagcctcgctcattgctagcacagcagtctgagatcgaactgcaaggcagcagcaaggctgggggaggggcgcccgccattgctaaggcttgagtaggtaaacaaagctgccaggaagctcaaactgggtgaagcccaccgcagctcaaggaggtctgcctgcctctgtagactccacctctaggggcagagcatagccaaccaaaaggcagcagaaacctctgcagacttaaatgtccctgtctgacagctttgaagagagtagtggttctcccagcacacagctggagatctgagaacagacagactgcctcctcaagtgggtccctgacccccgagcagcctaactgggaggcaccccccagtaggggcagactgacacctcacacggccgggtactcctctgagacaaaacttccagaggaatgatcaggcagcagcatttgcgggtcaccaataccgctgttctgcagcctccactcctgatacccaggcaaacagggtctggagtggacctccggcaaactccaacagacctgcagctgaggatcctgactgtcagaaggaaaactaacaaacagaaaggacatccacaccaaaacccatctgtacatcaccatcatcaaagatcaaaggtagataaaaacacaaagatgggggaaaaacagcagaaaaactgaaaaatctaaaaatcagagcacctctcctcctccaaaggaacgcagctccgcaccagcaacggaaagctggatggagaatgactttgacgagttgagagaagaaggcttcagacgatcaaactactccgagctaaaggaggaagttcgaacccatggcaaagaagttaaaaaccttgaaaaaagattagacaaatggctaactagaataatcaatgcagagaagtccttaaaggacctgatggagctgaagaccatggcacgagaactacgtgatgaatgcacaagcctcagtagccaattcaatcaactggaagaaagggtatcagtgatggaagatcaaatgaatgaaatgaagaaagaagagaagtttagaagaaaaagaataaaaagaaaggaacaaagcctccaagaaatatgggactatgtgaaaagaccaaatctacgtctgattggtgtacctgaaagtgacggggagaatagaacgaagttggaaaacactctgcaggatattatccaggagaacttccccaatctagcaaggcaggccaacattcaaattcaggaaatacagagaacgccacaaagatactcctcgagaagagcaactccaagacacataattgtcagattcaccaaagttgaaatgaaggaaaaaatgttaagggcagccagagagaaaggtcgggttacccacaaacacaaacccatcagactaacagtggatctctcggcagaaactctacaagccagtagagagtgggggccaatattcaacattcttaaagaaaagaattttcaacccagaatttcatttccagccaaactaagcttcataagtgaaggagaaataaaatactttacagacaagcaaatgctgagagattttgtcaccaccaggcctgccctaaaagagctcttgaaggaagcactaaacatggaaaggaacaactggtaccagccactgcaaaaacatgccaaattgtaaagaccatcgaggctaaggagaaactgcatcaactaacgagcaaaataatcagctaacatcataatgacaggatcaaattcacatataaaaatattaaccttaaatgtaaacgggctaaatgctccaattaaaagacacagactggcaaactggatagagtcaagacccatcggtgtgctgtattcaggaaacccatctcacgtgcaaagtaacacataggctcaaaataaagggatggaggaagatctaccaagcaaatggacaacaaaaaaaggcaggggttgcaatcctactctctgataaaacaggctttaaaccaacaaagatcaaaagagacaaagaaggccattacataatggtaaagggatcaattcaacaagaagagctaactatcctaaatatatatgcacccaatacaggagcacccagattcatgaagcaagtctttagagacttacaaagagagttagactcccacacaataataatggaagactttaacaccacactgtcaacactagacagatcaacaggacagaaagttaagaaggatatccaggaattgaactcagctctgcacaaagtggacataatagacatctacagaactctccaccccaaatcaacagaatatacattcttttcagcaccacaccacacctattccaaaattaaccacatagttggaagtaaagcactcctcagcaaatgtaaaagaacagacattataacaaactgtctctcagaccacagtgcaatcaaactagaactcaggattcagaaactcactcaaaaccgctcaactacatggaaactgaacaacctgctcctgaatgactactgggtacataacgaaatgaaggcagaaataaagatgttctttgaaaccaacaagaacaaagacacaacataccagaatctctgggccacattcaaagcaatgtgtagagggaaatttatagcactaaatgcctacaagagaaagcaggaaagatctaacattgacaccctaacatcacaatgaaaagaactagagaagcaggagcaaacacattcaaaagatagcagaaggcaagaaataactaagatcagagcagaactgaaggaaacagagacacaaaaaaacccttcaaaaaaatcaatgaatccaggagctggttttttgaaaagatcaacaaaattgatagaatgctagcaagactaataaagaagaaaagagagaagaatcaaatagatgcaataaaaatgataaaggggatatcaccacccatcccacagaaatacaaactaccatcagagaatactataaacacctctatgcaaataaactagaaaatctagaagaaatggataaattcctcgacacatacactctcccaagactaaaccaggaagaagttgaaactctgaatagaccaataacaggttctgaaattgaggcaataattaatagcttaccaaccaaaaaaagtccaggaccagatggattcaccgccgaattctaccagaggtacaaggaggacctggtaccattctttctgaaactattccaatcaatagaaaaagagggaatcctccctaactcattttatgaggccagcatcatcctgataccaaagcctggcagagacacaaccaaaaaagagaattttagaccaatatccctgatgaacagtgatacaaaaatcctcaataaaatactggcaaaccgaatccagcagcacatcaaaaagcttatccaccatgatcaagtgggcttcatccctgggatgcaaggctggttcaacatacgcaaatcaataaacataatccagcatataaacagaaccaacgacaaaacccacatgattatctcaatagatgcagaaaaggcctttaacaaaattcaacagcccttcatgctaaaaactctgaataaattaggtattgatggaacctatctcaaaataataagagcaaatttatgacaaacccacagccaatatcatactgaatggacaaaaactggaatcattccctttgaaaactggcacaagacagggatgccctctctcaccactcctattcaacatagtgttggaagttctggccagggcaatcaggcaagagaaagaaataaagggtattcaattaggaaaagaggaagtcaaattgtccctgtttgcagatgacatgattgtatatctagaaaaccccatcgtctcagcccaaaatctccttaagctgataaacaacttcagcaaagtatcaggatacaaaatcaatgtgcaaaaatcacaaatattcttatacaccaataacagacaaacagagagccaaatcatgagtgaactcccattcacaattgcttcaaagacaataaaatacctaggaattcaacttacaagggatgtgaaggacctcttcaaggagaattacaaaccactgctcaatgaaataaaagaagatacaaacaaatggaacaacattccatgctcatgggtaggaagaatcaatatcatgaaaatggccatactgcccaaggtaatttatagattcagtgccatcgccatcaagctaccaatgactttcttcacagaactggaaaaaactactttaaagttcatatggaaccaaaaaagagcccgcattgccaagtcaatcctaagccaaaagaacaaagccggaggcatcatgctacctgacttcaaactatactacaaggctacagtaaccaaaacagcatggtactggtaccaaaacagagatattgatcaatggagcagaacagagccctgagaaagaatgccacatatctacaaccatctgatctttgacaaacctgacaaaaacaagcagtggggaaaggattccctatttaataaatggtgctgggaaaactggctagccatatatagaaagctgaaactggatcccttccttacaccttatacaaaaattaattcaagatggattaaagacttacatgttagacctaaaaccataaaaaccctagaagaaaacctaggcaatatcattcaatacagaggcatgggcaaggacttcatgtctaaaacaccaaaagcaatggcaacaaaagccaaaattgacaaatgggatctaatgaaactaaagagcttctgcacagcaaaagaaactaccatcagagtgaacaggcaaccgacagaatgggagaaaatttttgcaacctactcatctgacaaagggctaatatccagaatctacaatgatctcaaacaaatttacaagaaaaaaacacaaccccatcaacaagtgggggaaggatatgaacagacacttctcaaaagacatttatgcagccaatagacacatgaaaaaatgttcatcatcactggccatcaaagaaatgcaaatcaaaaccacaatgagataccatctcacgccagttagaatggcgatcattaaaaagtcaggaaacaacaggtgctggagaggatgtggagaaaacaggaacacttttacactgttggtgggactgtaaactagttcaaccattgtggaagtcagtgtggtgattcctcagggatctagaactagaaataccatttgacccagccatcccattactgggtatatacccaaaggattataaatcatcctgctataaacacacatgcacacttatgtttattgcagcactattcacaatagcaaagacttggaaccaacccaaatgtccaataatgatagactggattaagaaaatgtggcacatatacaccatggaatgctatgcagccataaaaaatgatgagttcatgtcctttgtagagacatggatgaagctggaaaccatcattctcagcaaactatggcaaggacaaaaaaccaaacactgtatgttctcactcgtaggtgggaattgaacaatgagaacacatggacacaggaaggggaatatcacacactggggcctgttttggggtgggaggagtggggagggatagcattaggagatataccgaatgttaaatgacgagttaatgggtgcagcacaccaacatggcataggtatacatatgtaacaaacctgcacgttgtgtacatgtaccctaaaacttaaagtataaaaaaaaaaattcaaaaacctcagtggcatctaatgagaagcatttattgctcacaagactggatagtgagttctgctgatactgactggactcactctggtctggctatggtctgaggtagcctggccctgggggcgcgatggaggctgactcagctctccccacacctgtctcatgttccagtcaggtagccactggccaagaagccaagctaggaaccagggtatctgactcctgagctaaactctaaccctctacaatactgcctcccaaatataacaccaagtgctaggtacatatcatccacagttttcagacttctgcccaaactgggattctttttagtgtgaagagacctggcctgtggggctgaccctggtgtggctgtgaggcagacacaaagggacatttacatccagtcctgaagattacagtccagccctgaagcaacaactaggaaactattccaaaaggaggggatggggctgagtgtggggttctattctcttcataactttaactagaactcaaattgtgtaccttggtagcatccaatcataaatttattttgtcgtatttgtgatagaaaggaacaagtttatccacaaatttatttatttatttatttatttatttatttatttgagacagggtctgactctacgacccaagctggagggcagtggtgcaatctcagctcactgcaaactctgcctcccaggctcaagccatcctcccgcctctgtctcctgagtagctggaactacaggcacacgccaccacacccagctagtttttgtattttttgtagagatgggttttcaccatgtttcccaagctggtctcaaactcctcaaaagagttaccaagcaggactctgcaaccaataatccttgtgtgaagaggatatttgctcttttccctgtttttctttcttggtacagatgtgtgacctctttttgaaaggtgatagtgactttggtgtattttatttggtggtaatggtcatagccccattaatcacatttcttcccatgagaaagaaaaaccactacatggtcatgctaaggatttcagtccctggggtgaggatggtcttgaatatctcctacattcataactcctccacacatctcagtaggtcactgagcacatcaatggacatgccagttattaaaatacttcacgaatactatgatcatttaccagtatgagttattctctggagcttctaatacttcaatagtactgcatggactcagttgagagttaattcaaaatctcagattatccaattctgtttctttccttccaggcaccacctacctatgatgccgtggtacagatggagtaccttgacatggtggtgaatgaaacactcagattattcccagttgctattagacttgagaggacttgcaagaaagatgttgaaatcaatggggtattcattcccaaagggtcaatggtggtgattccaacttatgctcttcaccatgacccaaagtactggacagagcctgaggagttccgccctgaaaggtacaagtctccagggaaatggagctcaccctgacccaggctggttcaagcatattctgcctctcttaatctacatgacaatcgtgtggttgtacaatcatttgcttgtaagtctttttatcacaaaaaagtgataattatcaaactttacaaaccacagactagaaaaaacgaaactacatccatccacagtcccagcacaagacaaagataatcaattatgtccctgtgggcatttttctacgcctatatagatttttaaaaattagaatggtatcactttttatttggtttgaattgctgcttacttgatttaacaggaaactatccactgacctatattactataaatatacatatatatgtatatatataaatatatatatatgtatatattgcatatgccataaaccatttaaccatgatgttatttcaggtgtataggctttttattcctttctgttttttctatgctgtgccctttagctctctgaatttaacagaaactttaaaacatgcttccacattccatttgctttcaacgttacttgctatttcctctgtagtaattataagagtgcaggctgaggtcctgagaagtcctcatccctaatggtttaagccacttcactgaagacacaagacagcacaggtcctcctggtcctatctgtggctgcagtcctgtgccagctcccttatactctcagtagacatctcacacactcctccttggaggtgtcttgagcatgctcttctgggaattcagggacaaggtcaggccttaggcacagttcgcactctggatatagttggtgttttcccattactgtattattaagcaaaatttagaatgaaatttttagggtactggctggtgattcaggatgcttgggatctagactttcattagcccctacctgcaagtttgctgatgggaggaaccttgtcttgttggtcatggtgtccctagtgctagcatggagtctgcacataatacttgttcacagagtaagtcagagctgaccaagttctctgttttctggagtagaggacttctatgtttcctgcaagctcagcacttccacctcctgtggctgcactaatacgaaatcagagaccactcgctgtacttcactttgaatcactcagtcaccaaaaagatagtgcttgccatgtgtcaggaacttggctaggcagggagaaattcatatgatttatataaatccataaatccatatgatttacataaatccataaattcatgtgatatatacgtatatgtgtgtgtatatatatattagagaatgtttgacatatacacaagtacatgttaccgacaccagcctatagaatagttttcgtgcatctccatatatctatcactggttccaacagccatcaatccatgttagctgccccatccaaatgccaccatcaccctcctcctgactatcatgttattttgaagcaatagcctgtaaatatttcagaatgctctccaaaatataaagactcctgtaaaaacatatgacaacaatgccattattactttctttgaatcaacattttttccttaatataatcaaatatttagaaatcaaatttgaataaaacatgggtcaatcttcaaagaatttatagcttaatggaacagatcaaggaaagcagggatgacactacagtagggtagcatcatatgcccatgtaacttatgtgacttaaactatcctgtaagggtgtgggggagaaagagaggaagagatggagagaagaaaaaggaagagaaggaggaggagaaggaggcagaggagaaggtggacggggaaggtagagaggaggaggaggggaattagaaaaaaagagatgacaggagaaggaaagggaaaaataacaacttgaaatagcacaagacgttttctccttctcctttctcaatgagcatgtgaccaacacaagtgtgagttgaggcaggaatccacttttccatccatcagtcttatcatttatgtgccttttatagtgtgaacacatcaccaccctgaatataattttagtgtttagagataaatattatttgcaacaatattcatctcatctcaagaaacgctcctatagggtatggagaatttaaaggacctgtaggttatgatgattataacgaaataaccaaagcaggatttcaatgaccagcccacaaaagtatcctgtgtactactggttgggaggtggaggggggttgttcttaagtaagaacccctaacatgtaactctgtggtttttatgtttcattaactatttaatctaccaatatggaactaggttcagtaagaagaaggacagcatagatccttacatatacacaccctttggaactggacccagaaactgcattggcatgaggtttgctctcatgaacatgaaacttgctctaatcagagtccttcagaacttctccttcaaaccttgtaaagaaacacaggtcagtacactttctgtatgttttattaagaatttttttaactgaagggtatatattttttaaaagaatatgcatgtttatcttttaataattcattctatgggccaaagaacctacttggatccatctttgatcattaaggatgcttcagttctggacttcaaaacctgtagcattaagaacatcatgtaaagtccacacagattagcatgacatgattatgtgtagtctctttgaacctgagtaagtttaaattcagtttcaagtcaattggaaagaagtgttttgcacaatcatgaagtgcaatgattacctggctgtgacttaaatggtgttctccatcaccagaacctgcagaagctctctcatgacagtggttctcaaccactagctgtatattggaatcaccagggagcttcaaaaattcatgatgcctgtgacatctcagaaattctaaactaattaacccagagcgtgactaggttctgtcatgctgtcgggtgaacccctgattagttctcacgtgaagccaaggtggagaatgactaatttcaggcatttctggtggatatgaaggactaccatagagcagggctatccttactccttgaccttatgttccaggtgatacatttaaagaaagatttagaatcttttctctgaagaagttaaagaacagatgtcattgattcatattaagcaatagcctataagtcttatttccaggaccggtgtatttaatatgcaactctaccccttaagtacactttgtgcttgggagaggaggaggatggagatggttgccatcttatctatggcttcagggcagctgtgtagctttcctatgtgtgtattcaggcagggggctcagccctgagagaaagtgggcctctggcacacctgggacagggaagatattccctggcaagctctcaggcatctcaggctggcacttctttgtatccatggcaatttgctttcccctcactgaactgagatcagaatgttactctgttggtggctcccccaacagtgaaggggtgactcagtgacaatagtgctagaagtatgagtcaaaacactgtacaacttgagaaattccccgtttgcactacgcttggaagccaagaggagatgttaaaaagaaaagaataattctttctgaagacatttcccatcattgcacttgatgggttcaactgggaagggttactagactctggaagttgaaaactgcccacataattaaactgtacaacagctactcaggattaccttgcaagttttaacctataaaaatttaactttatatagcacttccaaaatagtttgccataatacctactaatctggatttaatttttaaaactcatccttttaacttaagatttaaataaaaaaaaaaaaacacgagtccacaagaatttgtctcaggcctggcacagagtcagtgctccataaatattttgttaaacgatggatggtgagtgcttttactatccagtatttacccagcttatagattaagtatgaagagttcaagatacatggtgttaagagtcgtttttatatgcttgcaaagcatttttgtcatattttttctactttgcttccatcttttcttctttcacttcatttattaattctccatatgcttgtttaactattgtagatccccttgaaattagacacgcaaggacttcttcaaccagaaaaacccattgttctaaaggtggattcaagagatggaaccctaagtggagaatgagttattctaaggatttctactttggtcttcaagaaagctgtgccccagaacaccagagatttcaacttagtcaataaaaccttgaaataaagatgggcttaatctaatgta

SEQ ID NO: 15530 - DNA, 31799 bp, Homo sapiens
ctgctgtgcagggcagggaagctccaggcaaacagcccagcaaacagcagcactcagctaaaaggaagactcacagaacacagttgaagaaggaaagtggcgatggacctcatcccaaatttggcggtggaaacctggcttctcctggctgtcagcctggtgctcctctatctgtgagtaactgtccaaactcctctctttgtttccttggacttggggtgctaatcgggccccttttcccttatctgttttgaagatcaaaagagatgttcaaggagaagtagctgaagtgttggacgctacaaacgcatagaagttattattatcttatgcagatctatgaatgaataaataagcatttctcccatccaccttctaattttggtgactaggagggtttagggacagcatttggtagtgggaatgatttgattagcttagatctgacgaagactaatcaatgaaaacatggcagcggcagattacaaactgctgatcatgatggacagtgtgatcctcatccccttcccaggctctggggattctgggtacaggaaggagtggcttgcatttttgtctcattaattcgctttctgggttctgtgtctgctggaagggatgtgtagctgtattgcccctgtagacctggttcctgctcccccgccttccaacccaggatatcatttacataacgcaccaggggacaccaagacttcatgggaagctgtcccctggctcttccctctttcctgtgccatgcccctgaaaatcccctccctcctatgagtcactcctccaccctgtcatacacaggatggtttatcttgcaatgattaacctctagagcaaaggagacctggaggaagtttcgaggatttattctttgctttaatctttttcctcccgtctctgggaggctaggattaatatagagctttgtttctcacctaatgggaatctactagcagcctgaaaaggcaggagccatgaaagccaatttggattttacatatttttcccctttatgttacagtacaggagggcaaaccctctcactggtgggattcctggcatcctagagcaggtggagagaagagttactttccactgtgggtagtggaggctccacctgtcccattaacttctacctcaatttgacttttattaagagcagggaaccacaatgacatgaaaatagacactataaacctcattttaattctttcacagaaagcttaggaattcagtgagttgtggcaacatggtttccattgtctaacatttttaaatgaattgatatggtttaaattcattcatttttaaaccagaattttttggagatagactatttccagcatgttccttctggatggtaaaacagggctgttagttcagtatttgtgacaataagtgtgtgtaaaataatgtcacctttcctgaatgtcaggaatatgagtctaatgcacaaatgtatacctctaagacaagactgcacgtcttttcaaatatacctgtccggccatttattttaataactccttttcgaatatacctgcttagcagattgtcttaaactctcaggacaggggagtaagcaagactgtgagccagtgacgatagcaaaggcttccaggtaggatccatatgaagtgagaaaatattcctcagctctcagggtagaactccaaagagatattcatgggtcctggccccaccgtggaggtcactcaaagggcaaacaggttggcatctcatctgcttcaagcctggacacaggggcaccatctgtgtcactctgtgtgtggtctgccatgttgtgggccggtcactacagactcgggcagccaggcagacaatgccttagccttagacaatgctggtgcagcccaggagtcagaaaatgcagtgtagaccaggccctccttaggccaacacaattacatgcaatagatgactggcttttctgttagtctcttcactggacccaaaggctgcattactctaccagaggggagctggaaagaaactaaagagttcgcccagcacagcatctgccttgacatggtaccatgtgaatctagacactcaccaagatctttccttgggggccaatgctgctgacacattaactcaatagcttgtcctcacctgagaggtcaggtaatgtgtttaaagttcaggagcagagattagtgtcattgatttgacatggctgtgacaacaaaggagggaactgaagtgggaatacccaaggccaccctggctttggcaggtggtgcacgcacttccactaactgttctggggcagggaaccaaatgtatgactgggcctgctcatgctgcccctgctgagtcctccaaaccctgcccttcatgtaatttctcagttttattttatcacattttataagtcactggatgtttacaaaatgtttggaacctatactgccttgaaggctaacctctaaagaggagtaaacaaggtcttaatacaactctccgggacgttttatcattacttatcttatatgccatactgcaccatttgctatcaacaggaaagtacctggactttggaaggtccctctgtgtcttttagctgaaagtacatatgaggcatgtggattcttttatgcacatcatctttttcagccacatttttgtagtttgcctctctggagccaactgtgtggggctagcagcttcacagctgaatcagtgtctggcaacctcttccttcagcctctcttcttcctccagttttccatccctcagtcacaccggagggggaaggtctgcaaggatccagaaccatcagttggaggagtttgcacatgactcatgaaagatgagttccaggcaggcctgccatagtgaacaccaggcttaatgggtttttcctcagagatacttcacgtacagaggcagtgaactgactgctttctggttgaccaccttgaaaaagatgagtgtgcctggcactgtgcttctcaggtgagtatgacctgagaagtattagttgctggttcttctgcacacaatcattcaaggacatatggatcaaccatcctcctcaacagctcaaatcaaccagatcatctgaccacagagactgaggtgtacctgaaagctgcccacatttctataaggccaatagaagccatgaacacagttgtcaatctgtagaaataaggactccatgactcctccaaggcctctctgtgaatgaacgtttaagaagggctagatcctaaaacagggtcagagcttagagggaagaaaaagcataaacatttctgagcaaattgtaagggcagtgtcaccataggctcccagtgaccctctgtgattgagtgcatacagtgatgcaaaatctcatcatcagtgcaaaagacaaaaaaaatcttactctttctacctaggatgagagtccccaaatcagcgaagagtccacttactaaacagacataaggaaatgaagtgtcctggaagaattcctgcctgaacctctcaggagcatttgaggacatttatcaagtattcactccaggattgggactatgaagacttcagctgctttcagctaatcattgagacttttcaggggtctcagaatagtcaggaaaggacctgatgagtgaatgcaattactgatgttggagttgctgttattatttatcgtgtacatattacctccctctcttgaccattccagttcctgagtaactcaccagccctctgatctataaagtcacaatccctgtgacctgatttctgtttcactttgtagatatgggacccgtacacatggactttttaagagactgggaattccagggcccacacctctgcctttgttgggaaatgttttgtcctatcgtcaggtgagttgcttgagcttcctcttttgcttcttatggttgcaaacatcagcttagttccatcagtaaaaatgcccctccttgggagggagttctgaggtttcacattttcagaaatggtgggactgggtgcagtggatcatgcctgtaatctcagcctctgtgaggccaagactggcaaattgcttgagcccaggagtttgagaacagcctgggcaacacagtgagacacctgtctctagaaagaaaaaattacctgtgcatgatatggtagcccatgcctgtagtcccagctactctgaatgttaaggtgggaggattgtatgaacccaggaagtcaaggctgtattgagctgtgatcgcaccactgcactccagcttggtcaacagaacaagacagaaaggaagaaagaaagagagagagagaaagaaagagagaggaaggagaggggaggggaggggaggggaggggggaggagaggagaggagagaaaaggagaggagagaggagaggagaggaaaaggtgtgtaggctccacccaaagcatggccaggtttacccctggagggaaagtcacaagctcatgtccagaaggccagtagcagcaagctgctctccagcccagatttcctatcctgtgtacctggagcttgtttctcagattctaactctcacaactgaagcctctgttgtctgattactatctgagaattctacacaattttaccctcgataaaagcagtaatttcttcttcatctttcccagatcaactcttgtagtagatcaacatttctgggaccttcttttgcatggttaaaacatcacagctgaatcttagcaacaggaaggtttgtttttatgtttcagaagtgaaagctcagagcacgcattgtaatttgctgggtgtgatgtgtagaggtggcatttctccatcttttctgtgttaagctagaaaactggaaaggaagtctactttctcattcactcactcactttctcactcaacaacatgccttagacttatctaaatctgcaagactaaaagaggttcctggtttctttaactttctaattctgctagagttctagagagagcacatgagataaatgaaaaggatactgatggaggagattaaaaaattgtgcattccctgcagacactcacttttcctcacctcagtttcacccctgcccttgcaggtgatcattcacggggttaggagactttagagagaataaaagaaaaagcaaaaatacatcagaaagacaaggaattacttactggtcatagacaagggtgagtccttcagtacttagagaaaattcaagagtgactttaaattccccacttcaaatatattctctgttttcttgtctttcccttaagacatctctgaatagcttccttcaactgccagtgaaagatagcaggcctgatttcattggacgcaactgttttcagccccaattagaggtagggtttattctatttaaaataataatcaacttgtattttgtttcctctcccagggtctctggaaatttgacacagagtgctataaaaagtatggaaaaatgtgggggtgagtattctgaaaacctccattggatagacctgctactgtgaggaggttaccccactgcaggatagtctctgcccaggtcttcatgggatgaagctcttgtcaacctaaatacaaacagagagaggttctctgaaagaagaggataattacttgggagtagaatattgcaatgggaatctgcttgccgttataaactatgtgcaaattcagggaggtaaacaagacaaagatgctccatagaaaatatgagaagaatctcataactgttttgagataattattgttagctacaaagatcaataacaagggtgatgccacaccaaggttggacaggcagttgctggacaggtgtccttgcagaaatatttttgtgtaaagttgaaatagcctttgtgcaaagttgtggtttttgtagacacttttgtaatagttttgtttccaggaacacaagcataagaatcctctcttcatagccttcttgggatttatttgtcagggttaaaaaacaattagtgacatcactttggttctgataaagttcacactcgctattgtaaaacttttcgaggcttgtcctaccaaggatcccatgtgtcaccaggtatcgaggtcttcagtctgaactaggctaggagcattgtggttaccacttttctgcaggttttggtggcccagggactcccagcatcgccttctgtccagtgtctgcctattcccctcttctttttttcttccttaggtgcccttttatcacatgcattgtctcagacccttctaatatgtgctcataaatgcatggcatcatctccttcccacattgattcactttcaattaaaagccaaaactccttcatttagactgaatttaacatgtgcttttgaaagaagggttgagagataatagagaaacagattgggaaaccacttatgctccacttttttaaactttctctgcaagtatggaattttttgttctgctttgttgtttaaatttaagccaaaacttcttaatagaaggatatacaaatatttattggtttataccattgcacttactttgaagaagagatgctgaatattattaaaccattgtgttccctggtgggctgatggactgtgattttataaggtggtctcagccaattgcagcagctgttccctgtcagaggggctagaggtttggtgagagcagtggatgaggtgcagtggtgtgtttgttcactagaagcaagtgggagaaagctttgcctctttgtacttcttcatcttctcccctcaagtcctcagaatccacagcgctgactgtggagtgctgtggagctggcatggcccatacaggcaacatgacttagtagacagatgacacagctctagatgtccatgggccccacaccaactgcccttgcagcatttagtccttgtgagcacttgatgatttacctgccttcaatttttcactgacctaatattctttttgataatgaagtattttaaacatataaaacattatggagagtggcataggagatacccacgtatgtaccacccagcttaacgaatgctctactgtcatttctaaccataatctctttaaagagctcttttgtctttcaatatctcttccctgtttggaccacattacccttcatcatatgaagccttgggtggctcctgtgtgagactcttgctgtgtgtcacaccctaatgaactagaacctaaggttgctgtgtgtcgtacaactaggggtatggattacataacataatgatcaaagtctggcttcctgggtgtggctccagctgcagaatcgggctagtgaagtttaatcagctccgttgtccccacacagaacgtatgaaggtcaactccctgtgctggccatcacagatcccgacgtgatcagaacagtgctagtgaaagaatgttattctgtcttcacaaatcgaagggtaagcatccattttttgaaatttaaataatgattgatccactgattaaatttttattttgaaaaaaacatatattcacagaaggttacctaaaaaatgtacaggaaggttccatgtactcttcatcctgtcccgcccagtggtaacatcttgcaatcttgtatattgcaatatatatctagtatattcatattatcaggttggcacaaaagttaaaatggcaaactacaggctgggcataatggctcatgcctgtaatcccagcactttgggaggccgaggcaggtggatcacgaggtcaggagttcgagatcagcctgaccaacatggtgaaaccccatctctactaaaaatacaaaaattagctgcgtgtggtggcatgcgcctgtagtcccagctactcagtagtctgagacaggagaatcgcttgaacctgggaggcggaggttgcagtgagccgagatcacgccattatactccagtctgggcaacccaatgagactccatctcaaacaacaacaacaacaacaacaacaaaaaccggcaaactgcaataacttttgcaccaacctaatactatagtacaggaaattgactttgatatagtttacagagcttttcagatttcaccagttttacatgcccttgtttgtgtgtgtttatgtgtgtgggtagttctaagcaatttttcacattcgtagatttgtgcaacgaccagcaccatcaagatgcagacccattccgtcaccatgtggctccctcctgctgtcctacagtcacaacatggagtttgtctttttctctgacaggttctatatcagagcaaacttttatttatttgaggaggccaatgtattaatatttccttttatggattgttcttttggtgttaagtctgaaaatcctttgcttagccctccttcctacattgctttttctaagagttatatagtttaacactttacaaaatgtaactctattacccattttgtgttaatatttgcataagttatgagatttagatcaaggttcattttctgtggactatggctgtccaaatgttccaacaccattttggaaaggtaggcatattgtcaaaactcagctgagtatattttgtgaatctatttcttattgtttactcctccactaataccacactgtggtgactctagtagctgtacagtaactcttaacatcatatagggcaattctttccactttattgatttatattttcagaatggctttagcttttcttgtcccttgcctttccataaaaattcagaataagcttgtaagtgtctacaaacaaacctgccataattttgataagaattaaagcagaggtgtccaatcttttggcttccctgggccacagtggaagaagaagtgtcgtgggccacacataaaatacacacacacacacacacacacacacacacacacacacacacacacaaatggtctgtgtatagttttcattatatatctaccaccacagataagcaaaaatgtccttgcataataatcctaattatgcactgccccattcagagggtctttcaaaatcattgaacaggttccaagtttgcaatcactgatacagaaaatgtacatatctagctaaacttcactacttttttgatattttttattataaaagaaaagagaacaacataaaactagtggggtacttgacattgtttttgagaaactaatccatcagtatctggcttgatggaagtagttgcaattctcagtgagttctcaaggtgctcatcagatattttggttctaattttactcttcgtgttcttcatccttgaaaatagtagctcacaaatgtaagtgctgccaaaaagcaatgacatgaacaaggtgtgattgtgaagcaagggatatttgtcattgggaagacaggtcttacaaaagtccagtaaagaggcaaaatcaaatttttctataagttgaacatcagattgcagctctaggcattccatttcaaaattgccaggtaacatatatatgtcgactgaaaatggagttgcaaatataccaaaatattgatgattttttcagaaatcttgaaatacctgttttcaaattcctgtatcaaattgaaaagcaaggctgcgtatttttggctgttcacaggaccatgtttagccaacatgtcgaaatgcataaaattgtttgccttaatttgagcttgccataatttcagtttcatatggaatgctgttatggtttgaaacattgtattgttaagttggttttcaacttgaagacacaggtttaactcacttaaatgggccgtcaaacccactaaaaatgctaaatctgtaagccagttttcattgtcaagttctggcaccaattttgtttgataccataaacagcttgatttcacatcacaaagcataaaatctttacattttgccttgacttaaccatcttacttctaaaaagtgaatgacttgctagagtcagcatccatacttttaaggaattcctgaaactagcgatgattcaattcctgggcccttgtgaaatttacagccttgatgacaatttgcatgacgttatctacttttaaagcttgtgcacatggattttcttgatgtattatgcaataatacttcatcaaatgtgagttttgtgtggcaactgcatcatctattaattgtacaagtccctctcttttacctaccatcgccagggcagcatctgtagctatatcacatatgtttacaaaggacaaagaaaattgctttaacatatttttcactgcttcatataaatctcttgatttagttgtgtcttttaatagcatggtgacatttcgatttcttcagtgacattatattcatcatcaatacctctaataaaaatagcaagttgtgccgtatctgtagtgtcagtgccttcatccatcaccaaagcataaaattttaaattagcagttttactctccaaacgtctttcaatagatttcccaatttctccaattctcctggctatagtctggtgagacaaactgattttagaaatatcagtttctcaaggcaaataatatctaccacatcttccagacattgcttaataaactcaccatcagtaaatggttttgatttttttgctattaaatttgctaccacataactaggttttaccttacgattgagtccgagttgtaactttttaaaaaatcttttttgttgaaaagacagactttttttcagttctgctattttgtccttacaacacatacacaccaaatttgtcagcacgtttttgcatataatgcctcttcaaattgtagtctttgaaaactggcacaaattccgtggaaattaagcagagtgcttcgctatttgcctcaacaagaaaaagtcatttgtccacttttcattgaacaatcttccttcatccataatttttgttttttagggttttctttttaagacattgtggaagccattctggaattaaaagcattataatagataagcaactatatttacttttattatggaaattaacagataggaaaatagaacagaaagcaaggtttaataatcaaataagaatacttacatgtcttctaaataatattaaacacctatcatctacaaaggtaggttgaaatattattgataattgctgggttttacttgccaaattgccacaaacacacctaatacctgacagtgtcaattcaactgtccgtgattagaagataacacactggaagtcgcacaccaccataaaactgaagccacacatgcgtacaaatggcgacagtgtctggtgtacagcagcgctctgccttgtccagaatacacacttgaattctttgtcacaattcacttcacgtggcactgcaatagcgtcctctcgctctttgttagttaattttaatggcttttaatttcttcttgctgaactgtttgcaattataatgcaaattatggatactagtccattatttgtggatgtgacatactctgattacccctttccattccattgttgtctacgaagttcacacttgagaatcacatagtcaaattacaaaattacaaaaaaaattgcaaaaaaactcaaaatgttttaagaaagtttccacatttgtattgggatacattcaaagccatcctggactgcatgaggcctgcaggccacaagttggacaagcttgaattaaaccaatagaacaatttgggtataatctatatctttactatgttcagcctttcatcccgtgaatatagtatgcctctccatttctttagcttttattactttcctcaacattttatagttttcagcatagaggtcctgtacatcttttgttagatttacaccagaaatatttcatttttgttggagtaactgtaaatgatactgtttttcttgtattttcagatattgattattgttacatagaaatgtgaataattttgtttgttgatcttgtatcctatagccttgcagaacttacctattcgttctagaaatttttttgtatattccttgacattttatacattgacaattatgtcacctgaaaatagagacaattctattatttcctttccaatctgtatgccttttatttctttttcttgtctagtgtattaagacatcaggtatgctctttagtaagaatgttgagagtgggcattttttagttcttcttgatcttggaaaaaccattcagtccttcatcattaaatgtgatttaactgaatgatttttttacagattgtctttatcaaatgaaggaactgtctctctcttcctagtttattgagattttatcatgacagctggaagtacacattttaaaacaaaacatagttgtggaagataagagaaagttccaagcatgctggcttgatagtccagccccaagttgggaaaagtaattatccctttctttttccttctatttatggaataaaaaattaagagaaaagaattttcaaggaaattgcattattccttcaaaacaggtttctagtctttaagtattacctacttttcaaaaaaaaatcaccacatcatggcatccctttttcaagttgcccatgctgtaggtgtattaaagacagagctggtctgaggcaacatacagtctgcccatctgtcaccaatccttttctactctgcacactcctggggaagggctaggtcttgttcctgtctattccactggaagaacagttccctaccacgtggagcatttgcaattaaaaggagactgagatatagaggcaggagaccacaccagatggctgggtctccccactcccacccccgccccacatacactcagaagaggctaggcatctaggatctccattgagcatcttgaatatggcttgccataatatcatatacagtcaataaatatttgttaaataaggatgcctcttcaatatattttgtgcaaccatgaagatcaccacaactaatgtgagaaaaaatgtttctgttgaactctagtctttaggcccagtgggatttatgaaaagtgccatctctttagctgaggatgaagaatggaagagaatacggtcattgctgtctccaaccttcaccagcggaaaactcaaggaggtatgaaaataagatgagtcttaattagaaatgtaaagaatgaatctggggacaggtagaaagtaagatcacagtccgtttccaaggggtagtccactgagttcgagcttcctaaaaatggtcttttatctttatgtacagaaaagacatcacaaaattcattacaaaatgtcacttactgctccatgctggagaaagccatatccttctgggacttgagtctgcacatttaactacaggtactgatctgttttgtgcttagatgttccccatcattgcccagtatggagatgtattggtgagaaacttgaggcgggaagcagagaaaggcaagcctgtcaccttgaaagagtaagtaggagcacagccatggggttctgagctgtcatgagcccttccagctgcctgccatggagtcgacagtcgcactgttgggttactccagtgaccagacaaaagcagggcagcgctgcaactccaaagagccacctaagagggagtggctcccatgaggcggcaagtcagcaagggaaaagggccttctctcctgtgcacaggagccaggatttacttatctgttaacttgtcaccataaatattctgggagattaaatacatactttagaaattaaaaaaacatgattgtatcaaagttttgagtgtagtggatatggaactgtgggtaagcaagcatttggtacttgttgccttgcattgggtaagatgggaaagttacaatggggaacttggaacaatttcaatcccttcatggtttttctgagaatatcagcaaactatgaactattaaaccttcccactacttccttttcctccaatctcaaaaaagaaagggtgctagaaatgctatgtgtagagcaagcctattatttgctgtctacaatggtatgtgcttcaattatgcaggaacgacaggtgtaatctgagcctgtcctgttcagacttgggacatgtggtcactcagttttgggttctccaaatcaatgttggagagatctattttttttaaccagaacattcttgattgtcacatcttacaaaaatgactctgctctcagcgcaacttcaggtcagaggagctggggatagtggggttttccagagcattagcagggagtgtagagaataaaggatgatatttctaggaactcagaacagggtgttactgttttgtaaagtgttgaagaggaattggctctgggcatagagtctgtagtcagacaacgccacctttcttgaatccactaggaagagttaattattctactcttgttctgctgaagcacagagcttacatatcttatatcatccacactcaacacatgctactgtagttgtctgataatgggtctctgtcttcctatgactgggctccttgacctcagaggtgagtctaactcagcttggtgtctccatcacccccagcatagggccagctccatcactggcaccagataaccaccttctgagggagtagatggaagatgattcagcagatagttctgaaagtctgtggctctttatgtgtcttgactggatatgtgggtttcttgctgcatgtatagtggaaggacggtaagaggtgctgattttaattttccatatctttctccactcagcatctttggggcctacagcatggatgtgattactggcacatcatttggagtgaacatcgactctctcaacaatccacaagacccctttgtggagagcactaagaagttcctaaaatttggtttcttagatccattatttctctcaataagtatgtgggctattatttctttctctctttttaaaaataactgctttcttgacatataattcacatatcgtataattcatccacttaaaaggtacaattccattgtttttaagataatcaaaaatatgtatgaccattactattgtaaactaaaatgtttttgtcaatctagagccctcacacactttagctgtcaacaccccaccacaaaccccactgccctaagcatccaataatcaactttctgcctctatagatttgcctattctggacacttcatagaaataatatcattgatttttctctgttgttttttattctctatttcatgagtttattttagtctgttattttctttcttttgctggctttaggtttcatttgctcttcttcttttagtgttttgtggtgtaaataattataatcaatttgagatattttcttcttttaaatttagatattacagctataaatttccctctgagcactggtttggctacatcctgtgttttggtacatcatgccttctttttgttcatctcaaaacaatttcttgttgcccttttgatttctgctttgactcactggtcacttaaaactgtattgtttaacttccacaaatgtatgagtttcccaaatttctttcccttattgatttctagttttattccatggaagttgatgtacatatgctgtgttaattctatcttgactatcatttcctgaacagcatgattaagttaagcagcagattatggtctacattaatccaaaaactctagtccaatagataaaggctaagaggtcagggaatttaattctattactttggtcactccaaagactcagaaggtgccattgatctcactgctgtagtggtgtttcctatgtatagacctgcccttgctcagtcgccggcctgaaagaagggcaaacatgataaaaggaatgggttccagttgagaatcatgatgttcttattcttattactggtagagaaaattataattgctccaggtaaagtttgcattttcaatgatttccttttgtttgttttgtttttcccacagtactctttccattccttaccccagtttttgaagcattaaatgtctctctgtttccaaaagataccataaattttttaagtaaatctgtaaacagaatgaagaaaagtcgcctcaacgacaaacaaaaggtaaaatctgatggtggttaaatgacgatgtttaggttttgataaatttagattttatacacatgatagagcatgtatctgtatttttaaaaataaagacagagaacttatgtttagaacaagagaagccatttggtagaaataaagaaggagattggggaaggagatgagaatgagtcagagagatagcatttaaaacttgaaatcaggcacaacaattagtatgtcatgatataaacagtattgagataaaattttaccacttctcttccctttaataaattgtcaaaggataaagtttcctgtttgaaaatatattttactggtattgtgctttcctcatatcacagattggtaaagaatcattttaagtccaagactcttattttacatattctgcaattaaaggtcctatgaggctacctgccgactgctgacatgtagtgtgtggtaaatgtgagtgtttcacagcctggagtgaacaggggtcttctctgagaattgaggttgcaaggctggctaactcagctttgccttcacgagccctagaggccagccgaaggatgtctgcaggtcagggagacaggaccaggtaacccagctgtcactgaagattatatagagtttgagaatgttggaatatttgaaaatgctcccccaaaaaagctgctgatgagttctggaaatgtcaggagattaatctatacggacactgctgaagaaaaaggtagaagaataaaagatccagtacttcttcctgggtaagcagttatgaccagagatggaaccggcaactctttggccagaaagctgtatccaaaagacagagaagatgagaaacagggagggcaaaggcgaaaaagcaattggacatgatagctagatttgtttcaggaaaacatcctgctttccaaggatttagatgaatgtttttgttcactggtgactcaggtaacacgtcttcaagaagccatagggaggttgagggagggaagtcaagaagggaggttgaggactgcacttttgatttacttctgacttcacgagtcactttctgccaaagaaatctctccttttgcttctagcaccgactagatttccttcagctgatgattgactcccagaattcgaaagaaactgagtcccacaaaggtaaccaaggagtgcttctgagggctactggcggggacactaagagggagggccttgttctgaaaatgtgcaggaagtattccaggaagatgagaatttttgccacatagcagaacaacacacatttagatgttataaatggtagctggaggcactttccagaagcccacaggtatagccatgttccaggctgaaagggcaaccctaagcaaacctagaatgcttggaggacagtcagtggtttgtggatcacctacatgagatcaaatgccagttctcagcctcctccagatccaccaagtgagaacctctacttggaaatttatatcaaacataccgatcaggaagcacactatcccagtaagggtgattttaactggcagtacttgaaagtgtgttcgcaaggttaatctactgcaaagttttatttttccctttgaaatgcataagtaactaatgggggacacctctgataccatgtaaatctacttcaatcttcagtcttgtatctactagttttatgacccatggatggttttaaccaaaaccattattactaagacagtggcaaaatgataaccatggtcaatttcaagctaccaagatttggcaaccatctcacaaaatttttgaatatttaacaattggttctagagagcaggactcagcagactccagtataccactttaaacatgtccatgtctacatctacttctgtctgtctatctatctgtcaatcatctatctgcctataatttatcaattaatcatctatctatctcaacaaaacttgctgtgataaagaaaatagtctatcatttcactgtttcatatagaaatcactagacacatatggctattgagtactggacatgtggccaatgccactgaagaacaatttttaagagtatttatttttaattgaataaaatttgaatttaaatagccacatgtggatagtggctaccagattggacagcagagctcccaactttaaaattacagttcaatttcaactcagtataatggggttcaatgtaactgagtaaaataattggatggttgaatttacccacagcagcatacagaaatattcactgataaatcagaactctgtagacctttctcacactcattttatattgtgtttggttgtgagttacatgattgctgcaggcaccatatttatttctgtgctccaggtctctaaaggtcctaatccagtcctgaccaaacagactagtgatggaccatcgtgagcttctctcaggagaaatatcaagagggaggccaacctgtaatcataagaacttctgctattttaatgccattcatcagactacagtcaatcaccatgcttctggctttttgtctatctctgctgtcttgtacatcctgagatagtccattctgagaactgtaccctagatcttgtattgcctgatgcctgtcaaagatgtaatccatgctgcttaagtgaggttgtgcacacaaatcaccatatctcctgcaagtttggattttgattcagtagttcgatggtggggtttgagattctgcatttctaataagctcccagatgtggctggtgctgctggtccatgaaacacactttgagtagcaagaggtgatctgtagctcagtattggtcctttaagttccctcaaacatatatagagaaaaggtcctaaatattgcaaattctctcaaagtttgtcaagctatattggaattctctcaaagtctgtcaagctctattgtagaaaatcaaatttttattgggaaaaagcctaccccatatttacttacagataaagtacttttaggatcattcaaggcacacacccataacactgagtatgtaagacagaaatgctctctctggaaattacagcagtgctggtgctgggatgccatgatgaggagtgtgtggcccacaatcatgtagaccttgggaaaacctggattaaaatgattttgcgtcatcctggccctgtataagatacatatcagaatgaaaaccactcccagtgtgactttgaattgcttttccattttttcttcttgggattagagagcttcacttagatttcatctaagctgtgatgttgtacgttgacctgatttacctaaaatgtctttcctctcctttcagctctgtctgatctggagctcgcagcccagtcaataatcttcatttttgctggctatgaaaccaccagcagtgttctttccttcactttatatgaactggccactcaccctgatgtccagcagaaactgcaaaaggagattgatgcagttttgcccaataaggtgaggggatgacccctggagatgaagggaagaggtgaagccttagcaaaaatgcctcctcaccactccccaggagaatttttataaaaagcataatcactgattccttcactgacataatgtaggaagcctctgaggagaaaaacaaagggagaaacatagagaacggttgctactggcagaagcataagatctttgtacaatattgctggccctggttcacctgtttactgttatcacaataatgctaagtaaaaaaaaaaaaaaaaaaaaaaaaaaaaaaaggagtgtggcgagaagatggccaaacaggaacagctccagtctacagctcccagcgtgagcaacacagaagacgaatgatttctgcatttccaactgaggtaccgggtgcatctcaatggggattgttggagagtgggtgcaggacagtgggtgcagtgcacccagcctgagccaaagcagggcgaggcatcacctcacctgggaagtgcaaggggtcagggaattccctttcctaggggtgacggacagcacctggaaaatcaggtcactcccaccctaatactgcgcttttctgatggtcttagcaaacggcacaccaggagattatatcccgcgcatggctcggagggtcctacgcccatggagcctcgctcattgctagcacagcagtctgagatcgaactgcaaggcagcagcaaggctgggggaggggcgcccgccattgctaaggcttgagtaggtaaacaaagctgccaggaagctcaaactgggtgaagcccaccgcagctcaaggaggtctgcctgcctctgtagactccacctctaggggcagagcatagccaaccaaaaggcagcagaaacctctgcagacttaaatgtccctgtctgacagctttgaagagagtagtggttctcccagcacacagctggagatctgagaacagacagactgcctcctcaagtgggtccctgacccccgagcagcctaactgggaggcaccccccagtaggggcagactgacacctcacacggccgggtactcctctgagacaaaacttccagaggaatgatcaggcagcagcatttgcgggtcaccaataccgctgttctgcagcctccactcctgatacccaggcaaacagggtctggagtggacctccggcaaactccaacagacctgcagctgaggatcctgactgtcagaaggaaaactaacaaacagaaaggacatccacaccaaaacccatctgtacatcaccatcatcaaagatcaaaggtagataaaaacacaaagatgggggaaaaacagcagaaaaactgaaaaatctaaaaatcagagcacctctcctcctccaaaggaacgcagctccgcaccagcaacggaaagctggatggagaatgactttgacgagttgagagaagaaggcttcagacgatcaaactactccgagctaaaggaggaagttcgaacccatggcaaagaagttaaaaaccttgaaaaaagattagacaaatggctaactagaataatcaatgcagagaagtccttaaaggacctgatggagctgaagaccatggcacgagaactacgtgatgaatgcacaagcctcagtagccaattcaatcaactggaagaaagggtatcagtgatggaagatcaaatgaatgaaatgaagaaagaagagaagtttagaagaaaaagaataaaaagaaaggaacaaagcctccaagaaatatgggactatgtgaaaagaccaaatctacgtctgattggtgtacctgaaagtgacggggagaatagaacgaagttggaaaacactctgcaggatattatccaggagaacttccccaatctagcaaggcaggccaacattcaaattcaggaaatacagagaacgccacaaagatactcctcgagaagagcaactccaagacacataattgtcagattcaccaaagttgaaatgaaggaaaaaatgttaagggcagccagagagaaaggtcgggttacccacaaacacaaacccatcagactaacagtggatctctcggcagaaactctacaagccagtagagagtgggggccaatattcaacattcttaaagaaaagaattttcaacccagaatttcatttccagccaaactaagcttcataagtgaaggagaaataaaatactttacagacaagcaaatgctgagagattttgtcaccaccaggcctgccctaaaagagctcttgaaggaagcactaaacatggaaaggaacaactggtaccagccactgcaaaaacatgccaaattgtaaagaccatcgaggctaaggagaaactgcatcaactaacgagcaaaataatcagctaacatcataatgacaggatcaaattcacatataaaaatattaaccttaaatgtaaacgggctaaatgctccaattaaaagacacagactggcaaactggatagagtcaagacccatcggtgtgctgtattcaggaaacccatctcacgtgcaaagtaacacataggctcaaaataaagggatggaggaagatctaccaagcaaatggacaacaaaaaaaggcaggggttgcaatcctactctctgataaaacaggctttaaaccaacaaagatcaaaagagacaaagaaggccattacataatggtaaagggatcaattcaacaagaagagctaactatcctaaatatatatgcacccaatacaggagcacccagattcatgaagcaagtctttagagacttacaaagagagttagactcccacacaataataatggaagactttaacaccacactgtcaacactagacagatcaacaggacagaaagttaagaaggatatccaggaattgaactcagctctgcacaaagtggacataatagacatctacagaactctccaccccaaatcaacagaatatacattcttttcagcaccacaccacacctattccaaaattaaccacatagttggaagtaaagcactcctcagcaaatgtaaaagaacagacattataacaaactgtctctcagaccacagtgcaatcaaactagaactcaggattcagaaactcactcaaaaccgctcaactacatggaaactgaacaacctgctcctgaatgactactgggtacataacgaaatgaaggcagaaataaagatgttctttgaaaccaacaagaacaaagacacaacataccagaatctctgggccacattcaaagcaatgtgtagagggaaatttatagcactaaatgcctacaagagaaagcaggaaagatctaacattgacaccctaacatcacaatgaaaagaactagagaagcaggagcaaacacattcaaaagatagcagaaggcaagaaataactaagatcagagcagaactgaaggaaacagagacacaaaaaaacccttcaaaaaaatcaatgaatccaggagctggttttttgaaaagatcaacaaaattgatagaatgctagcaagactaataaagaagaaaagagagaagaatcaaatagatgcaataaaaatgataaaggggatatcaccacccatcccacagaaatacaaactaccatcagagaatactataaacacctctatgcaaataaactagaaaatctagaagaaatggataaattcctcgacacatacactctcccaagactaaaccaggaagaagttgaaactctgaatagaccaataacaggttctgaaattgaggcaataattaatagcttaccaaccaaaaaaagtccaggaccagatggattcaccgccgaattctaccagaggtacaaggaggacctggtaccattctttctgaaactattccaatcaatagaaaaagagggaatcctccctaactcattttatgaggccagcatcatcctgataccaaagcctggcagagacacaaccaaaaaagagaattttagaccaatatccctgatgaacagtgatacaaaaatcctcaataaaatactggcaaaccgaatccagcagcacatcaaaaagcttatccaccatgatcaagtgggcttcatccctgggatgcaaggctggttcaacatacgcaaatcaataaacataatccagcatataaacagaaccaacgacaaaacccacatgattatctcaatagatgcagaaaaggcctttaacaaaattcaacagcccttcatgctaaaaactctgaataaattaggtattgatggaacctatctcaaaataataagagcaaatttatgacaaacccacagccaatatcatactgaatggacaaaaactggaatcattccctttgaaaactggcacaagacagggatgccctctctcaccactcctattcaacatagtgttggaagttctggccagggcaatcaggcaagagaaagaaataaagggtattcaattaggaaaagaggaagtcaaattgtccctgtttgcagatgacatgattgtatatctagaaaaccccatcgtctcagcccaaaatctccttaagctgataaacaacttcagcaaagtatcaggatacaaaatcaatgtgcaaaaatcacaaatattcttatacaccaataacagacaaacagagagccaaatcatgagtgaactcccattcacaattgcttcaaagacaataaaatacctaggaattcaacttacaagggatgtgaaggacctcttcaaggagaattacaaaccactgctcaatgaaataaaagaagatacaaacaaatggaacaacattccatgctcatgggtaggaagaatcaatatcatgaaaatggccatactgcccaaggtaatttatagattcagtgccatcgccatcaagctaccaatgactttcttcacagaactggaaaaaactactttaaagttcatatggaaccaaaaaagagcccgcattgccaagtcaatcctaagccaaaagaacaaagccggaggcatcatgctacctgacttcaaactatactacaaggctacagtaaccaaaacagcatggtactggtaccaaaacagagatattgatcaatggagcagaacagagccctgagaaagaatgccacatatctacaaccatctgatctttgacaaacctgacaaaaacaagcagtggggaaaggattccctatttaataaatggtgctgggaaaactggctagccatatatagaaagctgaaactggatcccttccttacaccttatacaaaaattaattcaagatggattaaagacttacatgttagacctaaaaccataaaaaccctagaagaaaacctaggcaatatcattcaatacagaggcatgggcaaggacttcatgtctaaaacaccaaaagcaatggcaacaaaagccaaaattgacaaatgggatctaatgaaactaaagagcttctgcacagcaaaagaaactaccatcagagtgaacaggcaaccgacagaatgggagaaaatttttgcaacctactcatctgacaaagggctaatatccagaatctacaatgatctcaaacaaatttacaagaaaaaaacacaaccccatcaacaagtgggggaaggatatgaacagacacttctcaaaagacatttatgcagccaatagacacatgaaaaaatgttcatcatcactggccatcaaagaaatgcaaatcaaaaccacaatgagataccatctcacgccagttagaatggcgatcattaaaaagtcaggaaacaacaggtgctggagaggatgtggagaaaacaggaacacttttacactgttggtgggactgtaaactagttcaaccattgtggaagtcagtgtggtgattcctcagggatctagaactagaaataccatttgacccagccatcccattactgggtatatacccaaaggattataaatcatcctgctataaacacacatgcacacttatgtttattgcagcactattcacaatagcaaagacttggaaccaacccaaatgtccaataatgatagactggattaagaaaatgtggcacatatacaccatggaatgctatgcagccataaaaaatgatgagttcatgtcctttgtagagacatggatgaagctggaaaccatcattctcagcaaactatggcaaggacaaaaaaccaaacactgtatgttctcactcgtaggtgggaattgaacaatgagaacacatggacacaggaaggggaatatcacacactggggcctgttttggggtgggaggagtggggagggatagcattaggagatataccgaatgttaaatgacgagttaatgggtgcagcacaccaacatggcataggtatacatatgtaacaaacctgcacgttgtgtacatgtaccctaaaacttaaagtataaaaaaaaaaattcaaaaacctcagtggcatctaatgagaagcatttattgctcacaagactggatagtgagttctgctgatactgactggactcactctggtctggctatggtctgaggtagcctggccctgggggcgcgatggaggctgactcagctctccccacacctgtctcatgttccagtcaggtagccactggccaagaagccaagctaggaaccagggtatctgactcctgagctaaactctaaccctctacaatactgcctcccaaatataacaccaagtgctaggtacatatcatccacagttttcagacttctgcccaaactgggattctttttagtgtgaagagacctggcctgtggggctgaccctggtgtggctgtgaggcagacacaaagggacatttacatccagtcctgaagattacagtccagccctgaagcaacaactaggaaactattccaaaaggaggggatggggctgagtgtggggttctattctcttcataactttaactagaactcaaattgtgtaccttggtagcatccaatcataaatttattttgtcgtatttgtgatagaaaggaacaagtttatccacaaatttatttatttatttatttatttatttatttatttgagacagggtctgactctacgacccaagctggagggcagtggtgcaatctcagctcactgcaaactctgcctcccaggctcaagccatcctcccgcctctgtctcctgagtagctggaactacaggcacacgccaccacacccagctagtttttgtattttttgtagagatgggttttcaccatgtttcccaagctggtctcaaactcctcaaaagagttaccaagcaggactctgcaaccaataatccttgtgtgaagaggatatttgctcttttccctgtttttctttcttggtacagatgtgtgacctctttttgaaaggtgatagtgactttggtgtattttatttggtggtaatggtcatagccccattaatcacatttcttcccatgagaaagaaaaaccactacatggtcatgctaaggatttcagtccctggggtgaggatggtcttgaatatctcctacattcataactcctccacacatctcagtaggtcactgagcacatcaatggacatgccagttattaaaatacttcacgaatactatgatcatttaccagtatgagttattctctggagcttctaatacttcaatagtactgcatggactcagttgagagttaattcaaaatctcagattatccaattctgtttctttccttccaggcaccacctacctatgatgccgtggtacagatggagtaccttgacatggtggtgaatgaaacactcagattattcccagttgctattagacttgagaggacttgcaagaaagatgttgaaatcaatggggtattcattcccaaagggtcaatggtggtgattccaacttatgctcttcaccatgacccaaagtactggacagagcctgaggagttccgccctgaaaggtacaagtctccagggaaatggagctcaccctgacccaggctggttcaagcatattctgcctctcttaatctacatgacaatcgtgtggttgtacaatcatttgcttgtaagtctttttatcacaaaaaagtgataattatcaaactttacaaaccacagactagaaaaaacgaaactacatccatccacagtcccagcacaagacaaagataatcaattatgtccctgtgggcatttttctacgcctatatagatttttaaaaattagaatggtatcactttttatttggtttgaattgctgcttacttgatttaacaggaaactatccactgacctatattactataaatatacatatatatgtatatatataaatatatatatatgtatatattgcatatgccataaaccatttaaccatgatgttatttcaggtgtataggctttttattcctttctgttttttctatgctgtgccctttagctctctgaatttaacagaaactttaaaacatgcttccacattccatttgctttcaacgttacttgctatttcctctgtagtaattataagagtgcaggctgaggtcctgagaagtcctcatccctaatggtttaagccacttcactgaagacacaagacagcacaggtcctcctggtcctatctgtggctgcagtcctgtgccagctcccttatactctcagtagacatctcacacactcctccttggaggtgtcttgagcatgctcttctgggaattcagggacaaggtcaggccttaggcacagttcgcactctggatatagttggtgttttcccattactgtattattaagcaaaatttagaatgaaatttttagggtactggctggtgattcaggatgcttgggatctagactttcattagcccctacctgcaagtttgctgatgggaggaaccttgtcttgttggtcatggtgtccctagtgctagcatggagtctgcacataatacttgttcacagagtaagtcagagctgaccaagttctctgttttctggagtagaggacttctatgtttcctgcaagctcagcacttccacctcctgtggctgcactaatacgaaatcagagaccactcgctgtacttcactttgaatcactcagtcaccaaaaagatagtgcttgccatgtgtcaggaacttggctaggcagggagaaattcatatgatttatataaatccataaatccatatgatttacataaatccataaattcatgtgatatatacgtatatgtgtgtgtatatatatattagagaatgtttgacatatacacaagtacatgttaccgacaccagcctatagaatagttttcgtgcatctccatatatctatcactggttccaacagccatcaatccatgttagctgccccatccaaatgccaccatcaccctcctcctgactatcatgttattttgaagcaatagcctgtaaatatttcagaatgctctccaaaatataaagactcctgtaaaaacatatgacaacaatgccattattactttctttgaatcaacattttttccttaatataatcaaatatttagaaatcaaatttgaataaaacatgggtcaatcttcaaagaatttatagcttaatggaacagatcaaggaaagcagggatgacactacagtagggtagcatcatatgcccatgtaacttatgtgacttaaactatcctgtaagggtgtgggggagaaagagaggaagagatggagagaagaaaaaggaagagaaggaggaggagaaggaggcagaggagaaggtggacggggaaggtagagaggaggaggaggggaattagaaaaaaagagatgacaggagaaggaaagggaaaaataacaacttgaaatagcacaagacgttttctccttctcctttctcaatgagcatgtgaccaacacaagtgtgagttgaggcaggaatccacttttccatccatcagtcttatcatttatgtgccttttatagtgtgaacacatcaccaccctgaatataattttagtgtttagagataaatattatttgcaacaatattcatctcatctcaagaaacgctcctatagggtatggagaatttaaaggacctgtaggttatgatgattataacgaaataaccaaagcaggatttcaatgaccagcccacaaaagtatcctgtgtactactggttgggaggtggaggggggttgttcttaagtaagaacccctaacatgtaactctgtggtttttatgtttcattaactatttaatctaccaatatggaactaggttcagtaagaagaaggacagcatagatccttacatatacacaccctttggaactggacccagaaactgcattggcatgaggtttgctctcatgaacatgaaacttgctctaatcagagtccttcagaacttctccttcaaaccttgtaaagaaacacaggtcagtacactttctgtatgttttattaagaatttttttaactgaagggtatatattttttaaaagaatatgcatgtttatcttttaataattcattctatgggccaaagaacctacttggatccatctttgatcattaaggatgcttcagttctggacttcaaaacctgtagcattaagaacatcatgtaaagtccacacagattagcatgacatgattatgtgtagtctctttgaacctgagtaagtttaaattcagtttcaagtcaattggaaagaagtgttttgcacaatcatgaagtgcaatgattacctggctgtgacttaaatggtgttctccatcaccagaacctgcagaagctctctcatgacagtggttctcaaccactagctgtatattggaatcaccagggagcttcaaaaattcatgatgcctgtgacatctcagaaattctaaactaattaacccagagcgtgactaggttctgtcatgctgtcgggtgaacccctgattagttctcacgtgaagccaaggtggagaatgactaatttcaggcatttctggtggatatgaaggactaccatagagcagggctatccttactccttgaccttatgttccaggtgatacatttaaagaaagatttagaatcttttctctgaagaagttaaagaacagatgtcattgattcatattaagcaatagcctataagtcttatttccaggaccggtgtatttaatatgcaactctaccccttaagtacactttgtgcttgggagaggaggaggatggagatggttgccatcttatctatggcttcagggcagctgtgtagctttcctatgtgtgtattcaggcagggggctcagccctgagagaaagtgggcctctggcacacctgggacagggaagatattccctggcaagctctcaggcatctcaggctggcacttctttgtatccatggcaatttgctttcccctcactgaactgagatcagaatgttactctgttggtggctcccccaacagtgaaggggtgactcagtgacaatagtgctagaagtatgagtcaaaacactgtacaacttgagaaattccccgtttgcactacgcttggaagccaagaggagatgttaaaaagaaaagaataattctttctgaagacatttcccatcattgcacttgatgggttcaactgggaagggttactagactctggaagttgaaaactgcccacataattaaactgtacaacagctactcaggattaccttgcaagttttaacctataaaaatttaactttatatagcacttccaaaatagtttgccataatacctactaatctggatttaatttttaaaactcatccttttaacttaagatttaaataaaaaaaaaaaaacacgagtccacaagaatttgtctcaggcctggcacagagtcagtgctccataaatattttgttaaacgatggatggtgagtgcttttactatccagtatttacccagcttatagattaagtatgaagagttcaagatacatggtgttaagagtcgtttttatatgcttgcaaagcatttttgtcatattttttctactttgcttccatcttttcttctttcacttcatttattaattctccatatgcttgtttaactattgtagatccccttgaaattagacacgcaaggacttcttcaaccagaaaaacccattgttctaaaggtggattcaagagatggaaccctaagtggagaatgagttattctaaggatttctactttggtcttcaagaaagctgtgccccagaacaccagagatttcaacttagtcaataaaaccttgaaataaagatgggcttaatct

SEQ ID NO: 15531 - DNA, 31791 bp, Homo sapiens
gggcagggaagctccaggcaaacagcccagcaaacagcagcactcagctaaaaggaagactcacagaacacagttgaagaaggaaagtggcgatggacctcatcccaaatttggcggtggaaacctggcttctcctggctgtcagcctggtgctcctctatctgtgagtaactgtccaaactcctctctttgtttccttggacttggggtgctaatcgggccccttttcccttatctgttttgaagatcaaaagagatgttcaaggagaagtagctgaagtgttggacgctacaaacgcatagaagttattattatcttatgcagatctatgaatgaataaataagcatttctcccatccaccttctaattttggtgactaggagggtttagggacagcatttggtagtgggaatgatttgattagcttagatctgacgaagactaatcaatgaaaacatggcagcggcagattacaaactgctgatcatgatggacagtgtgatcctcatccccttcccaggctctggggattctgggtacaggaaggagtggcttgcatttttgtctcattaattcgctttctgggttctgtgtctgctggaagggatgtgtagctgtattgcccctgtagacctggttcctgctcccccgccttccaacccaggatatcatttacataacgcaccaggggacaccaagacttcatgggaagctgtcccctggctcttccctctttcctgtgccatgcccctgaaaatcccctccctcctatgagtcactcctccaccctgtcatacacaggatggtttatcttgcaatgattaacctctagagcaaaggagacctggaggaagtttcgaggatttattctttgctttaatctttttcctcccgtctctgggaggctaggattaatatagagctttgtttctcacctaatgggaatctactagcagcctgaaaaggcaggagccatgaaagccaatttggattttacatatttttcccctttatgttacagtacaggagggcaaaccctctcactggtgggattcctggcatcctagagcaggtggagagaagagttactttccactgtgggtagtggaggctccacctgtcccattaacttctacctcaatttgacttttattaagagcagggaaccacaatgacatgaaaatagacactataaacctcattttaattctttcacagaaagcttaggaattcagtgagttgtggcaacatggtttccattgtctaacatttttaaatgaattgatatggtttaaattcattcatttttaaaccagaattttttggagatagactatttccagcatgttccttctggatggtaaaacagggctgttagttcagtatttgtgacaataagtgtgtgtaaaataatgtcacctttcctgaatgtcaggaatatgagtctaatgcacaaatgtatacctctaagacaagactgcacgtcttttcaaatatacctgtccggccatttattttaataactccttttcgaatatacctgcttagcagattgtcttaaactctcaggacaggggagtaagcaagactgtgagccagtgacgatagcaaaggcttccaggtaggatccatatgaagtgagaaaatattcctcagctctcagggtagaactccaaagagatattcatgggtcctggccccaccgtggaggtcactcaaagggcaaacaggttggcatctcatctgcttcaagcctggacacaggggcaccatctgtgtcactctgtgtgtggtctgccatgttgtgggccggtcactacagactcgggcagccaggcagacaatgccttagccttagacaatgctggtgcagcccaggagtcagaaaatgcagtgtagaccaggccctccttaggccaacacaattacatgcaatagatgactggcttttctgttagtctcttcactggacccaaaggctgcattactctaccagaggggagctggaaagaaactaaagagttcgcccagcacagcatctgccttgacatggtaccatgtgaatctagacactcaccaagatctttccttgggggccaatgctgctgacacattaactcaatagcttgtcctcacctgagaggtcaggtaatgtgtttaaagttcaggagcagagattagtgtcattgatttgacatggctgtgacaacaaaggagggaactgaagtgggaatacccaaggccaccctggctttggcaggtggtgcacgcacttccactaactgttctggggcagggaaccaaatgtatgactgggcctgctcatgctgcccctgctgagtcctccaaaccctgcccttcatgtaatttctcagttttattttatcacattttataagtcactggatgtttacaaaatgtttggaacctatactgccttgaaggctaacctctaaagaggagtaaacaaggtcttaatacaactctccgggacgttttatcattacttatcttatatgccatactgcaccatttgctatcaacaggaaagtacctggactttggaaggtccctctgtgtcttttagctgaaagtacatatgaggcatgtggattcttttatgcacatcatctttttcagccacatttttgtagtttgcctctctggagccaactgtgtggggctagcagcttcacagctgaatcagtgtctggcaacctcttccttcagcctctcttcttcctccagttttccatccctcagtcacaccggagggggaaggtctgcaaggatccagaaccatcagttggaggagtttgcacatgactcatgaaagatgagttccaggcaggcctgccatagtgaacaccaggcttaatgggtttttcctcagagatacttcacgtacagaggcagtgaactgactgctttctggttgaccaccttgaaaaagatgagtgtgcctggcactgtgcttctcaggtgagtatgacctgagaagtattagttgctggttcttctgcacacaatcattcaaggacatatggatcaaccatcctcctcaacagctcaaatcaaccagatcatctgaccacagagactgaggtgtacctgaaagctgcccacatttctataaggccaatagaagccatgaacacagttgtcaatctgtagaaataaggactccatgactcctccaaggcctctctgtgaatgaacgtttaagaagggctagatcctaaaacagggtcagagcttagagggaagaaaaagcataaacatttctgagcaaattgtaagggcagtgtcaccataggctcccagtgaccctctgtgattgagtgcatacagtgatgcaaaatctcatcatcagtgcaaaagacaaaaaaaatcttactctttctacctaggatgagagtccccaaatcagcgaagagtccacttactaaacagacataaggaaatgaagtgtcctggaagaattcctgcctgaacctctcaggagcatttgaggacatttatcaagtattcactccaggattgggactatgaagacttcagctgctttcagctaatcattgagacttttcaggggtctcagaatagtcaggaaaggacctgatgagtgaatgcaattactgatgttggagttgctgttattatttatcgtgtacatattacctccctctcttgaccattccagttcctgagtaactcaccagccctctgatctataaagtcacaatccctgtgacctgatttctgtttcactttgtagatatgggacccgtacacatggactttttaagagactgggaattccagggcccacacctctgcctttgttgggaaatgttttgtcctatcgtcaggtgagttgcttgagcttcctcttttgcttcttatggttgcaaacatcagcttagttccatcagtaaaaatgcccctccttgggagggagttctgaggtttcacattttcagaaatggtgggactgggtgcagtggatcatgcctgtaatctcagcctctgtgaggccaagactggcaaattgcttgagcccaggagtttgagaacagcctgggcaacacagtgagacacctgtctctagaaagaaaaaattacctgtgcatgatatggtagcccatgcctgtagtcccagctactctgaatgttaaggtgggaggattgtatgaacccaggaagtcaaggctgtattgagctgtgatcgcaccactgcactccagcttggtcaacagaacaagacagaaaggaagaaagaaagagagagagagaaagaaagagagaggaaggagaggggaggggaggggaggggaggggggaggagaggagaggagagaaaaggagaggagagaggagaggagaggaaaaggtgtgtaggctccacccaaagcatggccaggtttacccctggagggaaagtcacaagctcatgtccagaaggccagtagcagcaagctgctctccagcccagatttcctatcctgtgtacctggagcttgtttctcagattctaactctcacaactgaagcctctgttgtctgattactatctgagaattctacacaattttaccctcgataaaagcagtaatttcttcttcatctttcccagatcaactcttgtagtagatcaacatttctgggaccttcttttgcatggttaaaacatcacagctgaatcttagcaacaggaaggtttgtttttatgtttcagaagtgaaagctcagagcacgcattgtaatttgctgggtgtgatgtgtagaggtggcatttctccatcttttctgtgttaagctagaaaactggaaaggaagtctactttctcattcactcactcactttctcactcaacaacatgccttagacttatctaaatctgcaagactaaaagaggttcctggtttctttaactttctaattctgctagagttctagagagagcacatgagataaatgaaaaggatactgatggaggagattaaaaaattgtgcattccctgcagacactcacttttcctcacctcagtttcacccctgcccttgcaggtgatcattcacggggttaggagactttagagagaataaaagaaaaagcaaaaatacatcagaaagacaaggaattacttactggtcatagacaagggtgagtccttcagtacttagagaaaattcaagagtgactttaaattccccacttcaaatatattctctgttttcttgtctttcccttaagacatctctgaatagcttccttcaactgccagtgaaagatagcaggcctgatttcattggacgcaactgttttcagccccaattagaggtagggtttattctatttaaaataataatcaacttgtattttgtttcctctcccagggtctctggaaatttgacacagagtgctataaaaagtatggaaaaatgtgggggtgagtattctgaaaacctccattggatagacctgctactgtgaggaggttaccccactgcaggatagtctctgcccaggtcttcatgggatgaagctcttgtcaacctaaatacaaacagagagaggttctctgaaagaagaggataattacttgggagtagaatattgcaatgggaatctgcttgccgttataaactatgtgcaaattcagggaggtaaacaagacaaagatgctccatagaaaatatgagaagaatctcataactgttttgagataattattgttagctacaaagatcaataacaagggtgatgccacaccaaggttggacaggcagttgctggacaggtgtccttgcagaaatatttttgtgtaaagttgaaatagcctttgtgcaaagttgtggtttttgtagacacttttgtaatagttttgtttccaggaacacaagcataagaatcctctcttcatagccttcttgggatttatttgtcagggttaaaaaacaattagtgacatcactttggttctgataaagttcacactcgctattgtaaaacttttcgaggcttgtcctaccaaggatcccatgtgtcaccaggtatcgaggtcttcagtctgaactaggctaggagcattgtggttaccacttttctgcaggttttggtggcccagggactcccagcatcgccttctgtccagtgtctgcctattcccctcttctttttttcttccttaggtgcccttttatcacatgcattgtctcagacccttctaatatgtgctcataaatgcatggcatcatctccttcccacattgattcactttcaattaaaagccaaaactccttcatttagactgaatttaacatgtgcttttgaaagaagggttgagagataatagagaaacagattgggaaaccacttatgctccacttttttaaactttctctgcaagtatggaattttttgttctgctttgttgtttaaatttaagccaaaacttcttaatagaaggatatacaaatatttattggtttataccattgcacttactttgaagaagagatgctgaatattattaaaccattgtgttccctggtgggctgatggactgtgattttataaggtggtctcagccaattgcagcagctgttccctgtcagaggggctagaggtttggtgagagcagtggatgaggtgcagtggtgtgtttgttcactagaagcaagtgggagaaagctttgcctctttgtacttcttcatcttctcccctcaagtcctcagaatccacagcgctgactgtggagtgctgtggagctggcatggcccatacaggcaacatgacttagtagacagatgacacagctctagatgtccatgggccccacaccaactgcccttgcagcatttagtccttgtgagcacttgatgatttacctgccttcaatttttcactgacctaatattctttttgataatgaagtattttaaacatataaaacattatggagagtggcataggagatacccacgtatgtaccacccagcttaacgaatgctctactgtcatttctaaccataatctctttaaagagctcttttgtctttcaatatctcttccctgtttggaccacattacccttcatcatatgaagccttgggtggctcctgtgtgagactcttgctgtgtgtcacaccctaatgaactagaacctaaggttgctgtgtgtcgtacaactaggggtatggattacataacataatgatcaaagtctggcttcctgggtgtggctccagctgcagaatcgggctagtgaagtttaatcagctccgttgtccccacacagaacgtatgaaggtcaactccctgtgctggccatcacagatcccgacgtgatcagaacagtgctagtgaaagaatgttattctgtcttcacaaatcgaagggtaagcatccattttttgaaatttaaataatgattgatccactgattaaatttttattttgaaaaaaacatatattcacagaaggttacctaaaaaatgtacaggaaggttccatgtactcttcatcctgtcccgcccagtggtaacatcttgcaatcttgtatattgcaatatatatctagtatattcatattatcaggttggcacaaaagttaaaatggcaaactacaggctgggcataatggctcatgcctgtaatcccagcactttgggaggccgaggcaggtggatcacgaggtcaggagttcgagatcagcctgaccaacatggtgaaaccccatctctactaaaaatacaaaaattagctgcgtgtggtggcatgcgcctgtagtcccagctactcagtagtctgagacaggagaatcgcttgaacctgggaggcggaggttgcagtgagccgagatcacgccattatactccagtctgggcaacccaatgagactccatctcaaacaacaacaacaacaacaacaacaaaaaccggcaaactgcaataacttttgcaccaacctaatactatagtacaggaaattgactttgatatagtttacagagcttttcagatttcaccagttttacatgcccttgtttgtgtgtgtttatgtgtgtgggtagttctaagcaatttttcacattcgtagatttgtgcaacgaccagcaccatcaagatgcagacccattccgtcaccatgtggctccctcctgctgtcctacagtcacaacatggagtttgtctttttctctgacaggttctatatcagagcaaacttttatttatttgaggaggccaatgtattaatatttccttttatggattgttcttttggtgttaagtctgaaaatcctttgcttagccctccttcctacattgctttttctaagagttatatagtttaacactttacaaaatgtaactctattacccattttgtgttaatatttgcataagttatgagatttagatcaaggttcattttctgtggactatggctgtccaaatgttccaacaccattttggaaaggtaggcatattgtcaaaactcagctgagtatattttgtgaatctatttcttattgtttactcctccactaataccacactgtggtgactctagtagctgtacagtaactcttaacatcatatagggcaattctttccactttattgatttatattttcagaatggctttagcttttcttgtcccttgcctttccataaaaattcagaataagcttgtaagtgtctacaaacaaacctgccataattttgataagaattaaagcagaggtgtccaatcttttggcttccctgggccacagtggaagaagaagtgtcgtgggccacacataaaatacacacacacacacacacacacacacacacacacacacacacacacaaatggtctgtgtatagttttcattatatatctaccaccacagataagcaaaaatgtccttgcataataatcctaattatgcactgccccattcagagggtctttcaaaatcattgaacaggttccaagtttgcaatcactgatacagaaaatgtacatatctagctaaacttcactacttttttgatattttttattataaaagaaaagagaacaacataaaactagtggggtacttgacattgtttttgagaaactaatccatcagtatctggcttgatggaagtagttgcaattctcagtgagttctcaaggtgctcatcagatattttggttctaattttactcttcgtgttcttcatccttgaaaatagtagctcacaaatgtaagtgctgccaaaaagcaatgacatgaacaaggtgtgattgtgaagcaagggatatttgtcattgggaagacaggtcttacaaaagtccagtaaagaggcaaaatcaaatttttctataagttgaacatcagattgcagctctaggcattccatttcaaaattgccaggtaacatatatatgtcgactgaaaatggagttgcaaatataccaaaatattgatgattttttcagaaatcttgaaatacctgttttcaaattcctgtatcaaattgaaaagcaaggctgcgtatttttggctgttcacaggaccatgtttagccaacatgtcgaaatgcataaaattgtttgccttaatttgagcttgccataatttcagtttcatatggaatgctgttatggtttgaaacattgtattgttaagttggttttcaacttgaagacacaggtttaactcacttaaatgggccgtcaaacccactaaaaatgctaaatctgtaagccagttttcattgtcaagttctggcaccaattttgtttgataccataaacagcttgatttcacatcacaaagcataaaatctttacattttgccttgacttaaccatcttacttctaaaaagtgaatgacttgctagagtcagcatccatacttttaaggaattcctgaaactagcgatgattcaattcctgggcccttgtgaaatttacagccttgatgacaatttgcatgacgttatctacttttaaagcttgtgcacatggattttcttgatgtattatgcaataatacttcatcaaatgtgagttttgtgtggcaactgcatcatctattaattgtacaagtccctctcttttacctaccatcgccagggcagcatctgtagctatatcacatatgtttacaaaggacaaagaaaattgctttaacatatttttcactgcttcatataaatctcttgatttagttgtgtcttttaatagcatggtgacatttcgatttcttcagtgacattatattcatcatcaatacctctaataaaaatagcaagttgtgccgtatctgtagtgtcagtgccttcatccatcaccaaagcataaaattttaaattagcagttttactctccaaacgtctttcaatagatttcccaatttctccaattctcctggctatagtctggtgagacaaactgattttagaaatatcagtttctcaaggcaaataatatctaccacatcttccagacattgcttaataaactcaccatcagtaaatggttttgatttttttgctattaaatttgctaccacataactaggttttaccttacgattgagtccgagttgtaactttttaaaaaatcttttttgttgaaaagacagactttttttcagttctgctattttgtccttacaacacatacacaccaaatttgtcagcacgtttttgcatataatgcctcttcaaattgtagtctttgaaaactggcacaaattccgtggaaattaagcagagtgcttcgctatttgcctcaacaagaaaaagtcatttgtccacttttcattgaacaatcttccttcatccataatttttgttttttagggttttctttttaagacattgtggaagccattctggaattaaaagcattataatagataagcaactatatttacttttattatggaaattaacagataggaaaatagaacagaaagcaaggtttaataatcaaataagaatacttacatgtcttctaaataatattaaacacctatcatctacaaaggtaggttgaaatattattgataattgctgggttttacttgccaaattgccacaaacacacctaatacctgacagtgtcaattcaactgtccgtgattagaagataacacactggaagtcgcacaccaccataaaactgaagccacacatgcgtacaaatggcgacagtgtctggtgtacagcagcgctctgccttgtccagaatacacacttgaattctttgtcacaattcacttcacgtggcactgcaatagcgtcctctcgctctttgttagttaattttaatggcttttaatttcttcttgctgaactgtttgcaattataatgcaaattatggatactagtccattatttgtggatgtgacatactctgattacccctttccattccattgttgtctacgaagttcacacttgagaatcacatagtcaaattacaaaattacaaaaaaaattgcaaaaaaactcaaaatgttttaagaaagtttccacatttgtattgggatacattcaaagccatcctggactgcatgaggcctgcaggccacaagttggacaagcttgaattaaaccaatagaacaatttgggtataatctatatctttactatgttcagcctttcatcccgtgaatatagtatgcctctccatttctttagcttttattactttcctcaacattttatagttttcagcatagaggtcctgtacatcttttgttagatttacaccagaaatatttcatttttgttggagtaactgtaaatgatactgtttttcttgtattttcagatattgattattgttacatagaaatgtgaataattttgtttgttgatcttgtatcctatagccttgcagaacttacctattcgttctagaaatttttttgtatattccttgacattttatacattgacaattatgtcacctgaaaatagagacaattctattatttcctttccaatctgtatgccttttatttctttttcttgtctagtgtattaagacatcaggtatgctctttagtaagaatgttgagagtgggcattttttagttcttcttgatcttggaaaaaccattcagtccttcatcattaaatgtgatttaactgaatgatttttttacagattgtctttatcaaatgaaggaactgtctctctcttcctagtttattgagattttatcatgacagctggaagtacacattttaaaacaaaacatagttgtggaagataagagaaagttccaagcatgctggcttgatagtccagccccaagttgggaaaagtaattatccctttctttttccttctatttatggaataaaaaattaagagaaaagaattttcaaggaaattgcattattccttcaaaacaggtttctagtctttaagtattacctacttttcaaaaaaaaatcaccacatcatggcatccctttttcaagttgcccatgctgtaggtgtattaaagacagagctggtctgaggcaacatacagtctgcccatctgtcaccaatccttttctactctgcacactcctggggaagggctaggtcttgttcctgtctattccactggaagaacagttccctaccacgtggagcatttgcaattaaaaggagactgagatatagaggcaggagaccacaccagatggctgggtctccccactcccacccccgccccacatacactcagaagaggctaggcatctaggatctccattgagcatcttgaatatggcttgccataatatcatatacagtcaataaatatttgttaaataaggatgcctcttcaatatattttgtgcaaccatgaagatcaccacaactaatgtgagaaaaaatgtttctgttgaactctagtctttaggcccagtgggatttatgaaaagtgccatctctttagctgaggatgaagaatggaagagaatacggtcattgctgtctccaaccttcaccagcggaaaactcaaggaggtatgaaaataagatgagtcttaattagaaatgtaaagaatgaatctggggacaggtagaaagtaagatcacagtccgtttccaaggggtagtccactgagttcgagcttcctaaaaatggtcttttatctttatgtacagaaaagacatcacaaaattcattacaaaatgtcacttactgctccatgctggagaaagccatatccttctgggacttgagtctgcacatttaactacaggtactgatctgttttgtgcttagatgttccccatcattgcccagtatggagatgtattggtgagaaacttgaggcgggaagcagagaaaggcaagcctgtcaccttgaaagagtaagtaggagcacagccatggggttctgagctgtcatgagcccttccagctgcctgccatggagtcgacagtcgcactgttgggttactccagtgaccagacaaaagcagggcagcgctgcaactccaaagagccacctaagagggagtggctcccatgaggcggcaagtcagcaagggaaaagggccttctctcctgtgcacaggagccaggatttacttatctgttaacttgtcaccataaatattctgggagattaaatacatactttagaaattaaaaaaacatgattgtatcaaagttttgagtgtagtggatatggaactgtgggtaagcaagcatttggtacttgttgccttgcattgggtaagatgggaaagttacaatggggaacttggaacaatttcaatcccttcatggtttttctgagaatatcagcaaactatgaactattaaaccttcccactacttccttttcctccaatctcaaaaaagaaagggtgctagaaatgctatgtgtagagcaagcctattatttgctgtctacaatggtatgtgcttcaattatgcaggaacgacaggtgtaatctgagcctgtcctgttcagacttgggacatgtggtcactcagttttgggttctccaaatcaatgttggagagatctattttttttaaccagaacattcttgattgtcacatcttacaaaaatgactctgctctcagcgcaacttcaggtcagaggagctggggatagtggggttttccagagcattagcagggagtgtagagaataaaggatgatatttctaggaactcagaacagggtgttactgttttgtaaagtgttgaagaggaattggctctgggcatagagtctgtagtcagacaacgccacctttcttgaatccactaggaagagttaattattctactcttgttctgctgaagcacagagcttacatatcttatatcatccacactcaacacatgctactgtagttgtctgataatgggtctctgtcttcctatgactgggctccttgacctcagaggtgagtctaactcagcttggtgtctccatcacccccagcatagggccagctccatcactggcaccagataaccaccttctgagggagtagatggaagatgattcagcagatagttctgaaagtctgtggctctttatgtgtcttgactggatatgtgggtttcttgctgcatgtatagtggaaggacggtaagaggtgctgattttaattttccatatctttctccactcagcatctttggggcctacagcatggatgtgattactggcacatcatttggagtgaacatcgactctctcaacaatccacaagacccctttgtggagagcactaagaagttcctaaaatttggtttcttagatccattatttctctcaataagtatgtgggctattatttctttctctctttttaaaaataactgctttcttgacatataattcacatatcgtataattcatccacttaaaaggtacaattccattgtttttaagataatcaaaaatatgtatgaccattactattgtaaactaaaatgtttttgtcaatctagagccctcacacactttagctgtcaacaccccaccacaaaccccactgccctaagcatccaataatcaactttctgcctctatagatttgcctattctggacacttcatagaaataatatcattgatttttctctgttgttttttattctctatttcatgagtttattttagtctgttattttctttcttttgctggctttaggtttcatttgctcttcttcttttagtgttttgtggtgtaaataattataatcaatttgagatattttcttcttttaaatttagatattacagctataaatttccctctgagcactggtttggctacatcctgtgttttggtacatcatgccttctttttgttcatctcaaaacaatttcttgttgcccttttgatttctgctttgactcactggtcacttaaaactgtattgtttaacttccacaaatgtatgagtttcccaaatttctttcccttattgatttctagttttattccatggaagttgatgtacatatgctgtgttaattctatcttgactatcatttcctgaacagcatgattaagttaagcagcagattatggtctacattaatccaaaaactctagtccaatagataaaggctaagaggtcagggaatttaattctattactttggtcactccaaagactcagaaggtgccattgatctcactgctgtagtggtgtttcctatgtatagacctgcccttgctcagtcgccggcctgaaagaagggcaaacatgataaaaggaatgggttccagttgagaatcatgatgttcttattcttattactggtagagaaaattataattgctccaggtaaagtttgcattttcaatgatttccttttgtttgttttgtttttcccacagtactctttccattccttaccccagtttttgaagcattaaatgtctctctgtttccaaaagataccataaattttttaagtaaatctgtaaacagaatgaagaaaagtcgcctcaacgacaaacaaaaggtaaaatctgatggtggttaaatgacgatgtttaggttttgataaatttagattttatacacatgatagagcatgtatctgtatttttaaaaataaagacagagaacttatgtttagaacaagagaagccatttggtagaaataaagaaggagattggggaaggagatgagaatgagtcagagagatagcatttaaaacttgaaatcaggcacaacaattagtatgtcatgatataaacagtattgagataaaattttaccacttctcttccctttaataaattgtcaaaggataaagtttcctgtttgaaaatatattttactggtattgtgctttcctcatatcacagattggtaaagaatcattttaagtccaagactcttattttacatattctgcaattaaaggtcctatgaggctacctgccgactgctgacatgtagtgtgtggtaaatgtgagtgtttcacagcctggagtgaacaggggtcttctctgagaattgaggttgcaaggctggctaactcagctttgccttcacgagccctagaggccagccgaaggatgtctgcaggtcagggagacaggaccaggtaacccagctgtcactgaagattatatagagtttgagaatgttggaatatttgaaaatgctcccccaaaaaagctgctgatgagttctggaaatgtcaggagattaatctatacggacactgctgaagaaaaaggtagaagaataaaagatccagtacttcttcctgggtaagcagttatgaccagagatggaaccggcaactctttggccagaaagctgtatccaaaagacagagaagatgagaaacagggagggcaaaggcgaaaaagcaattggacatgatagctagatttgtttcaggaaaacatcctgctttccaaggatttagatgaatgtttttgttcactggtgactcaggtaacacgtcttcaagaagccatagggaggttgagggagggaagtcaagaagggaggttgaggactgcacttttgatttacttctgacttcacgagtcactttctgccaaagaaatctctccttttgcttctagcaccgactagatttccttcagctgatgattgactcccagaattcgaaagaaactgagtcccacaaaggtaaccaaggagtgcttctgagggctactggcggggacactaagagggagggccttgttctgaaaatgtgcaggaagtattccaggaagatgagaatttttgccacatagcagaacaacacacatttagatgttataaatggtagctggaggcactttccagaagcccacaggtatagccatgttccaggctgaaagggcaaccctaagcaaacctagaatgcttggaggacagtcagtggtttgtggatcacctacatgagatcaaatgccagttctcagcctcctccagatccaccaagtgagaacctctacttggaaatttatatcaaacataccgatcaggaagcacactatcccagtaagggtgattttaactggcagtacttgaaagtgtgttcgcaaggttaatctactgcaaagttttatttttccctttgaaatgcataagtaactaatgggggacacctctgataccatgtaaatctacttcaatcttcagtcttgtatctactagttttatgacccatggatggttttaaccaaaaccattattactaagacagtggcaaaatgataaccatggtcaatttcaagctaccaagatttggcaaccatctcacaaaatttttgaatatttaacaattggttctagagagcaggactcagcagactccagtataccactttaaacatgtccatgtctacatctacttctgtctgtctatctatctgtcaatcatctatctgcctataatttatcaattaatcatctatctatctcaacaaaacttgctgtgataaagaaaatagtctatcatttcactgtttcatatagaaatcactagacacatatggctattgagtactggacatgtggccaatgccactgaagaacaatttttaagagtatttatttttaattgaataaaatttgaatttaaatagccacatgtggatagtggctaccagattggacagcagagctcccaactttaaaattacagttcaatttcaactcagtataatggggttcaatgtaactgagtaaaataattggatggttgaatttacccacagcagcatacagaaatattcactgataaatcagaactctgtagacctttctcacactcattttatattgtgtttggttgtgagttacatgattgctgcaggcaccatatttatttctgtgctccaggtctctaaaggtcctaatccagtcctgaccaaacagactagtgatggaccatcgtgagcttctctcaggagaaatatcaagagggaggccaacctgtaatcataagaacttctgctattttaatgccattcatcagactacagtcaatcaccatgcttctggctttttgtctatctctgctgtcttgtacatcctgagatagtccattctgagaactgtaccctagatcttgtattgcctgatgcctgtcaaagatgtaatccatgctgcttaagtgaggttgtgcacacaaatcaccatatctcctgcaagtttggattttgattcagtagttcgatggtggggtttgagattctgcatttctaataagctcccagatgtggctggtgctgctggtccatgaaacacactttgagtagcaagaggtgatctgtagctcagtattggtcctttaagttccctcaaacatatatagagaaaaggtcctaaatattgcaaattctctcaaagtttgtcaagctatattggaattctctcaaagtctgtcaagctctattgtagaaaatcaaatttttattgggaaaaagcctaccccatatttacttacagataaagtacttttaggatcattcaaggcacacacccataacactgagtatgtaagacagaaatgctctctctggaaattacagcagtgctggtgctgggatgccatgatgaggagtgtgtggcccacaatcatgtagaccttgggaaaacctggattaaaatgattttgcgtcatcctggccctgtataagatacatatcagaatgaaaaccactcccagtgtgactttgaattgcttttccattttttcttcttgggattagagagcttcacttagatttcatctaagctgtgatgttgtacgttgacctgatttacctaaaatgtctttcctctcctttcagctctgtctgatctggagctcgcagcccagtcaataatcttcatttttgctggctatgaaaccaccagcagtgttctttccttcactttatatgaactggccactcaccctgatgtccagcagaaactgcaaaaggagattgatgcagttttgcccaataaggtgaggggatgacccctggagatgaagggaagaggtgaagccttagcaaaaatgcctcctcaccactccccaggagaatttttataaaaagcataatcactgattccttcactgacataatgtaggaagcctctgaggagaaaaacaaagggagaaacatagagaacggttgctactggcagaagcataagatctttgtacaatattgctggccctggttcacctgtttactgttatcacaataatgctaagtaaaaaaaaaaaaaaaaaaaaaaaaaaaaaaaggagtgtggcgagaagatggccaaacaggaacagctccagtctacagctcccagcgtgagcaacacagaagacgaatgatttctgcatttccaactgaggtaccgggtgcatctcaatggggattgttggagagtgggtgcaggacagtgggtgcagtgcacccagcctgagccaaagcagggcgaggcatcacctcacctgggaagtgcaaggggtcagggaattccctttcctaggggtgacggacagcacctggaaaatcaggtcactcccaccctaatactgcgcttttctgatggtcttagcaaacggcacaccaggagattatatcccgcgcatggctcggagggtcctacgcccatggagcctcgctcattgctagcacagcagtctgagatcgaactgcaaggcagcagcaaggctgggggaggggcgcccgccattgctaaggcttgagtaggtaaacaaagctgccaggaagctcaaactgggtgaagcccaccgcagctcaaggaggtctgcctgcctctgtagactccacctctaggggcagagcatagccaaccaaaaggcagcagaaacctctgcagacttaaatgtccctgtctgacagctttgaagagagtagtggttctcccagcacacagctggagatctgagaacagacagactgcctcctcaagtgggtccctgacccccgagcagcctaactgggaggcaccccccagtaggggcagactgacacctcacacggccgggtactcctctgagacaaaacttccagaggaatgatcaggcagcagcatttgcgggtcaccaataccgctgttctgcagcctccactcctgatacccaggcaaacagggtctggagtggacctccggcaaactccaacagacctgcagctgaggatcctgactgtcagaaggaaaactaacaaacagaaaggacatccacaccaaaacccatctgtacatcaccatcatcaaagatcaaaggtagataaaaacacaaagatgggggaaaaacagcagaaaaactgaaaaatctaaaaatcagagcacctctcctcctccaaaggaacgcagctccgcaccagcaacggaaagctggatggagaatgactttgacgagttgagagaagaaggcttcagacgatcaaactactccgagctaaaggaggaagttcgaacccatggcaaagaagttaaaaaccttgaaaaaagattagacaaatggctaactagaataatcaatgcagagaagtccttaaaggacctgatggagctgaagaccatggcacgagaactacgtgatgaatgcacaagcctcagtagccaattcaatcaactggaagaaagggtatcagtgatggaagatcaaatgaatgaaatgaagaaagaagagaagtttagaagaaaaagaataaaaagaaaggaacaaagcctccaagaaatatgggactatgtgaaaagaccaaatctacgtctgattggtgtacctgaaagtgacggggagaatagaacgaagttggaaaacactctgcaggatattatccaggagaacttccccaatctagcaaggcaggccaacattcaaattcaggaaatacagagaacgccacaaagatactcctcgagaagagcaactccaagacacataattgtcagattcaccaaagttgaaatgaaggaaaaaatgttaagggcagccagagagaaaggtcgggttacccacaaacacaaacccatcagactaacagtggatctctcggcagaaactctacaagccagtagagagtgggggccaatattcaacattcttaaagaaaagaattttcaacccagaatttcatttccagccaaactaagcttcataagtgaaggagaaataaaatactttacagacaagcaaatgctgagagattttgtcaccaccaggcctgccctaaaagagctcttgaaggaagcactaaacatggaaaggaacaactggtaccagccactgcaaaaacatgccaaattgtaaagaccatcgaggctaaggagaaactgcatcaactaacgagcaaaataatcagctaacatcataatgacaggatcaaattcacatataaaaatattaaccttaaatgtaaacgggctaaatgctccaattaaaagacacagactggcaaactggatagagtcaagacccatcggtgtgctgtattcaggaaacccatctcacgtgcaaagtaacacataggctcaaaataaagggatggaggaagatctaccaagcaaatggacaacaaaaaaaggcaggggttgcaatcctactctctgataaaacaggctttaaaccaacaaagatcaaaagagacaaagaaggccattacataatggtaaagggatcaattcaacaagaagagctaactatcctaaatatatatgcacccaatacaggagcacccagattcatgaagcaagtctttagagacttacaaagagagttagactcccacacaataataatggaagactttaacaccacactgtcaacactagacagatcaacaggacagaaagttaagaaggatatccaggaattgaactcagctctgcacaaagtggacataatagacatctacagaactctccaccccaaatcaacagaatatacattcttttcagcaccacaccacacctattccaaaattaaccacatagttggaagtaaagcactcctcagcaaatgtaaaagaacagacattataacaaactgtctctcagaccacagtgcaatcaaactagaactcaggattcagaaactcactcaaaaccgctcaactacatggaaactgaacaacctgctcctgaatgactactgggtacataacgaaatgaaggcagaaataaagatgttctttgaaaccaacaagaacaaagacacaacataccagaatctctgggccacattcaaagcaatgtgtagagggaaatttatagcactaaatgcctacaagagaaagcaggaaagatctaacattgacaccctaacatcacaatgaaaagaactagagaagcaggagcaaacacattcaaaagatagcagaaggcaagaaataactaagatcagagcagaactgaaggaaacagagacacaaaaaaacccttcaaaaaaatcaatgaatccaggagctggttttttgaaaagatcaacaaaattgatagaatgctagcaagactaataaagaagaaaagagagaagaatcaaatagatgcaataaaaatgataaaggggatatcaccacccatcccacagaaatacaaactaccatcagagaatactataaacacctctatgcaaataaactagaaaatctagaagaaatggataaattcctcgacacatacactctcccaagactaaaccaggaagaagttgaaactctgaatagaccaataacaggttctgaaattgaggcaataattaatagcttaccaaccaaaaaaagtccaggaccagatggattcaccgccgaattctaccagaggtacaaggaggacctggtaccattctttctgaaactattccaatcaatagaaaaagagggaatcctccctaactcattttatgaggccagcatcatcctgataccaaagcctggcagagacacaaccaaaaaagagaattttagaccaatatccctgatgaacagtgatacaaaaatcctcaataaaatactggcaaaccgaatccagcagcacatcaaaaagcttatccaccatgatcaagtgggcttcatccctgggatgcaaggctggttcaacatacgcaaatcaataaacataatccagcatataaacagaaccaacgacaaaacccacatgattatctcaatagatgcagaaaaggcctttaacaaaattcaacagcccttcatgctaaaaactctgaataaattaggtattgatggaacctatctcaaaataataagagcaaatttatgacaaacccacagccaatatcatactgaatggacaaaaactggaatcattccctttgaaaactggcacaagacagggatgccctctctcaccactcctattcaacatagtgttggaagttctggccagggcaatcaggcaagagaaagaaataaagggtattcaattaggaaaagaggaagtcaaattgtccctgtttgcagatgacatgattgtatatctagaaaaccccatcgtctcagcccaaaatctccttaagctgataaacaacttcagcaaagtatcaggatacaaaatcaatgtgcaaaaatcacaaatattcttatacaccaataacagacaaacagagagccaaatcatgagtgaactcccattcacaattgcttcaaagacaataaaatacctaggaattcaacttacaagggatgtgaaggacctcttcaaggagaattacaaaccactgctcaatgaaataaaagaagatacaaacaaatggaacaacattccatgctcatgggtaggaagaatcaatatcatgaaaatggccatactgcccaaggtaatttatagattcagtgccatcgccatcaagctaccaatgactttcttcacagaactggaaaaaactactttaaagttcatatggaaccaaaaaagagcccgcattgccaagtcaatcctaagccaaaagaacaaagccggaggcatcatgctacctgacttcaaactatactacaaggctacagtaaccaaaacagcatggtactggtaccaaaacagagatattgatcaatggagcagaacagagccctgagaaagaatgccacatatctacaaccatctgatctttgacaaacctgacaaaaacaagcagtggggaaaggattccctatttaataaatggtgctgggaaaactggctagccatatatagaaagctgaaactggatcccttccttacaccttatacaaaaattaattcaagatggattaaagacttacatgttagacctaaaaccataaaaaccctagaagaaaacctaggcaatatcattcaatacagaggcatgggcaaggacttcatgtctaaaacaccaaaagcaatggcaacaaaagccaaaattgacaaatgggatctaatgaaactaaagagcttctgcacagcaaaagaaactaccatcagagtgaacaggcaaccgacagaatgggagaaaatttttgcaacctactcatctgacaaagggctaatatccagaatctacaatgatctcaaacaaatttacaagaaaaaaacacaaccccatcaacaagtgggggaaggatatgaacagacacttctcaaaagacatttatgcagccaatagacacatgaaaaaatgttcatcatcactggccatcaaagaaatgcaaatcaaaaccacaatgagataccatctcacgccagttagaatggcgatcattaaaaagtcaggaaacaacaggtgctggagaggatgtggagaaaacaggaacacttttacactgttggtgggactgtaaactagttcaaccattgtggaagtcagtgtggtgattcctcagggatctagaactagaaataccatttgacccagccatcccattactgggtatatacccaaaggattataaatcatcctgctataaacacacatgcacacttatgtttattgcagcactattcacaatagcaaagacttggaaccaacccaaatgtccaataatgatagactggattaagaaaatgtggcacatatacaccatggaatgctatgcagccataaaaaatgatgagttcatgtcctttgtagagacatggatgaagctggaaaccatcattctcagcaaactatggcaaggacaaaaaaccaaacactgtatgttctcactcgtaggtgggaattgaacaatgagaacacatggacacaggaaggggaatatcacacactggggcctgttttggggtgggaggagtggggagggatagcattaggagatataccgaatgttaaatgacgagttaatgggtgcagcacaccaacatggcataggtatacatatgtaacaaacctgcacgttgtgtacatgtaccctaaaacttaaagtataaaaaaaaaaattcaaaaacctcagtggcatctaatgagaagcatttattgctcacaagactggatagtgagttctgctgatactgactggactcactctggtctggctatggtctgaggtagcctggccctgggggcgcgatggaggctgactcagctctccccacacctgtctcatgttccagtcaggtagccactggccaagaagccaagctaggaaccagggtatctgactcctgagctaaactctaaccctctacaatactgcctcccaaatataacaccaagtgctaggtacatatcatccacagttttcagacttctgcccaaactgggattctttttagtgtgaagagacctggcctgtggggctgaccctggtgtggctgtgaggcagacacaaagggacatttacatccagtcctgaagattacagtccagccctgaagcaacaactaggaaactattccaaaaggaggggatggggctgagtgtggggttctattctcttcataactttaactagaactcaaattgtgtaccttggtagcatccaatcataaatttattttgtcgtatttgtgatagaaaggaacaagtttatccacaaatttatttatttatttatttatttatttatttatttgagacagggtctgactctacgacccaagctggagggcagtggtgcaatctcagctcactgcaaactctgcctcccaggctcaagccatcctcccgcctctgtctcctgagtagctggaactacaggcacacgccaccacacccagctagtttttgtattttttgtagagatgggttttcaccatgtttcccaagctggtctcaaactcctcaaaagagttaccaagcaggactctgcaaccaataatccttgtgtgaagaggatatttgctcttttccctgtttttctttcttggtacagatgtgtgacctctttttgaaaggtgatagtgactttggtgtattttatttggtggtaatggtcatagccccattaatcacatttcttcccatgagaaagaaaaaccactacatggtcatgctaaggatttcagtccctggggtgaggatggtcttgaatatctcctacattcataactcctccacacatctcagtaggtcactgagcacatcaatggacatgccagttattaaaatacttcacgaatactatgatcatttaccagtatgagttattctctggagcttctaatacttcaatagtactgcatggactcagttgagagttaattcaaaatctcagattatccaattctgtttctttccttccaggcaccacctacctatgatgccgtggtacagatggagtaccttgacatggtggtgaatgaaacactcagattattcccagttgctattagacttgagaggacttgcaagaaagatgttgaaatcaatggggtattcattcccaaagggtcaatggtggtgattccaacttatgctcttcaccatgacccaaagtactggacagagcctgaggagttccgccctgaaaggtacaagtctccagggaaatggagctcaccctgacccaggctggttcaagcatattctgcctctcttaatctacatgacaatcgtgtggttgtacaatcatttgcttgtaagtctttttatcacaaaaaagtgataattatcaaactttacaaaccacagactagaaaaaacgaaactacatccatccacagtcccagcacaagacaaagataatcaattatgtccctgtgggcatttttctacgcctatatagatttttaaaaattagaatggtatcactttttatttggtttgaattgctgcttacttgatttaacaggaaactatccactgacctatattactataaatatacatatatatgtatatatataaatatatatatatgtatatattgcatatgccataaaccatttaaccatgatgttatttcaggtgtataggctttttattcctttctgttttttctatgctgtgccctttagctctctgaatttaacagaaactttaaaacatgcttccacattccatttgctttcaacgttacttgctatttcctctgtagtaattataagagtgcaggctgaggtcctgagaagtcctcatccctaatggtttaagccacttcactgaagacacaagacagcacaggtcctcctggtcctatctgtggctgcagtcctgtgccagctcccttatactctcagtagacatctcacacactcctccttggaggtgtcttgagcatgctcttctgggaattcagggacaaggtcaggccttaggcacagttcgcactctggatatagttggtgttttcccattactgtattattaagcaaaatttagaatgaaatttttagggtactggctggtgattcaggatgcttgggatctagactttcattagcccctacctgcaagtttgctgatgggaggaaccttgtcttgttggtcatggtgtccctagtgctagcatggagtctgcacataatacttgttcacagagtaagtcagagctgaccaagttctctgttttctggagtagaggacttctatgtttcctgcaagctcagcacttccacctcctgtggctgcactaatacgaaatcagagaccactcgctgtacttcactttgaatcactcagtcaccaaaaagatagtgcttgccatgtgtcaggaacttggctaggcagggagaaattcatatgatttatataaatccataaatccatatgatttacataaatccataaattcatgtgatatatacgtatatgtgtgtgtatatatatattagagaatgtttgacatatacacaagtacatgttaccgacaccagcctatagaatagttttcgtgcatctccatatatctatcactggttccaacagccatcaatccatgttagctgccccatccaaatgccaccatcaccctcctcctgactatcatgttattttgaagcaatagcctgtaaatatttcagaatgctctccaaaatataaagactcctgtaaaaacatatgacaacaatgccattattactttctttgaatcaacattttttccttaatataatcaaatatttagaaatcaaatttgaataaaacatgggtcaatcttcaaagaatttatagcttaatggaacagatcaaggaaagcagggatgacactacagtagggtagcatcatatgcccatgtaacttatgtgacttaaactatcctgtaagggtgtgggggagaaagagaggaagagatggagagaagaaaaaggaagagaaggaggaggagaaggaggcagaggagaaggtggacggggaaggtagagaggaggaggaggggaattagaaaaaaagagatgacaggagaaggaaagggaaaaataacaacttgaaatagcacaagacgttttctccttctcctttctcaatgagcatgtgaccaacacaagtgtgagttgaggcaggaatccacttttccatccatcagtcttatcatttatgtgccttttatagtgtgaacacatcaccaccctgaatataattttagtgtttagagataaatattatttgcaacaatattcatctcatctcaagaaacgctcctatagggtatggagaatttaaaggacctgtaggttatgatgattataacgaaataaccaaagcaggatttcaatgaccagcccacaaaagtatcctgtgtactactggttgggaggtggaggggggttgttcttaagtaagaacccctaacatgtaactctgtggtttttatgtttcattaactatttaatctaccaatatggaactaggttcagtaagaagaaggacagcatagatccttacatatacacaccctttggaactggacccagaaactgcattggcatgaggtttgctctcatgaacatgaaacttgctctaatcagagtccttcagaacttctccttcaaaccttgtaaagaaacacaggtcagtacactttctgtatgttttattaagaatttttttaactgaagggtatatattttttaaaagaatatgcatgtttatcttttaataattcattctatgggccaaagaacctacttggatccatctttgatcattaaggatgcttcagttctggacttcaaaacctgtagcattaagaacatcatgtaaagtccacacagattagcatgacatgattatgtgtagtctctttgaacctgagtaagtttaaattcagtttcaagtcaattggaaagaagtgttttgcacaatcatgaagtgcaatgattacctggctgtgacttaaatggtgttctccatcaccagaacctgcagaagctctctcatgacagtggttctcaaccactagctgtatattggaatcaccagggagcttcaaaaattcatgatgcctgtgacatctcagaaattctaaactaattaacccagagcgtgactaggttctgtcatgctgtcgggtgaacccctgattagttctcacgtgaagccaaggtggagaatgactaatttcaggcatttctggtggatatgaaggactaccatagagcagggctatccttactccttgaccttatgttccaggtgatacatttaaagaaagatttagaatcttttctctgaagaagttaaagaacagatgtcattgattcatattaagcaatagcctataagtcttatttccaggaccggtgtatttaatatgcaactctaccccttaagtacactttgtgcttgggagaggaggaggatggagatggttgccatcttatctatggcttcagggcagctgtgtagctttcctatgtgtgtattcaggcagggggctcagccctgagagaaagtgggcctctggcacacctgggacagggaagatattccctggcaagctctcaggcatctcaggctggcacttctttgtatccatggcaatttgctttcccctcactgaactgagatcagaatgttactctgttggtggctcccccaacagtgaaggggtgactcagtgacaatagtgctagaagtatgagtcaaaacactgtacaacttgagaaattccccgtttgcactacgcttggaagccaagaggagatgttaaaaagaaaagaataattctttctgaagacatttcccatcattgcacttgatgggttcaactgggaagggttactagactctggaagttgaaaactgcccacataattaaactgtacaacagctactcaggattaccttgcaagttttaacctataaaaatttaactttatatagcacttccaaaatagtttgccataatacctactaatctggatttaatttttaaaactcatccttttaacttaagatttaaataaaaaaaaaaaaacacgagtccacaagaatttgtctcaggcctggcacagagtcagtgctccataaatattttgttaaacgatggatggtgagtgcttttactatccagtatttacccagcttatagattaagtatgaagagttcaagatacatggtgttaagagtcgtttttatatgcttgcaaagcatttttgtcatattttttctactttgcttccatcttttcttctttcacttcatttattaattctccatatgcttgtttaactattgtagatccccttgaaattagacacgcaaggacttcttcaaccagaaaaacccattgttctaaaggtggattcaagagatggaaccctaagtggagaatgagttattctaaggatttctactttggtcttcaagaaagctgtgccccagaacaccagagatttcaacttagtcaataaaaccttgaaataaagatgggcttaatctaa

SEQ ID NO: 15532 - DNA, 31799 bp, Homo sapiens
gctgtgcagggcagggaagctccaggcaaacagcccagcaaacagcagcactcagctaaaaggaagactcacagaacacagttgaagaaggaaagtggcgatggacctcatcccaaatttggcggtggaaacctggcttctcctggctgtcagcctggtgctcctctatctgtgagtaactgtccaaactcctctctttgtttccttggacttggggtgctaatcgggccccttttcccttatctgttttgaagatcaaaagagatgttcaaggagaagtagctgaagtgttggacgctacaaacgcatagaagttattattatcttatgcagatctatgaatgaataaataagcatttctcccatccaccttctaattttggtgactaggagggtttagggacagcatttggtagtgggaatgatttgattagcttagatctgacgaagactaatcaatgaaaacatggcagcggcagattacaaactgctgatcatgatggacagtgtgatcctcatccccttcccaggctctggggattctgggtacaggaaggagtggcttgcatttttgtctcattaattcgctttctgggttctgtgtctgctggaagggatgtgtagctgtattgcccctgtagacctggttcctgctcccccgccttccaacccaggatatcatttacataacgcaccaggggacaccaagacttcatgggaagctgtcccctggctcttccctctttcctgtgccatgcccctgaaaatcccctccctcctatgagtcactcctccaccctgtcatacacaggatggtttatcttgcaatgattaacctctagagcaaaggagacctggaggaagtttcgaggatttattctttgctttaatctttttcctcccgtctctgggaggctaggattaatatagagctttgtttctcacctaatgggaatctactagcagcctgaaaaggcaggagccatgaaagccaatttggattttacatatttttcccctttatgttacagtacaggagggcaaaccctctcactggtgggattcctggcatcctagagcaggtggagagaagagttactttccactgtgggtagtggaggctccacctgtcccattaacttctacctcaatttgacttttattaagagcagggaaccacaatgacatgaaaatagacactataaacctcattttaattctttcacagaaagcttaggaattcagtgagttgtggcaacatggtttccattgtctaacatttttaaatgaattgatatggtttaaattcattcatttttaaaccagaattttttggagatagactatttccagcatgttccttctggatggtaaaacagggctgttagttcagtatttgtgacaataagtgtgtgtaaaataatgtcacctttcctgaatgtcaggaatatgagtctaatgcacaaatgtatacctctaagacaagactgcacgtcttttcaaatatacctgtccggccatttattttaataactccttttcgaatatacctgcttagcagattgtcttaaactctcaggacaggggagtaagcaagactgtgagccagtgacgatagcaaaggcttccaggtaggatccatatgaagtgagaaaatattcctcagctctcagggtagaactccaaagagatattcatgggtcctggccccaccgtggaggtcactcaaagggcaaacaggttggcatctcatctgcttcaagcctggacacaggggcaccatctgtgtcactctgtgtgtggtctgccatgttgtgggccggtcactacagactcgggcagccaggcagacaatgccttagccttagacaatgctggtgcagcccaggagtcagaaaatgcagtgtagaccaggccctccttaggccaacacaattacatgcaatagatgactggcttttctgttagtctcttcactggacccaaaggctgcattactctaccagaggggagctggaaagaaactaaagagttcgcccagcacagcatctgccttgacatggtaccatgtgaatctagacactcaccaagatctttccttgggggccaatgctgctgacacattaactcaatagcttgtcctcacctgagaggtcaggtaatgtgtttaaagttcaggagcagagattagtgtcattgatttgacatggctgtgacaacaaaggagggaactgaagtgggaatacccaaggccaccctggctttggcaggtggtgcacgcacttccactaactgttctggggcagggaaccaaatgtatgactgggcctgctcatgctgcccctgctgagtcctccaaaccctgcccttcatgtaatttctcagttttattttatcacattttataagtcactggatgtttacaaaatgtttggaacctatactgccttgaaggctaacctctaaagaggagtaaacaaggtcttaatacaactctccgggacgttttatcattacttatcttatatgccatactgcaccatttgctatcaacaggaaagtacctggactttggaaggtccctctgtgtcttttagctgaaagtacatatgaggcatgtggattcttttatgcacatcatctttttcagccacatttttgtagtttgcctctctggagccaactgtgtggggctagcagcttcacagctgaatcagtgtctggcaacctcttccttcagcctctcttcttcctccagttttccatccctcagtcacaccggagggggaaggtctgcaaggatccagaaccatcagttggaggagtttgcacatgactcatgaaagatgagttccaggcaggcctgccatagtgaacaccaggcttaatgggtttttcctcagagatacttcacgtacagaggcagtgaactgactgctttctggttgaccaccttgaaaaagatgagtgtgcctggcactgtgcttctcaggtgagtatgacctgagaagtattagttgctggttcttctgcacacaatcattcaaggacatatggatcaaccatcctcctcaacagctcaaatcaaccagatcatctgaccacagagactgaggtgtacctgaaagctgcccacatttctataaggccaatagaagccatgaacacagttgtcaatctgtagaaataaggactccatgactcctccaaggcctctctgtgaatgaacgtttaagaagggctagatcctaaaacagggtcagagcttagagggaagaaaaagcataaacatttctgagcaaattgtaagggcagtgtcaccataggctcccagtgaccctctgtgattgagtgcatacagtgatgcaaaatctcatcatcagtgcaaaagacaaaaaaaatcttactctttctacctaggatgagagtccccaaatcagcgaagagtccacttactaaacagacataaggaaatgaagtgtcctggaagaattcctgcctgaacctctcaggagcatttgaggacatttatcaagtattcactccaggattgggactatgaagacttcagctgctttcagctaatcattgagacttttcaggggtctcagaatagtcaggaaaggacctgatgagtgaatgcaattactgatgttggagttgctgttattatttatcgtgtacatattacctccctctcttgaccattccagttcctgagtaactcaccagccctctgatctataaagtcacaatccctgtgacctgatttctgtttcactttgtagatatgggacccgtacacatggactttttaagagactgggaattccagggcccacacctctgcctttgttgggaaatgttttgtcctatcgtcaggtgagttgcttgagcttcctcttttgcttcttatggttgcaaacatcagcttagttccatcagtaaaaatgcccctccttgggagggagttctgaggtttcacattttcagaaatggtgggactgggtgcagtggatcatgcctgtaatctcagcctctgtgaggccaagactggcaaattgcttgagcccaggagtttgagaacagcctgggcaacacagtgagacacctgtctctagaaagaaaaaattacctgtgcatgatatggtagcccatgcctgtagtcccagctactctgaatgttaaggtgggaggattgtatgaacccaggaagtcaaggctgtattgagctgtgatcgcaccactgcactccagcttggtcaacagaacaagacagaaaggaagaaagaaagagagagagagaaagaaagagagaggaaggagaggggaggggaggggaggggaggggggaggagaggagaggagagaaaaggagaggagagaggagaggagaggaaaaggtgtgtaggctccacccaaagcatggccaggtttacccctggagggaaagtcacaagctcatgtccagaaggccagtagcagcaagctgctctccagcccagatttcctatcctgtgtacctggagcttgtttctcagattctaactctcacaactgaagcctctgttgtctgattactatctgagaattctacacaattttaccctcgataaaagcagtaatttcttcttcatctttcccagatcaactcttgtagtagatcaacatttctgggaccttcttttgcatggttaaaacatcacagctgaatcttagcaacaggaaggtttgtttttatgtttcagaagtgaaagctcagagcacgcattgtaatttgctgggtgtgatgtgtagaggtggcatttctccatcttttctgtgttaagctagaaaactggaaaggaagtctactttctcattcactcactcactttctcactcaacaacatgccttagacttatctaaatctgcaagactaaaagaggttcctggtttctttaactttctaattctgctagagttctagagagagcacatgagataaatgaaaaggatactgatggaggagattaaaaaattgtgcattccctgcagacactcacttttcctcacctcagtttcacccctgcccttgcaggtgatcattcacggggttaggagactttagagagaataaaagaaaaagcaaaaatacatcagaaagacaaggaattacttactggtcatagacaagggtgagtccttcagtacttagagaaaattcaagagtgactttaaattccccacttcaaatatattctctgttttcttgtctttcccttaagacatctctgaatagcttccttcaactgccagtgaaagatagcaggcctgatttcattggacgcaactgttttcagccccaattagaggtagggtttattctatttaaaataataatcaacttgtattttgtttcctctcccagggtctctggaaatttgacacagagtgctataaaaagtatggaaaaatgtgggggtgagtattctgaaaacctccattggatagacctgctactgtgaggaggttaccccactgcaggatagtctctgcccaggtcttcatgggatgaagctcttgtcaacctaaatacaaacagagagaggttctctgaaagaagaggataattacttgggagtagaatattgcaatgggaatctgcttgccgttataaactatgtgcaaattcagggaggtaaacaagacaaagatgctccatagaaaatatgagaagaatctcataactgttttgagataattattgttagctacaaagatcaataacaagggtgatgccacaccaaggttggacaggcagttgctggacaggtgtccttgcagaaatatttttgtgtaaagttgaaatagcctttgtgcaaagttgtggtttttgtagacacttttgtaatagttttgtttccaggaacacaagcataagaatcctctcttcatagccttcttgggatttatttgtcagggttaaaaaacaattagtgacatcactttggttctgataaagttcacactcgctattgtaaaacttttcgaggcttgtcctaccaaggatcccatgtgtcaccaggtatcgaggtcttcagtctgaactaggctaggagcattgtggttaccacttttctgcaggttttggtggcccagggactcccagcatcgccttctgtccagtgtctgcctattcccctcttctttttttcttccttaggtgcccttttatcacatgcattgtctcagacccttctaatatgtgctcataaatgcatggcatcatctccttcccacattgattcactttcaattaaaagccaaaactccttcatttagactgaatttaacatgtgcttttgaaagaagggttgagagataatagagaaacagattgggaaaccacttatgctccacttttttaaactttctctgcaagtatggaattttttgttctgctttgttgtttaaatttaagccaaaacttcttaatagaaggatatacaaatatttattggtttataccattgcacttactttgaagaagagatgctgaatattattaaaccattgtgttccctggtgggctgatggactgtgattttataaggtggtctcagccaattgcagcagctgttccctgtcagaggggctagaggtttggtgagagcagtggatgaggtgcagtggtgtgtttgttcactagaagcaagtgggagaaagctttgcctctttgtacttcttcatcttctcccctcaagtcctcagaatccacagcgctgactgtggagtgctgtggagctggcatggcccatacaggcaacatgacttagtagacagatgacacagctctagatgtccatgggccccacaccaactgcccttgcagcatttagtccttgtgagcacttgatgatttacctgccttcaatttttcactgacctaatattctttttgataatgaagtattttaaacatataaaacattatggagagtggcataggagatacccacgtatgtaccacccagcttaacgaatgctctactgtcatttctaaccataatctctttaaagagctcttttgtctttcaatatctcttccctgtttggaccacattacccttcatcatatgaagccttgggtggctcctgtgtgagactcttgctgtgtgtcacaccctaatgaactagaacctaaggttgctgtgtgtcgtacaactaggggtatggattacataacataatgatcaaagtctggcttcctgggtgtggctccagctgcagaatcgggctagtgaagtttaatcagctccgttgtccccacacagaacgtatgaaggtcaactccctgtgctggccatcacagatcccgacgtgatcagaacagtgctagtgaaagaatgttattctgtcttcacaaatcgaagggtaagcatccattttttgaaatttaaataatgattgatccactgattaaatttttattttgaaaaaaacatatattcacagaaggttacctaaaaaatgtacaggaaggttccatgtactcttcatcctgtcccgcccagtggtaacatcttgcaatcttgtatattgcaatatatatctagtatattcatattatcaggttggcacaaaagttaaaatggcaaactacaggctgggcataatggctcatgcctgtaatcccagcactttgggaggccgaggcaggtggatcacgaggtcaggagttcgagatcagcctgaccaacatggtgaaaccccatctctactaaaaatacaaaaattagctgcgtgtggtggcatgcgcctgtagtcccagctactcagtagtctgagacaggagaatcgcttgaacctgggaggcggaggttgcagtgagccgagatcacgccattatactccagtctgggcaacccaatgagactccatctcaaacaacaacaacaacaacaacaacaaaaaccggcaaactgcaataacttttgcaccaacctaatactatagtacaggaaattgactttgatatagtttacagagcttttcagatttcaccagttttacatgcccttgtttgtgtgtgtttatgtgtgtgggtagttctaagcaatttttcacattcgtagatttgtgcaacgaccagcaccatcaagatgcagacccattccgtcaccatgtggctccctcctgctgtcctacagtcacaacatggagtttgtctttttctctgacaggttctatatcagagcaaacttttatttatttgaggaggccaatgtattaatatttccttttatggattgttcttttggtgttaagtctgaaaatcctttgcttagccctccttcctacattgctttttctaagagttatatagtttaacactttacaaaatgtaactctattacccattttgtgttaatatttgcataagttatgagatttagatcaaggttcattttctgtggactatggctgtccaaatgttccaacaccattttggaaaggtaggcatattgtcaaaactcagctgagtatattttgtgaatctatttcttattgtttactcctccactaataccacactgtggtgactctagtagctgtacagtaactcttaacatcatatagggcaattctttccactttattgatttatattttcagaatggctttagcttttcttgtcccttgcctttccataaaaattcagaataagcttgtaagtgtctacaaacaaacctgccataattttgataagaattaaagcagaggtgtccaatcttttggcttccctgggccacagtggaagaagaagtgtcgtgggccacacataaaatacacacacacacacacacacacacacacacacacacacacacacacaaatggtctgtgtatagttttcattatatatctaccaccacagataagcaaaaatgtccttgcataataatcctaattatgcactgccccattcagagggtctttcaaaatcattgaacaggttccaagtttgcaatcactgatacagaaaatgtacatatctagctaaacttcactacttttttgatattttttattataaaagaaaagagaacaacataaaactagtggggtacttgacattgtttttgagaaactaatccatcagtatctggcttgatggaagtagttgcaattctcagtgagttctcaaggtgctcatcagatattttggttctaattttactcttcgtgttcttcatccttgaaaatagtagctcacaaatgtaagtgctgccaaaaagcaatgacatgaacaaggtgtgattgtgaagcaagggatatttgtcattgggaagacaggtcttacaaaagtccagtaaagaggcaaaatcaaatttttctataagttgaacatcagattgcagctctaggcattccatttcaaaattgccaggtaacatatatatgtcgactgaaaatggagttgcaaatataccaaaatattgatgattttttcagaaatcttgaaatacctgttttcaaattcctgtatcaaattgaaaagcaaggctgcgtatttttggctgttcacaggaccatgtttagccaacatgtcgaaatgcataaaattgtttgccttaatttgagcttgccataatttcagtttcatatggaatgctgttatggtttgaaacattgtattgttaagttggttttcaacttgaagacacaggtttaactcacttaaatgggccgtcaaacccactaaaaatgctaaatctgtaagccagttttcattgtcaagttctggcaccaattttgtttgataccataaacagcttgatttcacatcacaaagcataaaatctttacattttgccttgacttaaccatcttacttctaaaaagtgaatgacttgctagagtcagcatccatacttttaaggaattcctgaaactagcgatgattcaattcctgggcccttgtgaaatttacagccttgatgacaatttgcatgacgttatctacttttaaagcttgtgcacatggattttcttgatgtattatgcaataatacttcatcaaatgtgagttttgtgtggcaactgcatcatctattaattgtacaagtccctctcttttacctaccatcgccagggcagcatctgtagctatatcacatatgtttacaaaggacaaagaaaattgctttaacatatttttcactgcttcatataaatctcttgatttagttgtgtcttttaatagcatggtgacatttcgatttcttcagtgacattatattcatcatcaatacctctaataaaaatagcaagttgtgccgtatctgtagtgtcagtgccttcatccatcaccaaagcataaaattttaaattagcagttttactctccaaacgtctttcaatagatttcccaatttctccaattctcctggctatagtctggtgagacaaactgattttagaaatatcagtttctcaaggcaaataatatctaccacatcttccagacattgcttaataaactcaccatcagtaaatggttttgatttttttgctattaaatttgctaccacataactaggttttaccttacgattgagtccgagttgtaactttttaaaaaatcttttttgttgaaaagacagactttttttcagttctgctattttgtccttacaacacatacacaccaaatttgtcagcacgtttttgcatataatgcctcttcaaattgtagtctttgaaaactggcacaaattccgtggaaattaagcagagtgcttcgctatttgcctcaacaagaaaaagtcatttgtccacttttcattgaacaatcttccttcatccataatttttgttttttagggttttctttttaagacattgtggaagccattctggaattaaaagcattataatagataagcaactatatttacttttattatggaaattaacagataggaaaatagaacagaaagcaaggtttaataatcaaataagaatacttacatgtcttctaaataatattaaacacctatcatctacaaaggtaggttgaaatattattgataattgctgggttttacttgccaaattgccacaaacacacctaatacctgacagtgtcaattcaactgtccgtgattagaagataacacactggaagtcgcacaccaccataaaactgaagccacacatgcgtacaaatggcgacagtgtctggtgtacagcagcgctctgccttgtccagaatacacacttgaattctttgtcacaattcacttcacgtggcactgcaatagcgtcctctcgctctttgttagttaattttaatggcttttaatttcttcttgctgaactgtttgcaattataatgcaaattatggatactagtccattatttgtggatgtgacatactctgattacccctttccattccattgttgtctacgaagttcacacttgagaatcacatagtcaaattacaaaattacaaaaaaaattgcaaaaaaactcaaaatgttttaagaaagtttccacatttgtattgggatacattcaaagccatcctggactgcatgaggcctgcaggccacaagttggacaagcttgaattaaaccaatagaacaatttgggtataatctatatctttactatgttcagcctttcatcccgtgaatatagtatgcctctccatttctttagcttttattactttcctcaacattttatagttttcagcatagaggtcctgtacatcttttgttagatttacaccagaaatatttcatttttgttggagtaactgtaaatgatactgtttttcttgtattttcagatattgattattgttacatagaaatgtgaataattttgtttgttgatcttgtatcctatagccttgcagaacttacctattcgttctagaaatttttttgtatattccttgacattttatacattgacaattatgtcacctgaaaatagagacaattctattatttcctttccaatctgtatgccttttatttctttttcttgtctagtgtattaagacatcaggtatgctctttagtaagaatgttgagagtgggcattttttagttcttcttgatcttggaaaaaccattcagtccttcatcattaaatgtgatttaactgaatgatttttttacagattgtctttatcaaatgaaggaactgtctctctcttcctagtttattgagattttatcatgacagctggaagtacacattttaaaacaaaacatagttgtggaagataagagaaagttccaagcatgctggcttgatagtccagccccaagttgggaaaagtaattatccctttctttttccttctatttatggaataaaaaattaagagaaaagaattttcaaggaaattgcattattccttcaaaacaggtttctagtctttaagtattacctacttttcaaaaaaaaatcaccacatcatggcatccctttttcaagttgcccatgctgtaggtgtattaaagacagagctggtctgaggcaacatacagtctgcccatctgtcaccaatccttttctactctgcacactcctggggaagggctaggtcttgttcctgtctattccactggaagaacagttccctaccacgtggagcatttgcaattaaaaggagactgagatatagaggcaggagaccacaccagatggctgggtctccccactcccacccccgccccacatacactcagaagaggctaggcatctaggatctccattgagcatcttgaatatggcttgccataatatcatatacagtcaataaatatttgttaaataaggatgcctcttcaatatattttgtgcaaccatgaagatcaccacaactaatgtgagaaaaaatgtttctgttgaactctagtctttaggcccagtgggatttatgaaaagtgccatctctttagctgaggatgaagaatggaagagaatacggtcattgctgtctccaaccttcaccagcggaaaactcaaggaggtatgaaaataagatgagtcttaattagaaatgtaaagaatgaatctggggacaggtagaaagtaagatcacagtccgtttccaaggggtagtccactgagttcgagcttcctaaaaatggtcttttatctttatgtacagaaaagacatcacaaaattcattacaaaatgtcacttactgctccatgctggagaaagccatatccttctgggacttgagtctgcacatttaactacaggtactgatctgttttgtgcttagatgttccccatcattgcccagtatggagatgtattggtgagaaacttgaggcgggaagcagagaaaggcaagcctgtcaccttgaaagagtaagtaggagcacagccatggggttctgagctgtcatgagcccttccagctgcctgccatggagtcgacagtcgcactgttgggttactccagtgaccagacaaaagcagggcagcgctgcaactccaaagagccacctaagagggagtggctcccatgaggcggcaagtcagcaagggaaaagggccttctctcctgtgcacaggagccaggatttacttatctgttaacttgtcaccataaatattctgggagattaaatacatactttagaaattaaaaaaacatgattgtatcaaagttttgagtgtagtggatatggaactgtgggtaagcaagcatttggtacttgttgccttgcattgggtaagatgggaaagttacaatggggaacttggaacaatttcaatcccttcatggtttttctgagaatatcagcaaactatgaactattaaaccttcccactacttccttttcctccaatctcaaaaaagaaagggtgctagaaatgctatgtgtagagcaagcctattatttgctgtctacaatggtatgtgcttcaattatgcaggaacgacaggtgtaatctgagcctgtcctgttcagacttgggacatgtggtcactcagttttgggttctccaaatcaatgttggagagatctattttttttaaccagaacattcttgattgtcacatcttacaaaaatgactctgctctcagcgcaacttcaggtcagaggagctggggatagtggggttttccagagcattagcagggagtgtagagaataaaggatgatatttctaggaactcagaacagggtgttactgttttgtaaagtgttgaagaggaattggctctgggcatagagtctgtagtcagacaacgccacctttcttgaatccactaggaagagttaattattctactcttgttctgctgaagcacagagcttacatatcttatatcatccacactcaacacatgctactgtagttgtctgataatgggtctctgtcttcctatgactgggctccttgacctcagaggtgagtctaactcagcttggtgtctccatcacccccagcatagggccagctccatcactggcaccagataaccaccttctgagggagtagatggaagatgattcagcagatagttctgaaagtctgtggctctttatgtgtcttgactggatatgtgggtttcttgctgcatgtatagtggaaggacggtaagaggtgctgattttaattttccatatctttctccactcagcatctttggggcctacagcatggatgtgattactggcacatcatttggagtgaacatcgactctctcaacaatccacaagacccctttgtggagagcactaagaagttcctaaaatttggtttcttagatccattatttctctcaataagtatgtgggctattatttctttctctctttttaaaaataactgctttcttgacatataattcacatatcgtataattcatccacttaaaaggtacaattccattgtttttaagataatcaaaaatatgtatgaccattactattgtaaactaaaatgtttttgtcaatctagagccctcacacactttagctgtcaacaccccaccacaaaccccactgccctaagcatccaataatcaactttctgcctctatagatttgcctattctggacacttcatagaaataatatcattgatttttctctgttgttttttattctctatttcatgagtttattttagtctgttattttctttcttttgctggctttaggtttcatttgctcttcttcttttagtgttttgtggtgtaaataattataatcaatttgagatattttcttcttttaaatttagatattacagctataaatttccctctgagcactggtttggctacatcctgtgttttggtacatcatgccttctttttgttcatctcaaaacaatttcttgttgcccttttgatttctgctttgactcactggtcacttaaaactgtattgtttaacttccacaaatgtatgagtttcccaaatttctttcccttattgatttctagttttattccatggaagttgatgtacatatgctgtgttaattctatcttgactatcatttcctgaacagcatgattaagttaagcagcagattatggtctacattaatccaaaaactctagtccaatagataaaggctaagaggtcagggaatttaattctattactttggtcactccaaagactcagaaggtgccattgatctcactgctgtagtggtgtttcctatgtatagacctgcccttgctcagtcgccggcctgaaagaagggcaaacatgataaaaggaatgggttccagttgagaatcatgatgttcttattcttattactggtagagaaaattataattgctccaggtaaagtttgcattttcaatgatttccttttgtttgttttgtttttcccacagtactctttccattccttaccccagtttttgaagcattaaatgtctctctgtttccaaaagataccataaattttttaagtaaatctgtaaacagaatgaagaaaagtcgcctcaacgacaaacaaaaggtaaaatctgatggtggttaaatgacgatgtttaggttttgataaatttagattttatacacatgatagagcatgtatctgtatttttaaaaataaagacagagaacttatgtttagaacaagagaagccatttggtagaaataaagaaggagattggggaaggagatgagaatgagtcagagagatagcatttaaaacttgaaatcaggcacaacaattagtatgtcatgatataaacagtattgagataaaattttaccacttctcttccctttaataaattgtcaaaggataaagtttcctgtttgaaaatatattttactggtattgtgctttcctcatatcacagattggtaaagaatcattttaagtccaagactcttattttacatattctgcaattaaaggtcctatgaggctacctgccgactgctgacatgtagtgtgtggtaaatgtgagtgtttcacagcctggagtgaacaggggtcttctctgagaattgaggttgcaaggctggctaactcagctttgccttcacgagccctagaggccagccgaaggatgtctgcaggtcagggagacaggaccaggtaacccagctgtcactgaagattatatagagtttgagaatgttggaatatttgaaaatgctcccccaaaaaagctgctgatgagttctggaaatgtcaggagattaatctatacggacactgctgaagaaaaaggtagaagaataaaagatccagtacttcttcctgggtaagcagttatgaccagagatggaaccggcaactctttggccagaaagctgtatccaaaagacagagaagatgagaaacagggagggcaaaggcgaaaaagcaattggacatgatagctagatttgtttcaggaaaacatcctgctttccaaggatttagatgaatgtttttgttcactggtgactcaggtaacacgtcttcaagaagccatagggaggttgagggagggaagtcaagaagggaggttgaggactgcacttttgatttacttctgacttcacgagtcactttctgccaaagaaatctctccttttgcttctagcaccgactagatttccttcagctgatgattgactcccagaattcgaaagaaactgagtcccacaaaggtaaccaaggagtgcttctgagggctactggcggggacactaagagggagggccttgttctgaaaatgtgcaggaagtattccaggaagatgagaatttttgccacatagcagaacaacacacatttagatgttataaatggtagctggaggcactttccagaagcccacaggtatagccatgttccaggctgaaagggcaaccctaagcaaacctagaatgcttggaggacagtcagtggtttgtggatcacctacatgagatcaaatgccagttctcagcctcctccagatccaccaagtgagaacctctacttggaaatttatatcaaacataccgatcaggaagcacactatcccagtaagggtgattttaactggcagtacttgaaagtgtgttcgcaaggttaatctactgcaaagttttatttttccctttgaaatgcataagtaactaatgggggacacctctgataccatgtaaatctacttcaatcttcagtcttgtatctactagttttatgacccatggatggttttaaccaaaaccattattactaagacagtggcaaaatgataaccatggtcaatttcaagctaccaagatttggcaaccatctcacaaaatttttgaatatttaacaattggttctagagagcaggactcagcagactccagtataccactttaaacatgtccatgtctacatctacttctgtctgtctatctatctgtcaatcatctatctgcctataatttatcaattaatcatctatctatctcaacaaaacttgctgtgataaagaaaatagtctatcatttcactgtttcatatagaaatcactagacacatatggctattgagtactggacatgtggccaatgccactgaagaacaatttttaagagtatttatttttaattgaataaaatttgaatttaaatagccacatgtggatagtggctaccagattggacagcagagctcccaactttaaaattacagttcaatttcaactcagtataatggggttcaatgtaactgagtaaaataattggatggttgaatttacccacagcagcatacagaaatattcactgataaatcagaactctgtagacctttctcacactcattttatattgtgtttggttgtgagttacatgattgctgcaggcaccatatttatttctgtgctccaggtctctaaaggtcctaatccagtcctgaccaaacagactagtgatggaccatcgtgagcttctctcaggagaaatatcaagagggaggccaacctgtaatcataagaacttctgctattttaatgccattcatcagactacagtcaatcaccatgcttctggctttttgtctatctctgctgtcttgtacatcctgagatagtccattctgagaactgtaccctagatcttgtattgcctgatgcctgtcaaagatgtaatccatgctgcttaagtgaggttgtgcacacaaatcaccatatctcctgcaagtttggattttgattcagtagttcgatggtggggtttgagattctgcatttctaataagctcccagatgtggctggtgctgctggtccatgaaacacactttgagtagcaagaggtgatctgtagctcagtattggtcctttaagttccctcaaacatatatagagaaaaggtcctaaatattgcaaattctctcaaagtttgtcaagctatattggaattctctcaaagtctgtcaagctctattgtagaaaatcaaatttttattgggaaaaagcctaccccatatttacttacagataaagtacttttaggatcattcaaggcacacacccataacactgagtatgtaagacagaaatgctctctctggaaattacagcagtgctggtgctgggatgccatgatgaggagtgtgtggcccacaatcatgtagaccttgggaaaacctggattaaaatgattttgcgtcatcctggccctgtataagatacatatcagaatgaaaaccactcccagtgtgactttgaattgcttttccattttttcttcttgggattagagagcttcacttagatttcatctaagctgtgatgttgtacgttgacctgatttacctaaaatgtctttcctctcctttcagctctgtctgatctggagctcgcagcccagtcaataatcttcatttttgctggctatgaaaccaccagcagtgttctttccttcactttatatgaactggccactcaccctgatgtccagcagaaactgcaaaaggagattgatgcagttttgcccaataaggtgaggggatgacccctggagatgaagggaagaggtgaagccttagcaaaaatgcctcctcaccactccccaggagaatttttataaaaagcataatcactgattccttcactgacataatgtaggaagcctctgaggagaaaaacaaagggagaaacatagagaacggttgctactggcagaagcataagatctttgtacaatattgctggccctggttcacctgtttactgttatcacaataatgctaagtaaaaaaaaaaaaaaaaaaaaaaaaaaaaaaaggagtgtggcgagaagatggccaaacaggaacagctccagtctacagctcccagcgtgagcaacacagaagacgaatgatttctgcatttccaactgaggtaccgggtgcatctcaatggggattgttggagagtgggtgcaggacagtgggtgcagtgcacccagcctgagccaaagcagggcgaggcatcacctcacctgggaagtgcaaggggtcagggaattccctttcctaggggtgacggacagcacctggaaaatcaggtcactcccaccctaatactgcgcttttctgatggtcttagcaaacggcacaccaggagattatatcccgcgcatggctcggagggtcctacgcccatggagcctcgctcattgctagcacagcagtctgagatcgaactgcaaggcagcagcaaggctgggggaggggcgcccgccattgctaaggcttgagtaggtaaacaaagctgccaggaagctcaaactgggtgaagcccaccgcagctcaaggaggtctgcctgcctctgtagactccacctctaggggcagagcatagccaaccaaaaggcagcagaaacctctgcagacttaaatgtccctgtctgacagctttgaagagagtagtggttctcccagcacacagctggagatctgagaacagacagactgcctcctcaagtgggtccctgacccccgagcagcctaactgggaggcaccccccagtaggggcagactgacacctcacacggccgggtactcctctgagacaaaacttccagaggaatgatcaggcagcagcatttgcgggtcaccaataccgctgttctgcagcctccactcctgatacccaggcaaacagggtctggagtggacctccggcaaactccaacagacctgcagctgaggatcctgactgtcagaaggaaaactaacaaacagaaaggacatccacaccaaaacccatctgtacatcaccatcatcaaagatcaaaggtagataaaaacacaaagatgggggaaaaacagcagaaaaactgaaaaatctaaaaatcagagcacctctcctcctccaaaggaacgcagctccgcaccagcaacggaaagctggatggagaatgactttgacgagttgagagaagaaggcttcagacgatcaaactactccgagctaaaggaggaagttcgaacccatggcaaagaagttaaaaaccttgaaaaaagattagacaaatggctaactagaataatcaatgcagagaagtccttaaaggacctgatggagctgaagaccatggcacgagaactacgtgatgaatgcacaagcctcagtagccaattcaatcaactggaagaaagggtatcagtgatggaagatcaaatgaatgaaatgaagaaagaagagaagtttagaagaaaaagaataaaaagaaaggaacaaagcctccaagaaatatgggactatgtgaaaagaccaaatctacgtctgattggtgtacctgaaagtgacggggagaatagaacgaagttggaaaacactctgcaggatattatccaggagaacttccccaatctagcaaggcaggccaacattcaaattcaggaaatacagagaacgccacaaagatactcctcgagaagagcaactccaagacacataattgtcagattcaccaaagttgaaatgaaggaaaaaatgttaagggcagccagagagaaaggtcgggttacccacaaacacaaacccatcagactaacagtggatctctcggcagaaactctacaagccagtagagagtgggggccaatattcaacattcttaaagaaaagaattttcaacccagaatttcatttccagccaaactaagcttcataagtgaaggagaaataaaatactttacagacaagcaaatgctgagagattttgtcaccaccaggcctgccctaaaagagctcttgaaggaagcactaaacatggaaaggaacaactggtaccagccactgcaaaaacatgccaaattgtaaagaccatcgaggctaaggagaaactgcatcaactaacgagcaaaataatcagctaacatcataatgacaggatcaaattcacatataaaaatattaaccttaaatgtaaacgggctaaatgctccaattaaaagacacagactggcaaactggatagagtcaagacccatcggtgtgctgtattcaggaaacccatctcacgtgcaaagtaacacataggctcaaaataaagggatggaggaagatctaccaagcaaatggacaacaaaaaaaggcaggggttgcaatcctactctctgataaaacaggctttaaaccaacaaagatcaaaagagacaaagaaggccattacataatggtaaagggatcaattcaacaagaagagctaactatcctaaatatatatgcacccaatacaggagcacccagattcatgaagcaagtctttagagacttacaaagagagttagactcccacacaataataatggaagactttaacaccacactgtcaacactagacagatcaacaggacagaaagttaagaaggatatccaggaattgaactcagctctgcacaaagtggacataatagacatctacagaactctccaccccaaatcaacagaatatacattcttttcagcaccacaccacacctattccaaaattaaccacatagttggaagtaaagcactcctcagcaaatgtaaaagaacagacattataacaaactgtctctcagaccacagtgcaatcaaactagaactcaggattcagaaactcactcaaaaccgctcaactacatggaaactgaacaacctgctcctgaatgactactgggtacataacgaaatgaaggcagaaataaagatgttctttgaaaccaacaagaacaaagacacaacataccagaatctctgggccacattcaaagcaatgtgtagagggaaatttatagcactaaatgcctacaagagaaagcaggaaagatctaacattgacaccctaacatcacaatgaaaagaactagagaagcaggagcaaacacattcaaaagatagcagaaggcaagaaataactaagatcagagcagaactgaaggaaacagagacacaaaaaaacccttcaaaaaaatcaatgaatccaggagctggttttttgaaaagatcaacaaaattgatagaatgctagcaagactaataaagaagaaaagagagaagaatcaaatagatgcaataaaaatgataaaggggatatcaccacccatcccacagaaatacaaactaccatcagagaatactataaacacctctatgcaaataaactagaaaatctagaagaaatggataaattcctcgacacatacactctcccaagactaaaccaggaagaagttgaaactctgaatagaccaataacaggttctgaaattgaggcaataattaatagcttaccaaccaaaaaaagtccaggaccagatggattcaccgccgaattctaccagaggtacaaggaggacctggtaccattctttctgaaactattccaatcaatagaaaaagagggaatcctccctaactcattttatgaggccagcatcatcctgataccaaagcctggcagagacacaaccaaaaaagagaattttagaccaatatccctgatgaacagtgatacaaaaatcctcaataaaatactggcaaaccgaatccagcagcacatcaaaaagcttatccaccatgatcaagtgggcttcatccctgggatgcaaggctggttcaacatacgcaaatcaataaacataatccagcatataaacagaaccaacgacaaaacccacatgattatctcaatagatgcagaaaaggcctttaacaaaattcaacagcccttcatgctaaaaactctgaataaattaggtattgatggaacctatctcaaaataataagagcaaatttatgacaaacccacagccaatatcatactgaatggacaaaaactggaatcattccctttgaaaactggcacaagacagggatgccctctctcaccactcctattcaacatagtgttggaagttctggccagggcaatcaggcaagagaaagaaataaagggtattcaattaggaaaagaggaagtcaaattgtccctgtttgcagatgacatgattgtatatctagaaaaccccatcgtctcagcccaaaatctccttaagctgataaacaacttcagcaaagtatcaggatacaaaatcaatgtgcaaaaatcacaaatattcttatacaccaataacagacaaacagagagccaaatcatgagtgaactcccattcacaattgcttcaaagacaataaaatacctaggaattcaacttacaagggatgtgaaggacctcttcaaggagaattacaaaccactgctcaatgaaataaaagaagatacaaacaaatggaacaacattccatgctcatgggtaggaagaatcaatatcatgaaaatggccatactgcccaaggtaatttatagattcagtgccatcgccatcaagctaccaatgactttcttcacagaactggaaaaaactactttaaagttcatatggaaccaaaaaagagcccgcattgccaagtcaatcctaagccaaaagaacaaagccggaggcatcatgctacctgacttcaaactatactacaaggctacagtaaccaaaacagcatggtactggtaccaaaacagagatattgatcaatggagcagaacagagccctgagaaagaatgccacatatctacaaccatctgatctttgacaaacctgacaaaaacaagcagtggggaaaggattccctatttaataaatggtgctgggaaaactggctagccatatatagaaagctgaaactggatcccttccttacaccttatacaaaaattaattcaagatggattaaagacttacatgttagacctaaaaccataaaaaccctagaagaaaacctaggcaatatcattcaatacagaggcatgggcaaggacttcatgtctaaaacaccaaaagcaatggcaacaaaagccaaaattgacaaatgggatctaatgaaactaaagagcttctgcacagcaaaagaaactaccatcagagtgaacaggcaaccgacagaatgggagaaaatttttgcaacctactcatctgacaaagggctaatatccagaatctacaatgatctcaaacaaatttacaagaaaaaaacacaaccccatcaacaagtgggggaaggatatgaacagacacttctcaaaagacatttatgcagccaatagacacatgaaaaaatgttcatcatcactggccatcaaagaaatgcaaatcaaaaccacaatgagataccatctcacgccagttagaatggcgatcattaaaaagtcaggaaacaacaggtgctggagaggatgtggagaaaacaggaacacttttacactgttggtgggactgtaaactagttcaaccattgtggaagtcagtgtggtgattcctcagggatctagaactagaaataccatttgacccagccatcccattactgggtatatacccaaaggattataaatcatcctgctataaacacacatgcacacttatgtttattgcagcactattcacaatagcaaagacttggaaccaacccaaatgtccaataatgatagactggattaagaaaatgtggcacatatacaccatggaatgctatgcagccataaaaaatgatgagttcatgtcctttgtagagacatggatgaagctggaaaccatcattctcagcaaactatggcaaggacaaaaaaccaaacactgtatgttctcactcgtaggtgggaattgaacaatgagaacacatggacacaggaaggggaatatcacacactggggcctgttttggggtgggaggagtggggagggatagcattaggagatataccgaatgttaaatgacgagttaatgggtgcagcacaccaacatggcataggtatacatatgtaacaaacctgcacgttgtgtacatgtaccctaaaacttaaagtataaaaaaaaaaattcaaaaacctcagtggcatctaatgagaagcatttattgctcacaagactggatagtgagttctgctgatactgactggactcactctggtctggctatggtctgaggtagcctggccctgggggcgcgatggaggctgactcagctctccccacacctgtctcatgttccagtcaggtagccactggccaagaagccaagctaggaaccagggtatctgactcctgagctaaactctaaccctctacaatactgcctcccaaatataacaccaagtgctaggtacatatcatccacagttttcagacttctgcccaaactgggattctttttagtgtgaagagacctggcctgtggggctgaccctggtgtggctgtgaggcagacacaaagggacatttacatccagtcctgaagattacagtccagccctgaagcaacaactaggaaactattccaaaaggaggggatggggctgagtgtggggttctattctcttcataactttaactagaactcaaattgtgtaccttggtagcatccaatcataaatttattttgtcgtatttgtgatagaaaggaacaagtttatccacaaatttatttatttatttatttatttatttatttatttgagacagggtctgactctacgacccaagctggagggcagtggtgcaatctcagctcactgcaaactctgcctcccaggctcaagccatcctcccgcctctgtctcctgagtagctggaactacaggcacacgccaccacacccagctagtttttgtattttttgtagagatgggttttcaccatgtttcccaagctggtctcaaactcctcaaaagagttaccaagcaggactctgcaaccaataatccttgtgtgaagaggatatttgctcttttccctgtttttctttcttggtacagatgtgtgacctctttttgaaaggtgatagtgactttggtgtattttatttggtggtaatggtcatagccccattaatcacatttcttcccatgagaaagaaaaaccactacatggtcatgctaaggatttcagtccctggggtgaggatggtcttgaatatctcctacattcataactcctccacacatctcagtaggtcactgagcacatcaatggacatgccagttattaaaatacttcacgaatactatgatcatttaccagtatgagttattctctggagcttctaatacttcaatagtactgcatggactcagttgagagttaattcaaaatctcagattatccaattctgtttctttccttccaggcaccacctacctatgatgccgtggtacagatggagtaccttgacatggtggtgaatgaaacactcagattattcccagttgctattagacttgagaggacttgcaagaaagatgttgaaatcaatggggtattcattcccaaagggtcaatggtggtgattccaacttatgctcttcaccatgacccaaagtactggacagagcctgaggagttccgccctgaaaggtacaagtctccagggaaatggagctcaccctgacccaggctggttcaagcatattctgcctctcttaatctacatgacaatcgtgtggttgtacaatcatttgcttgtaagtctttttatcacaaaaaagtgataattatcaaactttacaaaccacagactagaaaaaacgaaactacatccatccacagtcccagcacaagacaaagataatcaattatgtccctgtgggcatttttctacgcctatatagatttttaaaaattagaatggtatcactttttatttggtttgaattgctgcttacttgatttaacaggaaactatccactgacctatattactataaatatacatatatatgtatatatataaatatatatatatgtatatattgcatatgccataaaccatttaaccatgatgttatttcaggtgtataggctttttattcctttctgttttttctatgctgtgccctttagctctctgaatttaacagaaactttaaaacatgcttccacattccatttgctttcaacgttacttgctatttcctctgtagtaattataagagtgcaggctgaggtcctgagaagtcctcatccctaatggtttaagccacttcactgaagacacaagacagcacaggtcctcctggtcctatctgtggctgcagtcctgtgccagctcccttatactctcagtagacatctcacacactcctccttggaggtgtcttgagcatgctcttctgggaattcagggacaaggtcaggccttaggcacagttcgcactctggatatagttggtgttttcccattactgtattattaagcaaaatttagaatgaaatttttagggtactggctggtgattcaggatgcttgggatctagactttcattagcccctacctgcaagtttgctgatgggaggaaccttgtcttgttggtcatggtgtccctagtgctagcatggagtctgcacataatacttgttcacagagtaagtcagagctgaccaagttctctgttttctggagtagaggacttctatgtttcctgcaagctcagcacttccacctcctgtggctgcactaatacgaaatcagagaccactcgctgtacttcactttgaatcactcagtcaccaaaaagatagtgcttgccatgtgtcaggaacttggctaggcagggagaaattcatatgatttatataaatccataaatccatatgatttacataaatccataaattcatgtgatatatacgtatatgtgtgtgtatatatatattagagaatgtttgacatatacacaagtacatgttaccgacaccagcctatagaatagttttcgtgcatctccatatatctatcactggttccaacagccatcaatccatgttagctgccccatccaaatgccaccatcaccctcctcctgactatcatgttattttgaagcaatagcctgtaaatatttcagaatgctctccaaaatataaagactcctgtaaaaacatatgacaacaatgccattattactttctttgaatcaacattttttccttaatataatcaaatatttagaaatcaaatttgaataaaacatgggtcaatcttcaaagaatttatagcttaatggaacagatcaaggaaagcagggatgacactacagtagggtagcatcatatgcccatgtaacttatgtgacttaaactatcctgtaagggtgtgggggagaaagagaggaagagatggagagaagaaaaaggaagagaaggaggaggagaaggaggcagaggagaaggtggacggggaaggtagagaggaggaggaggggaattagaaaaaaagagatgacaggagaaggaaagggaaaaataacaacttgaaatagcacaagacgttttctccttctcctttctcaatgagcatgtgaccaacacaagtgtgagttgaggcaggaatccacttttccatccatcagtcttatcatttatgtgccttttatagtgtgaacacatcaccaccctgaatataattttagtgtttagagataaatattatttgcaacaatattcatctcatctcaagaaacgctcctatagggtatggagaatttaaaggacctgtaggttatgatgattataacgaaataaccaaagcaggatttcaatgaccagcccacaaaagtatcctgtgtactactggttgggaggtggaggggggttgttcttaagtaagaacccctaacatgtaactctgtggtttttatgtttcattaactatttaatctaccaatatggaactaggttcagtaagaagaaggacagcatagatccttacatatacacaccctttggaactggacccagaaactgcattggcatgaggtttgctctcatgaacatgaaacttgctctaatcagagtccttcagaacttctccttcaaaccttgtaaagaaacacaggtcagtacactttctgtatgttttattaagaatttttttaactgaagggtatatattttttaaaagaatatgcatgtttatcttttaataattcattctatgggccaaagaacctacttggatccatctttgatcattaaggatgcttcagttctggacttcaaaacctgtagcattaagaacatcatgtaaagtccacacagattagcatgacatgattatgtgtagtctctttgaacctgagtaagtttaaattcagtttcaagtcaattggaaagaagtgttttgcacaatcatgaagtgcaatgattacctggctgtgacttaaatggtgttctccatcaccagaacctgcagaagctctctcatgacagtggttctcaaccactagctgtatattggaatcaccagggagcttcaaaaattcatgatgcctgtgacatctcagaaattctaaactaattaacccagagcgtgactaggttctgtcatgctgtcgggtgaacccctgattagttctcacgtgaagccaaggtggagaatgactaatttcaggcatttctggtggatatgaaggactaccatagagcagggctatccttactccttgaccttatgttccaggtgatacatttaaagaaagatttagaatcttttctctgaagaagttaaagaacagatgtcattgattcatattaagcaatagcctataagtcttatttccaggaccggtgtatttaatatgcaactctaccccttaagtacactttgtgcttgggagaggaggaggatggagatggttgccatcttatctatggcttcagggcagctgtgtagctttcctatgtgtgtattcaggcagggggctcagccctgagagaaagtgggcctctggcacacctgggacagggaagatattccctggcaagctctcaggcatctcaggctggcacttctttgtatccatggcaatttgctttcccctcactgaactgagatcagaatgttactctgttggtggctcccccaacagtgaaggggtgactcagtgacaatagtgctagaagtatgagtcaaaacactgtacaacttgagaaattccccgtttgcactacgcttggaagccaagaggagatgttaaaaagaaaagaataattctttctgaagacatttcccatcattgcacttgatgggttcaactgggaagggttactagactctggaagttgaaaactgcccacataattaaactgtacaacagctactcaggattaccttgcaagttttaacctataaaaatttaactttatatagcacttccaaaatagtttgccataatacctactaatctggatttaatttttaaaactcatccttttaacttaagatttaaataaaaaaaaaaaaacacgagtccacaagaatttgtctcaggcctggcacagagtcagtgctccataaatattttgttaaacgatggatggtgagtgcttttactatccagtatttacccagcttatagattaagtatgaagagttcaagatacatggtgttaagagtcgtttttatatgcttgcaaagcatttttgtcatattttttctactttgcttccatcttttcttctttcacttcatttattaattctccatatgcttgtttaactattgtagatccccttgaaattagacacgcaaggacttcttcaaccagaaaaacccattgttctaaaggtggattcaagagatggaaccctaagtggagaatgagttattctaaggatttctactttggtcttcaagaaagctgtgccccagaacaccagagatttcaacttagtcaataaaaccttgaaataaagatgggcttaatctaa

SEQ ID NO: 15533 - DNA, 218427 bp, Homo sapiens
ggaatacaaaaggaggaacccagacgctcatggagacagcctcggttcataaatcaggtggggccaggggctgggggcccacacgccatggagcccgactcccttctggaccaagacgactcctacggtaagacggtgccagcaaagtgcagagttgggggtttcagcctctctgctcaacagacttttctctgctataggaatctgagttgaagcagggaggcagtcaggcatctgggcactgtctggtcttgggacccatgggtgggcatgggtgcgttgggctatgagactcagggctggagggtccctggagcgggcagcccctcagactccaggcattgacaaggtccaggggagggagagagagtttctcagctgcttctgttttgctcctggccaagaaggaaaggaaggaagttttgcagcccccctgcctgtctgcctacctcgctgttcgccaggcctgccctgtgctgtggggaattcaattagtgcgatcctgcggataaatatagatggaagaggcaacaggaacataccttgtaattaaaggccagggctcatgctgaaagcactccccgtgtgacagggccccagtggctgccaccggagagctgcccaggccactggaagctctgcatgcattattgggggaaaagttgctcgggacagagcccatgcagagtctggaagagggatttataagactcggaagggttccttcgtggtggtttctgcaggcctggggctccagcgacgcagtaactcagctcctgcactactcagcctggccagagagctcacatttggctgggatgcccggcacagcctggctgtctctggacaaccaaggagggacgcaagagtgcaagagtgtggccgaggcaccgaggctgggcatgggggggtggggcagcaggttttgggactcagcagggagaagtcctgttggcctcggaagaggtggtaattgcagggcgacctcatcccagcttgggtcaggtcagccttccaggggttcaggtcctcctgagaccacagttctactaagaaaaccaagtgcttgtttctccggactttcccccaccccatccaggcctggctgcctggcacagattcaaggccaaatttccttcctcctgcaggagctcagccctttccaaggagaggggccctttgccacgtttggagctgcagccctcagggaagcttggcaaggcccagcccacagacctggcatctttgggcccaggggacggggggtcagttgatgcatgcagagtgacctccatgtgccaagccctgtgtcagggtcagggatgtgtaggaatgaggaactcagtcctaacaaatagttggtgcttagtgaatggaaggaggaggagaatacaaagggaggagagagggaaaaaaatagggagagcagcccttggcctggaagagctcccagtctggaatgggagacagacaaacgatcccagactaaattcagagtgatgcggtccttggggaggccaggggcagacagcctgagggtgtgggacaggcctgcctgcctccagagctgttcactggaagcttggcattgggatgcgtatggactcattggatgtctggatgctcccctagggagggcactgacctttgaagaggcaggcgagggggtgggaaggaccagccccagccagggatatctcaggaacccacagtccccacttgctgtcctccagatttgctagtagcagcctctgggctgggcaaggctggaaactgaggctgcctccaccctcatggaaaggccccatgcacaatcagctccttgtcctggcctgtcacgaggccggttgctgatctcctggaagctggccaggcagggaggtaagggattcaagaggaagaggaaagggacagagggggccttaggaaagggacaggcaggcatggagtggagcccaggctctctctgggagcaatcccaggcccagctggagaggggtctggcttttccagccaaggtctcccacccagccagcctcaggggtccagggctgaaggaggccatcctgggtcagggcagcacaggaaaactgcggtctcagtgagtcacttccccagtctgagccccggttctacattcatcaatttaacaattactttcaggttctggactgggctttggtgttcaagaacaaatcaaactttgtgactttcctaggctaatctgagagagatgcaggtgcactgatgggggaagtcaaggcgtgtggaagccctaaccctatacttggaatccagaaaggcttcctggcagaggtgactcctccactgaagaagtcaatgattccctctatattgatcagctcaggctgctgtaacgaaatagacaaggtgactcacacaacaaagatttcagaaacagaaattaaaacagaaggctgggcgcagtggctcatgcctgaaatcccagcactttgggaggctgaggcaggtggatcacttgaagtcaggagtttgaggccagcctggccaacatggtgaaaccccatctctactaaaaacacaaaaaattagccaggcatggtggtgcatgcctttaatcccagctacttgggaggctgaggcataagaaccacttgaactcgggaggcaaaagctacagtgagccaagatcacgctgctgcactccagcctgggcgacagagagcgagatgccatctcagaagtaataataacattttgcagtgatgtgatcaaaggtcactgcagccttgaactcctaggctcaagggatccttctgtcttagcctcctgaatagctgtgactacaaacatacaccaccacacctcactaattaaaatttttgtgtgtgtgtggagatggggtcttgctgtgttgcccaggctggtctagaactctcgggctcaagcaattccaatgcctcagggtcccaagtgttgggattctaggcgtgagccacagcagtcagcccttttctctttctcttttttttttttttttttttttgagatggggtcttactctgtcatccaggctggagtgcagtggtgcgatctcagctcaattgcaacctccacttcccaggctcaatccatcctcccacctcagcctcccgagtagctgggaccacaggtgcacaacaccatgcccagctaattttttgtatttttggtagagacaggttttcgccatgttgcccaggctggtctcgaactcctgagctcaagtgatccacctgcctcagcctcccaaagtgctgtgatccttttgtctcttcttataaggacactaatcctactagggccccatccttatgacctcatttaaccttaattactccttagaggccccatttccagacagagccacgctgggagttcaacatatgacttgaggatgggagggatacacatgttcagtccacaacaccctccttttttattgagacagggtctcactctgtcacccaggctagagtgcaatggcatgatcacagcttactgcagcttcgaactcctgggtgtaagcaatcctcctgcttcagccttcagaatagctggactacaggcatgcaccaccatgcctggctaatttttgtattttttgtagagacagggtttgcccacgttgcccaggctggtctcaaactcctgggctctctcaatctgcccgcctcggcttcccaaagtgctgggattacaggcatgagccacagtgccggcctggcttctgggacaggctgctctcggggtttcctcccattatctctggctggccccttctcctggggctctctctcctgctgctgcccacagggtcccttcgccagtgcctgcctcctctgctccttcatgattgaactcttcctccttcacccctcactccctcgcttcccgccatcagatctgaccttcctcacgcccccaagctgtctccccccagggcctttgagcatccttcctctttctcttccctgagctaattcctcctcctcttcccagtatcaactgaaaagtcacctcctcagagaagccctccttaaaccatgttcccccaatgcatcactctcataggccctcttttcctttatggacgtgttcatatgtgcactacacattattgcatgctgatgtgtttcacctgcatctcccgtgagtctctaagcaatctggatccccagagcatagttctccacctggcaggagtaagcatccaacaaatgcttgttgaatgagtgagtgaacaaatgcagttggtgcaggcaaaaaggcaaggaaaggcattccagggcagaagaaacagcaggtgcaaaggcatggagactggtgatgctttggagcattctctgatacttacaatcttggtcaggggttggcaagctgagctcctttagggggctcaggaacattgatggggatggggaagggttgggagctgcaaagctgggggtgaggctctggacatctctccctgcttcaagctgagcaaagcgcctttcgtctagtgaagaccccagttctgattgcatccatcaggtgttcagaggctgaaagggttcagccatggcatggtgggggatccgcagccactggcactgaagttctggaggcctaagcctcttagcaggcaggactgagcagagccctattgggtggtctggcggtgggagccccttagagcatggccaagaagggctcagacacagctgcagcgaggagcagacataggtgcagaggtttcttttacaggacagtcagaggcaggaaggtgaggagaaggggagagctcggaaactcggcactaacccctgcagagcccttgtgattggccttagtttccctaggtgtaaattggggtgacggccagacaagatgtgactgtcccctctggtgccagccccttggagctgtgtgaaaagtccagctcagagaagcatgtcctttccgtctgccttgtgatttccaaagaagggggcaagacagaggcctggcagcggccagcataagagaaaaagtcctgccctgcaaaatatgctttctccgggttcttttggagtcctgctatttctccacttcgtgggtaccgtcctcctaccaggacagctcctggtgcttcctccgcctgggtgtgttttcattgtctgctcaccagcctgactcccacatgagactataaggcccttgagggcaggggctgtatcttgtctgccactgggttcccagggtgctgcacagcactggtcctgagaaggcactcaatacatactcagtggatgaatgaatgaatgaatgaatgaatgaataagtgagcgagagtgagtgaattaatgagtggcatgagctggatcctgcccttaacttgctccgcatccttaggcatcctccccgactctggacttctggttccttagctgtcagctgagggtgctgggccccatgccccaagagagcaggcctgcatctcatcccagctctctcggttattgggtggcctggaccaagtccctgccctgacttagcctcagcttcctcatctgacaaatgggcagactcagccctgccctgcctgtttttcaggcggtcttggagctctggaggagtaaggaggcaaaacagtgtgaggctggacacctgtcaggggagtctgtgactcgtacaggagcgggggttgggctcagacagcccgctgggataaaccctccagaagcgggtggttgctttcgatatcatggaggtggagcaggcagctcaaaagctcagaactttccatttcttcctgatgacaaccagcatgggcatctacctcagggttgttggcagatcccagcagagaagcaggtggatgtgagtttgtaaacttcccaatgctactgctgtaataactgtttggtaagcacctactccatgccaggatccaaagacactttatctacactgtcttctgttttggtttgtttgtttgtttgtttttgagatggagtttcgctcttgttgcccaggctggagtgcaatggcgcaatctcggctcactccaacctctgcctcctgggtttaagcgattctcctgcctcaacctcccaagtagctgggattacaggcatgcgtcaccaagcctggctaattttgaattttttggtagaggcggggtttcgccatgttggtcaagctggtctcgaacttctgacctcaggtgatccacccgccttggcctcccaaactgctaggattacaggcgtgagccaccgtgcccagcatttttttgttttgttttttgttttttgagatagagtctcactctgtcgcccagtttagagtgcagtagcatgatcttggctcactgcaacctccacctcctgggttcaagcaattctcctgcctcagcctcctgagtagctgggactacaggcgcgcaacaccaggcccggctaatttttctgtttttgtagagatggggttttgccatgtgagcaggctggtcttgaactcctgacctcaggtaatctgcccaccttggcctcccaaaatgctgggattagaggtgtgagccactgcatctggcctacattgtcttctgaatccttgcaatacacctggtgggttgcagttagccttattttccagatgagaaaattgaggcccaaggaggttacgtgactggccctgatcacgcagtgagtgcactgatttgaacccagctttctccagctacaaagcctgatatctttattttgctgcagtcctgaaagccattgtgtgccaaagctgccacctggaggcccctccctgtgcctgtggaaaatcctctctcccggggagcgttcactgaagcagctcagagatgtggcaggagccatgtcagctcagctggccaaggcgagaggcagactcagctgtgggacagggatggtctaaagagaagacaatttgaggccaaaatagcctaatgtcatcagggggcctgatatcatgactccctgggccttcctttgagaggcagagggattagcttcaactggtgacagatagataataattgtaaaaaataacagctatgtgtccagccactggcctcccatccatcgtctcgcttcccctgcttaggcctgccctccctctgaggcctcctcctggctctgccactcagctcactcagcaggtgccagccaaagacctgggctctcatcgagcctccatttccccatctgtgaaactgacaccagcctagcctgcctggaatggggaagggacgccagaatctagatcccttccatcttgttcgagggctctgtcctagaccaggctgcctgggcctcagaaaaatgaaggaagagaagccacattcatacctggagcccttctataagtgaaaaaattaggccaaggatgcagagctggggtcctatttatgagcatttactgtgtgcctggctcactgctaaatgttctccactgactcctcacagaggaaggaacaaccccacagctcagaggagaaaatcaaggcttagaagggccctgccacacagcgagtgaggaacacttgtgattcaaacccaggactcccaagatcctgtgagctttctccactttgggctgctcccaccaccccactgggtctcctggcccccaatccagggccctttcccatgcccaggggggcctcggttctgctggccagccatgcggggggcttctgaacttgcccagctgggcagctggatgagtggtagagccacacgccccctccccttgccctgagactctgggaagaggcgcaatcaggaggaacagacaataaagaacaaagaggccagctcgggaggggcttaggtcatttccacacacaagcctgagcagctggcctcataacaaggtcaggggctgaggctgcagtgggggttggctggtgaggagggagcccctgtgcctggagcagggcggggaagagccaggataaagctcaagagagaagagttggtttccccagagagagggacagggaaagggagggagcacctatgtgcataggacgcggacatttcacttcccataggctcctggagagcccctcctgaactgtacttaacacccccaggcctgggcttctatctgctgcgcctccgtgtgacctgtgagccaggccagttgattctcagagcctcggagggatggggacagcagcagccaccgcgcagggctcctctcttgtgaggaccaagcaggatagatccttccttcttctgtggtcctggacagccactgcctcaggctggctcctccgccacgggacctggtgcagagtcaaagatctttaagtcaatctgtagcatgatccgggtcccctaagctttcctaccaccgaatgtgtttcttggtatattgttcaattcccgttttacagaggaagaaactgacacactcgcttgagtatcggtccttcaagtaatgtggcctgactcatgctcaggttgctggatggctgccacagccctccttattccaaagaggcaggtggaccccacacatcaggcccagtgtgtccccagcttcccctcactggcctccctgggctgactgcaggatatccagagtctagccttctgctcccactgccccgtctgttccttctgctgggtggatacgccctgggctgcttagcccaccctgggccttccaaagccagagctgtggtcctcccagctgggattcctcccaaggtctcaactctggaagcccagggaggctggaacaaatagcaaatggccaaggtgtagggagacccaaggggaagggtctcttgaggtcctcctgtccattctctgttacatcatgggaagatggaggtcagagaagatgaaaccaggcccacttacggtccatgctacctcctaagaggtccagagatccaccccgactctccgtctccagcccccacttcaggccaggcctcaccttggacacctgcacagctgccttgcctcttcctggggctgtccatctctacctgccccccaactcatccttcgtgcacagccagaaggggccactcataggcattcaaaaaacttcacagggcccaccgctgcagcaggataaaatccaaactcattaacagagcttaatgccgttcatggtctgaccctgcagatacacttctgctctcatctccaagccacaccccactttcttgccactcccatcatcatgaattaatttctgccttgaatctgcctctctctctcccttacctttgcacttgctcttaccgctgcctgaaacactctttcatcttagccttccctactacccctccagcccggtcaatcctgcccatcctgaagtctcagctcaggtcacctcctccaggaagccttccctgactagcttgtttgggctgcctaggctccctgggctttctgctatcccactgcactttgatgagtaaagtccatttgctttactgtttgtccccatctctgggctgtgagctgcttggtgagccacagtgaaaacttggaggggaggctgggtgggtaaagaaagaagtcaggataaccctgatctctggcctgtgtggcaggagatgttggtgtccacactgacatggggacctgggtggaagggcagattctggggggggaggggaaacgatgttctgggcttgctgtgtctgaagggcctgcagggccatccagtggctatctctagagaagttggtgacggtcacctttgagagaggcctggattccagaagggagggaggggagctgctggggccttcccagcgtgtgtcagaaccactccctttcccaggcttgcagaagccctcactcaactgcccaaccagggtcctgtcacctcccccaggaagccagcctggccctgacaaagcagtgctctgttctcccccttgaccattactcgcctctggtctgaggacatctctcgggctctgccttagaactcttcaaggtgggagccacatccctccatgtcttgtagactccgcatcgcccagcacagggacagacacagagaagaagctgcatggacaaggagccctgccccttcccctggacacagccccagccagtgggattctggggaaaagaaaacacaagcctgaggagctttgggtcagattgtctcgggagagtgggggaagaggcgggtggagtgggggtggatttctgtccaatctggaagcctgtgctggatggccggatcgccagcaccccaggctcgaagcgttccagccggtgacctacattcccagggcgcctctgtgtgtgcgcacacgggcaggcgtgcgtgagtgcaggagctccacggtgtgtctgccagtgggcctctgtctcggcaggctgtctcctcaggagcccgtgagtgagcacgtgagggcgtggggggcccacactcctgctctggggttccacagactgcaccagaaagagttggtctgtgccctagaaaagccacagccagggactgcagggactgacatggctgggggtggctgtcccacccgcagccctgcccaagaccctctctctctcctcccatgctctctctgtgacaaatggcctcacactgctctttgctaatggtggggtgttaggcatggaaaatggagggcacagctcttaggtggcggtggagggcggggacctcaaacaacagcccgaggcagccagatggcaaccagaggtcagtagggtgggtggctcagcagagggagcaggcaccaggctctaggccctgcagcctgaggtcagggcgtcactcaggggtccttgggggctgtcccgggtcaggatcctcctgcctccaggcgggggtagaggtggagatctctccctcctgggaaggcctgtgcttgactgagaagctaagctgactctatggccctgaagccagggcaccagggaatctggggggtgggtgccctgctcagagaccctttagtctctcctttgccagttctgtggcgggtggggtaggggtggctgtcccccaaacccttctgagcctcttctttcagacttggtccctgacagcagggaggggatgggtagtcctttcagagactctctctgggtctatctctgtctctttctgtctctctatctctgttcctatctctctcagtccttctgtctcagtcatctctatatatctctctgtatctctgcctctctctctctctttctccctcctgctgggctccccctgctcccctcttccctcctctccccctagtgactcctgcaaagctccccttccccagcagaatggggaacacagacttggctgagggcctaccgtgcccggcagcaagagaaaagtgaggctcgagcccccgacagcttctccgtggcccttccaagccccgggggatttttgcttcagttctcctctccctccgtcaattccccagctgaggccaaccttggtccctgggctctgcacctcctgcccaccctcctgcctgtatgaggacccccccatcgacctcccttgctggccctttctccggccctgcaacgggcccaagtctctcccatcccatcctcactgcctcatcctctccggcctatgtcttttttttttttttttttttttttttttttttttttgagacgaagtcttgctctgtcacccaggctggagtgcagaggcacgatcttggctcactgcaacctccacctcccaggttcaagctattctcctgcctcagcctcccgagtagctgggattcccagcccatgtccttctgatctctgcttccccactggcattgtgcaactcaacaccactccctgccccaaagctgctctgaacgggcccaccagtggaataccaactgcagaatccagggctttctcttggggcaccatcttaccagtcctctcgggtgaggctctggttgggggtaggtcagggcagggtccctggagccccgcaccatcagatctctgccccttaccaggggaaatgatgtaacttctctgaatctcagttttcccacctgtgagatgggatggttaccctggtactcctgtcacaggttattgagaggagtaacactgttcatgcttatttaaaaaattctgagaactgatctagcagagaatgaggcctcagttgatcttggctgtagttataatcatttgtgtttgccattgcttgaatctctctcctacccccccaccctgaggaccccacagtctcctctcctgggtttcctctcgcctgtctcttcatcccctctcggtctttcctgtaggctcccagctaagccaccaggtgaccaggccaggccctctgcagtccccaccatccctcctcacatctgtgtgtcctcacacccctgcccactgcaggaccaagtccacctctgccacccacacctttgccagcccctacctggaccttctgccttgccggtaccacccagaccaggggacctccctaacataggctcaataccctcctcctctgtgcacctgaccggttctgctcagggctctgggggcagccctgtcacaccttatggccttgtccatcgatctgtcagtccacatgcctgtctctgccacacaccttggagcttcatctctgtggccctggcactttctgctgcatatttgttgaatgaataatgaatgaacgaatgacttgatgcaaatcaaagtactttgcaagctataaagcgctcctccaatcaatgccacacacagtggggtattaaggagcactcaaagcctcctgcaggacttggcctcaccttgcccactgcacctgggtcgggggaaggaaacctcaatcttccagaaagttctaatccttcatctgcctcaggatcattctgggtaggaacgatgcccagcctcgccctagagatttggattcagtttagtctaaaggaggcctgggcaatggaatgtataaacccctcctccttttttccctcctcccctgccccaccaggtgactctaaggggcagctgctggaattggaggaggattgttggagccctggtctttgctccctgcccaggttcacttcttttaatttgtgccttctctgtgctagctccatgctgggtgctagaggggaagcacgcacccagggaagcatgaggctgggtctctgctttagggaagagcttagaacaggcactcaaggctacagtgacatcccagggtggagagacctctaggggtaggtgggaaggagaagatgctgaccttaaagataaccagagacctaaggccaggtacagtggctcgtgcctgctattctagcacttttgagaggccaaaggaggaggatcgcttgagattaggagaccagcctgggcaacacagggagagcccatctctaaaaacaaagccaaacaaaatacggaggttggcctggtggatggaggtagtgaacaggcagagggaaccacaggggaaaggcctggagttgagaactacagagtagcccatctaagaactttttttttttttctgagatggagtctcgctctgttgcccaggctggagtccagtggcgcaatctcagctcactgcaagctccgcctctcaggttcacgccattctcctgcctcagcctcctgagtagctgggactacaggcgccaaccaccacgcccagctaatttttttgtatttttagtagagacggggtttcaccgtgttagccaggatggtctcaatctcctgacctcgtgatccacccaccttggcctccccaagtgctgggattacaggcgtgagccaccgcgcctggccgcccatctaagaactttgagtgattcagtgaggctgtaccccaaaatccaggtgcgcaggcctggagaggtcagctgggctggggtagcggcctcaaatgccgggatcaggagattgggctttaccttgcactgggaggagccatgaatagtttcaggcaggggaggaacagggttgtgctgggtcttcctggaattgctaagacccaaaccacccctgaggcagctcaggtgaggctgggtggctgcccacctctgggagctcacaatcccagcaggagaagcctagcccaaggagggaggccaagaagacccagagccaagggggtagtggggttcctggactggctaccttcgccagacctgctcagcctccagttccctgtttagtggcattaaaggtttccgtcccccaatgtccttggcagcccagtgcatgctcaacttgtgggggagcaggaggagggcagctctgactatcttccttgcaccttgcatcttcaggaggggagctagtcagactcttagggaacaagagaaagagaagggaaggtgcatgagcattttgtgccagagctcatagaactctggctggaaaacgtagccccattttacaggggaggaaactgaggcacacagagatttgtgatttgtccctggttgtactaccaggaagtgacagagtcaggatttgaactctggtcctgctggcttcaaagcctgcgtgcttcccactgtgtgcatccctgctctgagtctgcactgagcagcccacgtgcctagtcctgctccagggagaggcaggagaggctgtgtgagagctacaaggaggctggggtctctgctcacctcagcagtcccagtaaagtaggcaggaaccatgggagagattcgagcagaggagggacaggtccaaagctgcagccagaaatcgcctgtgctccagcccctgtccccagcccctcaatgccaactccccatccttcagctgaccccgggctcattaagtgctaggaaacgccaccagcagcgggtgcagggctgagggccaagctgccggctggaacaaaagagcttgtgtttggggataggacctccccctccttcaccacggttgggggccgtggggggaagtgaggacagtcatctggggccaagaggggctgcagggctggggaaggggcttgtcagagcccggattcagatagaaagggctgaaagggggttggaagctaatgtgcctgagcgtctcagcacaaacgggccattttcagcgggcccagaaatcaaaacatcccggctgggggagagcaagctttgaacttttcctgactcgtggtcctgggggtgaagaggtcagggactgccttgaggtgggggccaggccagggtgggatgagcagccggcagcccaaagcccccttccttctgtccccatgctgagtctcagagggaaccagggctgctcagagcattcagaggagggtgcgggctgtggggggtgagaaggaagggaagccccattttcactgtctcctcactcccaactgtgggcagccaggtgtgcttctacattgcaggtctggccccacatcccctgctgcagacctccactggcgcccccgtgactctcaggatctgttcccagctctggaacaggctctccggacccctggccactggcaccctgggcagcttacctcgtcccactcctgatagccccccaatgaccactttatgcttcagccaaatctagctgttgacagctcctcaaacgcttgggctggctaagcctctacagtttccatgactctcttctgagccggaaacacctgcctcctccctacgtgcattcattcccacccccgaaacgggacaaactcctactcacatgctagtgcccttttgctcaccactgcctccagaagccttcccagcccctgtgaatgagttcttagtgcaatggtggccacagtcactgcaggatgcagctgtctccaggtgaaggctctgccctgcgggcagccctcatgtgtgtctcattcccctgtagccttaggcttgggacagaaagcttgagaccagtaaccagcgagcatttgttgaaagaaggagaaggggaaggagaaggagccacgaaaacagaacaaaacaaaacataattttagaaaacggagaagctggccggccgcggtggctcaccccttaatcccaacactttgggaggccaaggtgggtggatcacttaaggtcagcagttcaaaaccagcctggccaacatggcgaaaccccgtctttacataaaatacaaaaaaattagtcgagcgtggtggcaggcgtctgtggtgtcccagcaacttgggaggctgaggcaagagaattgcttgaacctgggaaatggattttgcagtgagttgagatcacaccgctgcactccagcctgggcaactgagtgagactctgtttaaaaaacaaaaaagaaaagggagaggccaagaaagagaaaacaaatgggtaacaggggtaggggaggagccggctcttctggccactgaggaacgtgccagaacagacagactgcacaccctgagcatcagagcaatactatttctctgtggtgagacccctggacagctcagtgccccagaggcagggtcctgggcacaggctggctttgctggcaggcccctctacagtttagccaacaaggcggggcagctgttgggggggatgggtggggggtcccaggtgggcatttagctgcccgcatagcacttcggcatcacctgccatccgtggatcccagattcctgtctctaagagccccaagagcctataggctctgtctaggccagtggttttcccgttgtgtccaaggagaagctcagaagttggcgtgtaggagacacttccttccttgaacccagcttggactagagcagctcaccagatccaatagaatacaaacattgacgtcaggcgtggtggctcatgcctgtaatcccagcactttgggaggctgaggtgggaggatcacaaggtcaagagtttgagaccagcctggccaacatggtgaaaccctgtctctactaaaaatacaaaaaatagccaggcgtggtggtgcacgcctgtaatcccagctactcgggaggctgagacaggagaatcacttgaacctggtcctgtggaggttgcagtgagttgagatcgtgccattgcactccagcctgggcgacggagtgagactctgttcaaaataaataaataaataaaaacttttttgagatagattacaggtgtgagccaccacgcccagcctcaaaataataatcataataataatacaaatgttgggcttgcctgaaaattttcatttaaatgacggttctggatcacttgagcccaggaatttgaggctgcagtgaattataatgtgatcacgccactgcactctagacagggcaacagagcaagaccctgtctctacaaaaaaaaaaaagtaaataaaatgggagttccatggctcaagtagtttaaagaacactggtctaacctcttccccttgtaaagactagaagacaaggcctagggacaaacaggtttcatcccaagtgcccagggaggacagggtgacagagctacctctagctcctggcccctcctgctggaccacacagccctctgttgaaagtataaacatatgacggaatgatcaggaatctgaaagtaggttttgttgggtaacagggaatagcaacaaaggacacttagtttctggggcaaagggtgggaagtagagaagaggaccaaagtgggaagcggggcgcagagtggctggagggggatttgtgggaggacaatcaccgtgcacttagttaattaatgatagctaggctgctgccaaagccattcaaaaccatgccgtaaatttcccagctttggacaaggcagcactaggtttatttttatttatttttacttacttttagaggtggggtctttctgcatttccccagctggagtgcagtagctattcacaggcacgatcctagccaactacagccttcaactccaggcctcaagctgtcctcctgcctcagtctgctgagtagcttggactacaggcgcgtgccactgtgcccagcagcactaggtttagaatcagaatctcagggttcaagtcccaactcctccatttatctactcactgcattgaacttggccaaatcaatgacctcttgagactcagtttcttcctcaataaaatgcggccaacaacacctctgtcccagaatggcgaggggtcaatgagagcacagagtcgaggctgaacaattcctggtgggttcaggattcttccttgcataggaacttggggaaggttcaaatcccagctctgtcccttactagatagatttgtgatttgaggcaagtttcttaacctctctgcctcagttttctcatctgcaaaatgaggataatagtagcatccacctccctcacaggatgtaatgagttgatacggattaaagcacttagaacagggctgcacgagggtttgttatcattatttggactctattaataactgcaaagattaggtcttgccaaggagagatggtagaaatggaataaaagagtgcacaagattggctgggcgcggtggctcacgcctataatcccagcactttgggaggccaaggcagacagatcgctttgagctcaggagttcgagaccagccagggcagcaagatccctgtctctacaaaaaaatacaaaaattagccagacatgtggtgcatacctgatgtcccagctactcaggaagctgaggctggaggatcacatgagaccaggaagcagaggttgcagtgagctgagatcgtgccactggactccagcctgggtgagggttagggatttaaaaaaaaaaatagaatgggttaatgaatgaatgtaagaaaaattagggttctaccaggaaccctaattacggatctaacttgacccgatcctaacccatcagtggcttccagtcattcctctgggctgggagcccaccctggctccctgtcgctgggcctctccctgcatttttctgcacacacgtagaggtaggctaccatttcgcccctagatgactttgggtgataaagaagtaacttcagcctccttgaattgaatcttctatccagaacatgtaacaaacctggaaattggaattgccctaaagctgattattctgggagggcacctcctggcattaaaactaaattagatcaaggtacctctgttattagcaaaataattccctatgattaccgaacacagccatgaatcctgatggcagatgaacttcaggtgacttacttgagacaaataactgtgcgaaaatcacaggctcatcgaatcacttctctatagcgttgcagttgggtaattatgctaatagttataagaaatcatcctttgtggtctaggattgggagggcttgagacggaaacgtaagtggcagatattacctgcttccagttggagagactgggtccaaaatgggccccttgcagggagctgcaagggagctggtttgtcccctgtctacaggggagaaacctgttatgcagcctgaattgcagtggcctggcaccttgggaggctgaggcaggcagattacttgagcccaggagttcgagaccagcttgggcaacacagcaagactcccttctttacaaaaaaataccaaaattagccaggcaaggtggtgtataccttcagtcccagctacttgggagtctgaggtgggaggatcgctttagcctgggaggtggaggctgtagtgagccatgattgtaccactgcactccagcctgggtgacaaagtaaaaaaaaaaaaaattgcagtgacctcattaagcatcccttttcagatcatcttaatacaggaaattgaatttgtccaagttccactgttgggcatggtaattccaagaagcaagttaaactgtaaaagctcaggacctctgagtcaatttgattcagcaaacatgactctgtgcccactgggtgccaggcagtgatctaggcacaggcagcgggggtgtcagcattcaagggtgtttctgatgctttcttaacagtctcttgtcccctcagtaacctgacgaaaaagacaatattgtgcccattttagagacaaggaaatgaaggctcggagaagcgaactggtgctactgctgataatcagtggagatgactacttccatccacccacagggaatgtagatctgggaggcttcctggaagagcggatttgggaaagtgcagtgtaggcagaggaaacagcttgaggaaaaaacccggaggcaggggattaaagtaggggttcaagaatggggttgaggccaggtgcagtggctcatgcctataaatcccagcactctgggaggctgaggcgggcagattgcttgagcccaggagttcaagaccagcctgaccaacatgatgaaatcctgactctactgaagagacaaaaattagccaggcgtagtggcacatgcctgtagttccagctacttgggaggctgaggtgagagaatcacctgagcctgggaggttgaggttgcagtgagccaagatctcattactgcactccagtctgagcaatcagagtgagatcctgtctcgaaaagaaaaaaaaaaaaaaaagaatagggttgagagggtagccgaaggtcaagaaacagagggcctcaaatgaccaattgagggtttggacaatggggagccaccagaggtggttgagtaaaggaggagtaagatggaacctgagaatgcctgggtgagagtgtgggagacccactggtagataaggctgcttacagggagggggccaaaaggggataaaaaatgggtagttttttcagtataagtgtgtcccaaatattgcataggatatacttacactaaaaaaaattcattgtttatatacaatttacatttacctggcatcttgtatttcatctggcaatcctacccccatctcctcacatcagtgcctagctgggttctctgcccatgatgactttcccttgtgggcacacagcctggtaaactcctatccatgcgttgaagccctgaactccttaccactgctgtggcaataattatcatgcactacggtgattactttcttaggtaattgttttactatctacccatccccttagcggcaaaccttacttctggctgcatagggaaaaaaaggtcaagaccgtgagtccttccatttcctgacctcctccccaccccaagttgcttccaacttctgcttctgtctcaagaagagccggcctctccatccctcctgtgaccttgcctgatcccttcagatcaggcacctcttgagatcagtacacctctctcactggcagccccaaaatcagacattctgctgggtcattcccaccagctgggcacctagcgagtgcttcccgtcctcctcatcccaactggggttccccaggagcaggctctgagaggtattcatgcataggagatccatcaagggctgctctctggctcaacacctgtggaagggaagggaagggaagggggaaaggggaagggtgaagggggaagggggaagggtgaagggggaagggaagggggaagggggaatggggaagagggaagggaagggaagggaagggaagggaaggaaagagaagggagcaggactgggcaggaggaggaactgagcttccatgcagtcagtgcaagcctcagcccaccctacacctggagctgggatgccccttcagagtcatcctgagctgtgccaaacttttatgaccctgggttggtcagtcactggatgtaggacaccccaggaaggaggtgtcacctctggggaggtggctgtcttcagcagaggcaacccccaagagctaagcactgagggactacttctagcagcctccccatacctaggggagtgagacctttactcctgaagaggagatccgggttgcacatcacaccccctaccccccaccaaacccaaggcattcccctccagcaaccatccaatctcttatcttccttctgacctaacccttcctgtcctcccttccctgcctcctactcactccccagatttttgtaaaactcaagagttggctctgtcccacccccggcgtgatatgatcggatctgtgctttgaaaacctgatagggagaactagtagacatggatccacatggagaggggccagtaaggtcgctcagtagccccctcaaggtctctcagtagctccctaaggccaagttgctgagcatggcatgtagggtccctcatggtgcagccctgcctcttctcctgccccctctcatggctgctcccctcacttgaggctccaataatacttgactgtaattccctgagcacgctggctgtttcatggtgccatgtttttttatgggctatttcctctttgcctggctaacttttctgtctcgcttccttaaagacacactcagaggtcatctccttggaagcctttcctggagccattcctgccccgctcccaaggctggtagcagagccgcatagctgcccacctgtgtctcagccattaccagcagtgctcagcagcatatgggagtgtcctgcttggggaccacctgatgacattgttacctgtctcttccccctgcatctgtgtctccagcacccagcccagagcctggcacaaaaggagccgaatgacattgacttaggcacgtggagaatccatggacagccgcctccccagaggtgacagctccttcctacactggtgctctacatccagtgactgaccaacccagggtcataaaagcttggcattgctcaggatgactctgaagggccatcccagctcccgatgtagggtaggctgaggcttgcactgactgcatggaagctcaattcctccttctgcccagtcctgctcccttcccttcccttcccttcccttcccttcccttcccttcccttcccttcccttcccttcccttcccttcctggggtatgagagaaactgcggaggtggaatcaaagcatctgagaatgattagactcagacagggatgtgtcccctcagaacaggtcttccctggaaacagctgttctcctgttcagtatcacctggtccttcctccatgcatagtgtctgacatcatctcattctctctgggtattgaattctcaatgcctcagaggcagaagtgaggtctgtgcatttccactacttatgctccgtgaccgtcatgccccacacgcacactagatcggagctgctttctccttctggcccctccttcccactcctcccctgtcattcatactatccctgctccagggtcttgtgggcctgggtcttcatcctatgatgcttcagtcactgcagttttgagtttcacttccatcatcaggtaaggacccaccaccccagcctatctgtgaaaagggtgttgtggttacaaaacccaggatctggaatcaaacagatggggcttgagaacaggctctgtcatctacatgctgtgtgatcttgtgcaagttgcttaaaatctgagcctcagtttcctcatctgtcaaaagggaatagatactagaaccttttcagaggcggtcgtaagaattaaatgagagagcatctggcaaagcactcaaacttgcattcatagcaacgggcagaaatgtagacatttctggcaacaaacagtatccaacaacaataaacagagcctattgatggaggtgggaaagcagacgtgccttcactcattcattcaacaaacattcattgagcacctactacatgcccttgctgagggtaggaggggatacaacaatgaagaaaaccaggcatgatccctgtgtttagggatgcccagcccgggagcatgacacatccatccagtgatcacacattgaagatgccatcaccaactgcaacggacaccataaaggaaagtgacttgagccatgggtgtgtcatgtgggaggccagggaagccttccctgaggaaatgacattaggcttccattgggagaagttaactgggccaaggaatggagaaaagtgttctgaagaggggaaactggtatgcaaaggctgtgtcgtgggaagaagcgttgtatatttgaggatctggaagttggctggagtggctggaggcagagagggatggggaagatggcaagaaatgaggctagggccaggcatggtagcttatgcctgtaatcccagcactttgagaggctaaggcgggtggatcacttgaggccaggagttcaataccagcctggccaacatagtgaaaccctgtctctaccaaaaatacaaaaattagttggttgcagtgatgcatgcctgtaattccagctactcaggaggctgaggcacaagaatcgcttgaagccaggaggtggaggttgcaatgagccgagatcgtgccactgcactccagccttgggcaacagagtgagactctgttctcctgccaagaaaaaagaaatgaggctggggagatgggtaggacctgaccacccaggatcttggaggccacatgatggcaacaagaaaccattgaagctttgaacagaagtgagggtgatatgattggatctgtgctttgaaaacctaatgaggagaactagtagatagggacccacatggagaggggccaggtggatgcatggaacaagttcagttcttagcgaagtccaggcaagagaccacagtgtctgcactgggctggagataaacatttgggaatcatctgcataaggacagtggttgaagccatggcctgggtgtagttcaagttgcctgtgcagagagtctagaaaaataagagggactcagacagtctcaaactccaagttttacagcccaggggagtcagatgaggtagccaaggaggagaagtgaccagagaactaggggacaaactgggagagtatggtaagatggaagggaacagaagtttctgtggggttaagtattgccaagagatcaggagagatggaggtggaaatgtatcctatggtgttaccaacaaggaggtcattggtgaccttcccgagagccattaggaaatactgcagatctggccaggcgccagtggctcacgcctataatcccagcactttgggaggccgaggtaggcagatcacttgagatcaggggtttgagaccagcatggccaacatggtgaaaccccatctctactgaatacaaaaattatctgggcatggtggtacgcacctgtaaccccagctacttgggaagctgaggcaggagaatcacttgaaccctggaggtggaggctgcagtgagccaagatagtgccactgcactccagcctaggtgacagagcaagactccatctcaaaaaaaaaaaagaaaaaagaaaaatggcagatcttaagctgggtcagcttcctgtctggctaggccgtttgcatgggacaaagtgccccagtggctaatgtccatgtcaccaggataatattacattgtccagagagatctgaaccaaagaagattggcacattagctcagaaaatctcattggaacccttgaagtacatgttgttcttttccagtgaccatatagccctgtcaactttatatatttgttagcttgtacaacatgtaacattagccaattcatcgtctagagtctgaaccataagcaatttgctatcctgtgtgttgccttgatggaagaactcgacaagtggacatacgtggattttgcagatatagtgcagacgatgcctttggcaaatcactccagacacatcccttggggaaggtgctgcaggctctgtcgcccctacagatggaagctgacaaggaaaagacgggtccagattggaatccctgggctacatgtgagaacagactggagggtgccagagcggatgggcagacagagaggagggtctttagttctacagtgttgtacagcgcctcactcagggggtggcacaaaggacaggaggaaagagccccagaagcactaacttcatgcatatttttgaccttctcatctcctgggccagcctccctgggtgtggttttgttcagaactggagaacgcgcctgaattttttaaataattgagacagggtcttgtctgctgcccaggctggagtgcaacggcatgatcatagcttagtgcagcatcaaactgctgggctcaagagatcatcctgcctcagccttccaagtagctgggaccacaggcatgctcaccactgtgcttggcttctcttggaattttgttgttgttgttgtatttcttgagacggagtctcactttgttgtccaggctagagtgcaatggcgtggacatgactcactatagccttgacctcctgggctcaagtgattttcccaactcagcctccctagaagctgggatcacagatgcatgctaccgtgctcggctaattgtcttttcaattttttgtagagatggggtcttgccatgttgcccaggctggtcttgaactcttgggctcaagcgatcctcctgtcctggcctcccaaagtgctgggattacagacatgagccactgtgctcagccccctggaatttttgatcagcctcccactttctttctttctttctttctttattagttttattttattttctttttcttttttttcttttttctttttttttcttttttttttttgtgacggagtctcactctgttgcccaggctggagtgcagtggcataatctcggctcactgcaacctccaccttccaggttcaagcgattctcctgcctcagcctcccgagtagctaggactacaggcatgcaccaccacacccaggtaatttttgtatatttattagagatggggtttcactattttgaccaggctggtcttaaactcctgacctcaggtgatctgcctgccttggcctcccaaagtgctgggtttacagacgtgagccaccatgcccagccctcccactttcatagtaacctgatcaagttctttccatcctcccctgtaaacaacttcctcttgaccatagtcatataattgctacctgtaccaagaaaggagccatgcattttgccactatgatctcattgaatctttataataacccttgtgataatctctagtcaatgttggctgtgtaaacccagcaacaggctcagagggatgtagtagcatgctctaggtcacacagctggcaagtgggtcagcttggatatgaatgcagcattttttttttttttttttggagatggagtcttgctctgtcgccgaggctggagggcaaatggtgcgatcttggctcactgcaaccttcacttcccaggttcaaggggttctcctgtctcagcctccctagtagctgggattacaggtgtgtgccaccatgcccacctaatttttgtattttagtagagatgaggtttcaccatgttgaccaggctggtctcgaactcctgacctcaggtgatctacccgcctcggcctcccaaagtgctgggattataggccccgagcactctttgactttgaagttcacattcccatcaagaacactcaatgaagaccaagcagtcagtccagcaggtggtggggttgctttttccttttgacagtttggaatgatcccttttggtttctgagtttttgggtcactcagtccttttcttcattcaataaaccttcctgaggccaggcctcttgcaggtggtggggctgcaaggtttgcgacctggaagagctcacagtctgctccaggacacagacccatagcaaggtgcaacaatctacaatatgataaatatagatggtggagtgggtgggttctgtgggaaccctctgctttccatgggctggaatgcctgagctggattataataggagaagtaggcactgactgggtagagatagggaggacagacattctaggaagagtaaacagtgtgtgcaaattcctggggcatgatagagcttggtggacttgggagacctggttgtatggtggtgcttgggcgggggcagtctcagctgactgggactagggtgtgaaggaccccagtgaagattgcagactgggctattcatgttcttaagatttactgagcacttcctcatgagccagtctttgtgctaggtatttcccagaaaggatgaccaggttattaaaatacggaaactgaagttcagagtaggactgggttttatgtggcctcccaccatgactctctgcaccttaaaaaaaaaaagtgatgaagaataaaacaaacactgtgtgtctcctatcctggtcaagaaataaaaccaagcatgagcatggtggcttatacctgtaatcccagcactttaggaggccgaagcaggaggatcgtttgggcccaggagtttgagaccagtgtgggcaacatagtgagaccttatctctacaacaaacaaacaaacaaacaaaaattagcccgccatggtggcgtgtgcctgtagtcctagctactcaggatgctgaggtgggagaatcccttgatcctgggaggttgaggctgcagtgagttatcattatgctactgcactccagcctggttgaaagagagaggtgctgtctcaaaaaaaaaaaaagaaaagaagaagaagaaagaaagaaagaaaaccttactaagatgtgtgaatgtgtgaagctccttcctattaaacatctccctctatccagaggtaaaaactttgcagaatggtgtatttatcattcctctgaatgtctttatacttttaccatatctgtgcattcctatggaatatatggtattctgttcggcatgtttaaagaatctatatgaaggctgggcatagcggctcatgccaccagtcacgtagtttgtggaattacaggaatagaacttgaagccagggtaggcacagtggctcacatctgtaatcccaacactttgtttgggaggctggggcgggaggatcgcttgagtccaggagtttgagaccagcctggccaacatagagagacccctctctctacaaataaaaatattaggccaggcgcggtggctcatgcctgtaatcccagcactttaggaggccgaggcaggtggatcacctgaggcggggagttcgagaccagtctgaccaacatggagaaaccctgtctctattaaaaaatacaaaataatacaaaattagctgggcatggtggcgcatgcctgtaatctcagctactcgggagactgagacaggagaatctcttgaacccaggagacagaggttgcggtgaactgagatcgtgccattgcactccagcctgggcaataagagtgaaactccatctcaaaaaaataaaaaacaaacaaacaaacaaaaaactagctgcatgtggtgccactgcacctgtggtcccagctactcagaaggctgtggtggtagtattacctgagcacaggagttcgaggccgcagtgagctatgatagcgccactgcactccatcctgggtgacagagcaagcctctgtctcaaaacaaaacaaaactatatgaatgatattatagaaatttgatgttctgcaacatgttctccctccccttatttgagatttgagattcataatgaatttctaatcatttatttttgctgcagtatagaattttgctgactaccccacaatttgtttatgcattcttcctctgatagggatggaggctgtttcaaattccttactagtattatcattattgcaatgagcaagaggttctctatgtcaagactctgggtcactggggtatgtgcacttcgacatttctagatgctgccaaattgtttcccagagtggctctacccatttccactcctgcctgcagcacaggacagttctccagactccaggtccctactgtcccacttctttgtttttgcaccaatctgacaggcatgaagtggcactttactgggattttgttttatatttctctgattactagtgagactgaccatctttgcatatgtttattggccattcatgtttctttttctgtgaattgcctgttcatatattttgcccaatctcctattgcctctttagcacattggtttgtggaaggcctttgtatattttggatattatattgtaaatatcatcttttgataaacagaagttttgaattttaattaaatgtattgatgtttttcttgatgatttatgcttttgaggtcttctttaagacatccttgactattatgagttttttttgtgtgtgtaagttttcagtacacctggaactgatcttttatgcatggtgtgaggtagggattcagctcatcttttactaatatggacattctattgctctagcaccatttatagaaaagtccacccttctcccactgacctgcagggccatctctgctacatatcaagtttccatacctgtatgggtcaatttttgcagcctctattctagtccactggccaatttatctacccttgggctaataccagatgctgtgattgtacattttggggtccttagcacctcctctctcgaattagaggagtgctagtgacttcctgagagtagaaacttgtgttcacctttgcagctctctcatcacgttttacatgaacatctacataatgcttttgtttacaaaaggatttcttgcatactatctcttggagttctaaaactccctttttgcagaagataaaactgaggcagaaggtaaaactgagaagataaaacagaggtaagatgatttgccaaggtcgcacagccagaaagtgttggattaggggttctataagatttcaaagccaccctgtgcatccatcgcatatgctccgaagacttccactgaccctggtatcggatttcactccttcctgccttcattcaacaagtagctcctgagtgatgaccgtgccagcttctggtgggtgctggggctgagaccccatttctgggaggctcttcccagtgctggagaccggtgggaagggtgagacagtagatggacattttatgggacatcgtctgcggcttggcatcagcatcaagtcgcgccaggtttcagagccaatttaaagagccccatttttggcgtgcagttgggcccaggcgctgtcttcagagaggacgctggcttccccctggaattacaggcgtcctcccgccctcccgcctcgagaggcaggaatgcgaaggatcagctttcagcagagctccggctgccgttcggggagttcaccgtgcaggcccgtccccagcggccgaattaactggttctgtctgtacgactgggagagcagctctcgctaaaaatagcgccctgcccagctcgacctgcgagccgccgttggattctgagccgggacggctcaaggagccgggagccctgcacacccctcaccccgggcctggcccgggaccgaccacggaggcggaggccgcgggcaccgcgctggccccacaggtgccgcggagggtggcaggcccgctggccgaggcactgccgaggccgtccgagatgggagctggcggtgcctccttccgcgccctcgcctgggcctccctgcccctgctggggcctccagcctgcgcgctctgcgaggacacgctctgctgcggaggtaaggccgtgcgcctccaggcgcgccctcgccctacgcgggcacttgcccggggcctgtttctcctccttggccccagatccgcgactggcggcaaggtgaggacgaacacaggcatccgcgtagggctgggaaaaggaggcaggagctctcagcaaacccacctttagctggaaaacgtcgctgtcccgccaccacggtccgaaaagcgttcgccccgctctggcctcagtgtgcctatctgggaaatgggtcaataagatagtcacgctttaatattcagtcacgcttgctgaagcgggtcgcagacgttcgcgggacgttccctccagccagctggagtcctcgggagtttctgttggtgggagtgctggggtgccttccctgtgacaccccgcactgtccccttcccaagctctagttccccccattagtccccggctcctgaggttggagatccacgcagggcgcacataaaagtttaaggggtcagcggatgcgggaagattctagcgggaaggggagctgtagggtggaagagggataagtaaagcaaagtcgcggcccactcctcggtcccgtaccctcatagcgccgaaacggaagcagaggttatctctggactcctggaggcctggggactccgggaggggagggggcgtgtggtcccgccggcatctcgggccggcaccaggctggggagcgtgtgctcggagcggagggcctcggctctgcccagtccggcctgggcggggcggtggtggggaggtcgattgaccaaacaggtgcgcccccgcccctctgctccccgcccgcgctgggtcccgggcctggcgggcggagctgtgggcggctgggcctgcgattggcagggctgggcaggccgggtggccgcgggagcccgggagccgtagagcggcggcgccgggggaggcgcggagccggccgtagcgcgctcctgcctggccagccgcctactccgcccgccccgctccactcggcccagctggcgcgaaggaaactttcctgcagccgcccggcgacaccgcgactccgccgcttcgcaaccctggccctgggccgctcaggctccggagcctttgggatggcagcgcccagcggcccggcccgcgcgtagaggtaaaagctgggggccgcggctcaggtggaggggggctcggtggtttgccgggatccgagcggcatcccgggttcgagaggatccgggggctccgatgcgaggtgttggggtaggggactgaggaatgggcggcgactttgctttatttaccccgcttttcccctacagtcccctctcccgcaaggaaatctgcgcgatgcattgagcctttaaactttcctgtgcgccctgcccagatctcgaccgccgggacccagggctggcgctgggttcttgggagagtacaatacaggggatcgcgaggaaggcgcccccagctggggcccgcgggcggcgggagttgggggtggggggtgccagcctaccgatccccaaggcttccagcggtctcccaaacttcagaccttcctcagctcaccctgggaattggtgatagggcagccaaccaaacctctttatccagagccaggcaccccctggggcacccaagttttgggtgtttttgttcaatcctggccaatcctaaattatcagggaggcgattggcagggctgggtcgttgaagtgaggtctcttttccgtttcctgggctgctctggaccccaccttccgtgaaaacaccttgggctaagcagagtgggaacagggaccaacgccacctgcttccagtgctcagcctggtgggaatgactgcagggtgttctggtctcaggatggtccactcttgagctatctggtgtgagccatatggaaactcctctccctctggccccttctgctattaaggagggaaattttaccttaattttgattgtgagtgggtgagtaggtagcttgtcaccaataaggaccaatctttaacattagtcctccttaatgttaactcctttccgtgttttactgacccaggacagaatacctaagagtaaaaaaatggaaccaaacacctagctctggagcccagggaatctgggttccaacatcagcccctgctgctcactagctgtgtatctgtgggcaggtttcctaacctctcagagctcaagggtcccgtccaagggggatatagggaggttttttcgaggtgaggcgtagaaggcgcctggctcgtaggacagccatcttaagcagccgatctataccctggagcctgtgccctcttgctgtctgagagagccagcatccttgtgcctcagtttcctctcccccagaaagttggtaaggaccagcccctcttaatcagcccttttgagaaaagtgcacagatgcacacacccacaatttcagtgggtttgtaggctcaggtttaaacagcctcacacattcttatccctgcaatgaactattcagaatgtacaaggcttctgtctatcttgatctttccccctttccccaccccttttagacacctggaggtaactattgtaaatggcaaggaagagcaaatgaactaaataaccagcatgatggggaaaagggctgacctgcagaacctggcccaaagtcaccttcaagatcacctggccctcctatccccgcattcttccttccctggtgctgtgtccccacttggtgaacatctagtcttttttgctaggatcctctagtgacggtgagttcactagacagttggtttcatgattgggaaactcttggtttcatgattgagcaacattcttcctgtttgggacagaaatctttgtctctatgacttctatccactggttctggaacaacccttggggcatttcttactgtctcaattattcactgtggtcccctggtgcctggcattctgttccgtcccttcagcattcaacacacaggcactgaggttggtaatgatcatagcactatttattgagtgtttattatatgccagaccctgccctgaggactttacacatattattttcttgcacccataaaacaaacccatgaggttgattattttcttatccttattttgcatataagaaacaggtttagagaggttaagggacttacccaagatcctacaactggtaaggggctggctgggctgtgcaccaaactcagcatctgtatctgtctttagagcacatgcttcgcttttgatccttgcttgcatacatgcctttgtgtgtgtgtgtgtgtgtgcgcgtgcgtgtgtgctcctgggactggtgtgtgccagcaatgcttttatcacaagcacctagagcacctgttaaaatgcagatccctcatctctactccaggcctgggatctccactttaaaccacccgccactcccactcccccccaacccaggccattttcctgcaggtcacagttcgaggaccatagcactaaggtactcttaggaagagaacgtggaatatagttttcaacagatctgaatttagtcttggcttcactctctggagctggttactcttcctttctagggctttctcccaacttaagatgggtatgctgttccacccactggtgggtggaatggagcaggcccttggctgacgggagccctggtgaagtttctcctgccacaagtggatgtacttgcgggcagacctgtggcacccccaagatcactggcctctgctttctaggattggtgtgccttagacgaggccctcgtgctcaggttattatattttggagacagggtctcactctgtcatccaggctggagtgtagtggtactatcatagctcactaaggcctcaaactcctgtgctccagtgatcctcccacctcagcctctttagtaactgcgactacaggcacatgccaccatgctcagccaatttttaaatttgttttgttttgttttgttttttgagatggagtctccctctgtcacccaggctggagtgcagtggcgtgatctcggctcactgcaagctccacctcctgggttcacgccattctcctgcctcagcctcccaagtagctgggactacaggcgcccgccaccacgcccggctaattttttgtatttttagtggagacagggtttcactgtgttagccaggatggccttgatctcctgacctcgtgatccgcccacctcggcctcccaaagtactgggattacaggcgtgagccaccgcgcctggccaattttttaatttttagtagagatgaagtcttgctatgttgctcaggatggtcttgatctcctaagttcctgatgctcctgcctcagcctcccaaagtgctgggattgtaggcatgagccactgtacccagcctctgctcagttttttcacccagagtggtgaggaccctggaggggttggcagaaacctctccctcccctcaacaccttcttcctccatcctcctactgtggcctctggccctcccagccagaaggtgctgggcctgcatctcgcggggagaggagcggggtggttctgttgtgcgtctatctatgttttcaatctccatcccttcccttggaagaccgctctgtgggccattgggcagctttggggaaatgtctggcccgaggctgcctggcctgggctgactcactaggagagatacagggtggaggaatcgcctgcatagaccccagctgtatcacaattctggcctaccagctgtgctgcagacagggtgcttgttctgccttggacctatttgatcctgctgaaagcacaaattattaaacacccattttatgaaagaggtcactggagtccaggaaactgcagtgacgtgtccaaagccctaatgtgtgtatgtgggcaggggagggagcggtgataagagtcaggacctaaatccaggtgccttgacaataaggcactctggccttttttgcagtcttgttcatgcctcactatttttctgccctatctggttgtggctttggtgccagagccctcacctggaagcttgaagacctgggccacgatcaggctgtgtgatcttgggcagggctggtcatctcttaaaacgttaggtttcttttctgtaaaggggctgaaggtggggctttttgtccagatctctgaggttctttcccaccttgacatttacaagttgggctctgtctgcatttcctgtctgggtttctagggagaggtattcatgatgggctcagggcatgggtgaggggttgagttgggctggagggcagagtgctccatgggaattactatgaaaggggccagaaaggctcttatgggaatggtggccagtggggccaggacacctgggggcagtccagagggggacaggtagtggaggaagcccagggaagggggaggtcacttaccttagaattacacagtgttttgcaccctgatccttgcaagaaggtgatggtgggaatgactgggggtcaagggcaggagccaagggggagcgtgggggcactagggccaaccccactgcaggccctctcagccctgggtagtcttgaccaggagacaagggggacatgtaagagccttgtctcccttccaagccatcacatgtctctcctctgggcttcctcagcctttcctgaatctgacctgaacggttctaacctctccctggggcgagcagctggctgagggggtccagctgcctgtttcccatcccaggtgggcctccagcaacccagcttcctacagtagcccttagtaaccacagcctctgctggccacttactgtcatgtgagtgacttcctgttaaccacgagatcaaagccaagctccctggcctggcaaacacggccccatgtctggctccagttttcctccctgcctcttctttctctgctcttcaggttttatgttgcctggacttggcctgtgacttccagaatgcccttttctctctgccactgcttactgcccaaattcttcctgcccctctgggtgtagcaccaatttcacctccatttgttctcattgcccccctaagggtgagccgttcctccgggcttgtagctctttcttactaactgccctgctttgcctgtcgttgtccgctgcctgtcccccgtgatgggctctgggctttagaaattgctctagtgaatgccctagtgaatgcttggaaagctttgtagagttggactagctttgaatcaggcatgatttttccactcctgctccaactgccgtgcctgcacccccctcctcaacagagtcaagtggagagcctcgcagtctgctctgggcagggctggctctagcaagggacagaagagagatgcctttggtttgcagagaacttctctgcctcatttggatttttgttttgttttgttttgtttttaattgagacacggtctccttctgtcgcccaggctggagtgcagtggcgcgatcttgactcactgcaacctccgccttccaggctcaaatgatcctcccacctcagcctcccaagtagttgggactacaggtgctcgccaccatgcccagctaatttttgtatttttttgtagagacagggtttccccatgtttcccaagctggtctcgaactcctgagctcaagtgatccacccgcctcaggctcccaaagtgttgattacaggcatgagccaccatgcccggtcccatcatttggattgttcttgatctgcttcttaaaaaaaactttattctggctgtgtggcatcaagggggaccggcctaaaagcaggttagggaaagccacctgtcagtgtcagtccccacctgcaggctgaatttcaggtctcaaatgagaatagccaaattcacctgcttctttagaattattgttggttttttttgagacagggtctcactctgtcactcatgctggagtgcagtggcatgatcttggctgactgcaacctccacctcctgggctcaagtgatcctcccaccttagcctccctagagtatctgggactacaggcgcttgccgtcatgcctggctaatttaaaaatttttcttcttgtagagatgaggtctcactatattgcgcaggctggtcttgaactcctaggctcaagcaatcctcccaccttggcctcccaaagtgctggggttgtatgcatgagccaccgcacctggcttctttagcattttcttaagagtgtttaaaaagtacttgtgaagggcctgtgggggttattgggattgtgtcgggggcccacagacatggtccccacagacatgaacatcgaggagtcacataactgttctggggttgcacagttatttgtggccagaaagtccacagaaacatctgtccctgagttcagagagggctgttgagtctcagaggccaaaagggaaagaaaaaaatgaggaccaaaaatatatactaaggttgggtgtgctggctcacgcctgtgatcccagcagtttgggaagccaaggcgggggatcacctgaggtcaggagttcaagaccagcctggtcaacatggtgaaaccccgtctgtaataaaaatacaaaaagaaaaaaaaataaagaaagaaattagccaggtgtggtggtgcatgcctgtaatcccagctactcaggaggctgaggcaggagaattgcttgaacccaagaggtggaggttgcagtgacctgagatggcaccactgcactccagcctgggtgacagagtgagattctgtctcaataataataataataataatgtatgctacagcacaaagcatttatatcacactttctggtgtgcaaggtgctttctgcagagggtcccctcccagtccccctgtgactttctgctgaggaaaccaaggctctgagaaacacagctcagctcccatggctggaaggatgcagctcaggacttccctgactcccctcactccaggtccagtgctcacgggcagggctcagagtggctgttggaaggaggctctccttattgacggctcccaattcagagtgaggatttttttttctttgacattcttgtgttgggatcattttccctgttaccatcattggatgagtgtgaactcaggcagtggggggtgagggaggtgggaccagggagaatggcagcgttctttgttttttgtttttttttttttcttgagatggagtctcgctctgttgcccaggctggagtgcagtagcgtgatctcagctcactgcaacctctgcctcctgggttcatgcagttctcctgtctcagcctcccgagtagttgggactacaggtgcatgccaccatgcctggctaattttcatatttttagtagagacagggtttcaccatattggtcaggctggtctcaaactcctgaccttaagtgatccacccacctgggcctcccaaagtgctgggattataggcatgagccaccatgcctggccggcagtgttcttatgaacgtagagaacacctgcgcagatgggtcaggtgaccaggtcagagatctctgtcctgaagtaggaagccccctgtccttgtaggtgacagtggctgatacctagtaaagactcatcttggagtgaggtctgatggatgctagggtactggagggagaggagagagattgatgatggtctggttttatgttcacatactcctatcattcctttgggtttttcttatttttttgagatggtgtcttgctctgttacccaggctggagtgcagtgccacaatcatggctcactgtagcttgaactcctgggctcaagcaatcctcccatctgagcctccaaagtagctgggactgcaggcaagcaccaccatgcccagctaatttttttattttttgtagagatggggtcttgctgtgttgtccaggctggcgaactcctggcctcaagcaatcctcccacttaagcaatcttcccactttggcctcccaaagtgctgagattacagacatgagtcaccaccccatcgttcctttgttgcttcctgtcctacttactattgccttatcagtttatctgtctctgcccctgcccctgtccttagacagaggcatcctagcacaggtgcctcatggttttcccctctgggtgaccctggagcaagaccaacctcttaagaggggaggggagggaatgtgaataagtaaataaataagcagatgaatgagggactcttctcagcatctttggtgaccctgtctgactatcactggctgtagaatgtgtgacaactgagtctaccaggcaacggctgtttgccgggagcagcaggacccagccagaagacataatggaagcaggccctggccagagcagggacctcagagcctttcccggcagagggaacgcaatcaaagctggcgctgcttccgggaggagagaattcccaaaaggctctgtcagcccctctgatagggatctgcagggtgtgtgagagatttgtttttcagccaggatgtggggagttaaaaatagacaccctaatcccttgagttcgtgtcacacttgacgctgtgcagagccctatggctccattatctcacttgagtggctcggcagcctttgacgtggggagaggttgcactgcccgctttataaatgagcgtgtggaggtgcgtgcccaatttcttacttgagactgtaccccaaattcagtggcagaacctgtctgatcctcagcccctgaggtctgtgttttatattcttaggagaagccagatgagagtcaacaggctccaggagggaagcgggttggtggaaacaataggggtagatttttaagcaaagcagcaaggatggcagggagactgagaatgaattgaggtcccagggagcaaaggctcatgatgggcttggggagcagccgaggactgtaactggttggagcaggagttgggggggtaaggtagtgatgggaataaagcagaaaagtaccatcaggaccccaaatcgaggacctagaatgctatgataaggatagtgaacataaagctgtaggcaatagggagccattgaggattacagagcacagtagcttcctgctgtaacaaccatgcattgcaatgatgtgctaactggctttgctgtaggtattactttatggtgtttgacagaatatatattttttaaaccctcagaagacacctgtccatcctgacctctccttatggaaccttgcatcgtgctagggggagcaccccgttttctgctgcctcttggtttggggaggagccccctctggggcaaagtctgtaactaggtttctcggctttttctagtttttgtttgtttgtttgtttgtttgtttgtttttgagacagcgtctcgctctgtcgcccaggctagagtgcagtggcgcaatctcggctcactgcaacctctgcatcccaggttcaagcgattctcctgcctcagcctccctggtagctgggactacaggtgtgtgccatcacggccagctatttttttgtgtgtttttagtagagacggggttttgccatgttggccgggctggtcttgaactcccgacctcaggtgctccgtccgcctcgaactcccaaagtgctgtgattacaggtgtgaggcactgcgcccagccttctagtttttaatctaggtgctcctggttgtccatctgtctgtcttccccatggtgggaggaattaagtgacagggaggaggtagtggctgaagttctagcccgacctgactcattgaaacttttacaggctgtctagtgcatctgacaccctgccactgacaagctcccagaccaccaggatcagttttctccacttctcacttccatccctcccgctttgggacccccattcggctcccaacttctccaggcatcctgcactgattgttccagcaacactgaccttttctgtacattttagtgcccatggccctctaacttgtatgtttattaactctttgctccttccctagctaggccaaggcccctggtgggcaggacaggagctaagcaagatgtaagctggacagaccattggaaatcttctggtgcgatctatccattttagaattagggggatagaggcctgggtttgcctaaaacttcatgacaagttcctggcagagctgggattcaaacctggatctccagggctatcttggtccttggctgcaacatcacccacttctcagagccaccctgcttctcagctccaagagccaagaattcccagctctgcaagaatcccagttttgcagccttggctcctcctggggctgggagccagcaacgccaagcctgcaggttcccagagagggctcctggcgtcggtgtggcttagtcacagggatgagatcactactcacctctggataggggaggatgccaaggtttgggaactttcactctgagctacttgattttgtgtatgtgtgtgtgtgtgtgtgtgtgtataagaaaaacaaaccttttggttgggactttgtacttggctcatgaactgtgggcttggggaagctgctgagccatgataagcacttgtactgtgccatctcacagcttcccaggatagtggctctgtgttaggaaggagcttggaccagagccagaacctggtgttagcatttgctctgcctcacattggctgtgtgaccctgagtacggtgcatggcctctctgggctgtaatgataatacctagcagctcacactttctgagtacttcccatggaccagccactcggctcatcagcccatttagttctcacaatagacctgtgagatcctgttttcacctctgttttgcagatgaggaaactgagtcccagagaggaggagtgacttgcctaaggtcacccagctgggaagggcagagccagggttggaatgcaggtcttcccaactccaaagcctctcgtgtcaggcactctgctgccctgccctctagctgcagggctacctcctaagggattgtggaagtgtaagtatggagaaaccaggtgtaattcagcacgtgaggggtgggaaggtgatggatgaagggtctttttctacgctgatatcgttctccatctccccactgtccttgagtagtgctgtccttgaatagtcagaggggggcgcagaggagagcaggtacagcggtatgcaggctccatgagaggaagggcgtatttgaagatggtttcacggaccgccagtcctgggcccatctctttccaccccctgtaggtcactggctttgtgaatgttgattgtaattcctttcccatcctcccctagaaggtatcttcaaggcaggggctcgctaagggatttccttttgagtggagtgaccataagatttgtttgtttgtttgtttgtttttgagacagagtctcactccatcacccatgctggagtgagtggtgcaatcttggctcactgcaacctctgcttcctgggttcaagcaattctcctgcctgagccccctgagtagctgggattacaggtgcctgccaccacgcccggctaattgtaatttttagtagaaactagattttgccatgttggccaggctggtctcgaactcctgacttcaagtgatctggctgcctcagcctcccaaagtgttgggattacaggcatgagctgccatgcctggccttgaccataggttttgattcagatttggaacagaaatctgttgatggccactgaatcctgggcttggagtaggagctaggggaagcaccaagtaactcgttcccaccccaaggaagctgagtacagcagacaggctaagggtgtgtgtgtggtctaaggtccatcagacagacctggctttgggttctggctgctctacctaccagctgtttgaccttggacaaagttatcttatttctctgatcctcagtattcttaactataaattgcggataataatacctattttttagggctgttattatattattattattttttaattttttgagacagggtctcactttgttgcccaggctggagtgcagtggtgtgatttcggctcactgcaacctctgcctcctgggttcaagtgattctcctgcctcaacctcctgagtagctaggattataggtgtgtgccaccacagtcagctaatttttgtatttttagtagagacagggtttcaccatgtttgccagggtggtctcaaactcctggcctcaagtgatccacctgcctcggcctcccaaagtgctgggattacaggcatgagccactgtgcccagcctagattaaaattatacgtgcaaagaaagaacacagtacagtgtctgcacatcataaacatttaataaatgctgcagttttgttattacttattatttgcattattattactgatggtcttcttaatgcactttatagcagtcttgggatcctctggccatacccctttccagaacttactgcctttggtgaaggtagttctgggtaggggaagatctgaattaaagagtcaatctaccagcctgggaaacatagcaaaaccctgtctctacaaaaaaaaaaaaattacctggggctggtggtgtgtgcctgtagtcccagctactctggaggctgaggtgggaggatcgcttaagtccgggaggaggttgaggctgcagcgagccggagccgtgatcgtaccactgcactcccactttggtagcagagtgagaccctgcctcaaaaaaaaattattatttttaatgtgaatgatttttctcttggagatacacagggtctcaaattggccaaaaaaggtgtctgaacatgggtttttaagggagctgctttgatgaatagagaaaggggataatagagaaaaagatttctttaaggtgcttgaaatttatcttttgcatggtatccacagtccccgtgagcttgtttctgctgtgtaagtcaccggggtgagtgtctgttgaagcaggcatgcggggtaaaggtggggcagggcggaactccaacaagtctcagctgctgctcctccctctctcccttccgagaaccgccagggtcctccttagagagagagcctgctcagcctttggggaagccacaaattggtgaagttgctgtagacagcagtgtgtgtgtgtttgtgtgttgtgtgtacgtgttggtggggggaggtaagaggtcaagtgggtttcccagaggaagaaaggctagagccaggcccaggaggacaactgctcaggtttctgcaaacaggattgcaaaatcacttttcccgagcttacccagttctccatcggagtcttgcagccaggtcagctgggagcccccaagcttggcagttaggacacttggggaggtgtggggaggggggatgtcaaatcctgcctcagtttccccatttgtcctggctattcctagagccccatttatctaggctatgctttcggacaggaaacagagggatgtggaaggagaagatgcaggtttgggataagagttgagtctgtcacttcccactgtgtgccctcaggcaggtccttctgcagctgcctgggctcctcagtgttttgaggcttcggtgaggtaatgtgtgtaaagtgcttagcacagagctggcatgaagtagtgtctgtaattataaaccaccttggccactgttgtttttagcttgggacccaccttaccccgacctgactgcccttgcctcttgccttccctggagttcctgtttgttgttgacatcctcctcaccaactagtgcagggatttttaaagtatttatatccttgctggaatttctctttgcattgtttagttaattaccaaattgaattgcggcaaataatttcacttcctttccagtgctagggcaggaagtggcccggtgccttttttttactgtgattgagatgattattgagatatttgatgatgatgatgtctccttcccctgagaggttcgcttcctcttagatcagctccactggccccataaatcaaggcagcagccacgtgcttggaacataaatcttgtcgaggatgttgatgtgtttggccacatgtggtttttggtgtttgggcaacttctcgcaaactcgcggagggatagttgaaaaggctccctttaaatacagaacaaatgacctgtgcacttattggagaagtgctgggatagttgaaaagactccttttaaatattcagaacaaatgacctatgcacttgttggagaaattctgtccaatggcatacaaattaaaaatcaaggcacagggagaagtcttcagatggcaagaaatcagtggctcttctccgcagcttgatagtgttgatggtgttggcttctgccctgtccctcatggctctagggtggagaagcagattggataaagacatggggttgaaactgatgtgctggggggcttcagatccctgccctgccacttagtagctgcaggaattaactgcggccacttaattttcctgggttctaaaacaaaggatacaagataaccggcttcataggtctatgttgtaatagttttgcttcacacaatgcctggcacatggtaagcactggtaagtaagccattacttttaactcagggatcctcatcgtgttctttacccaaagacccttcccatcctacctttctagccttgacctccttcttgcaagatgataaccaggacctaatgtgtccaggactctcccacctttgcacttctttcttttctttttttttttttttttttttgagagggagtctcgctctgttgccgaggctggagtgcaatggcatggtttcggctcactgcaacctctgcctcctaggttcaagtgattctcctgcctcagcctcccaagtagctgggattacaggcatgtgccaccatgcctggctaatttttgtattttcagtagagacggggtttcactatgttggccatgctggtctcaaactcctgatctcatgatccacctgcctcagcctcccaaagtgctgggattacaggcgtgagccactgcgcccggccccacctctgcaattctgttgtgcggtttctactatttggaacatcccctatttggtctctgcccatagaatcctttctttttctttctttctttctttcttttttttttttttgagatggagtcttgctctattgtccaggctggagtgcagtgttgcgatcttggctcacagcaacctctgcctcccaggttcaagcgattctcctgcctcagccttctgagtagctgggactataggggtgcaccaccgcgttcggctactttttgtatttttagtagagacagggtttcgtcctgttggccaggctggtcttgaactcctgacctcaggtgatccacgagcctcggcctcccaaagtgctggtattacaggtgtgagccaccgtgctgggcctcttttcctttcagaagttatctcaagcactgtgccctccatgaaatttcctatggcccctcaaccttaactgccttagtgtatccttgttacgccttatgtctgcaatagttgtcggcccaagtatgttccatggaatggtaacctggtaagatgctttgtagaaaagaaggttaagaaaaggctgctgaatactttatgtacctgttttgtatagtaccaatccatatgaacaattttaaaggttctgagaaatcctgcagtaaagaaacctgctgagatttgtttactccagaactttccaaacctctgactgtagaacactttcttcttggaatgcctattgataagctttgcgacactcctggagaggtggcgttgtagacatctatataacagtttgatgctatctcctcttataatgaaggaaaccaaagcccagagaactcagtgactagcctcaggtaaatcccagtgtctaccactccatcacctcttgggtcaattggcaggtcctttataatgagtgtccaaggctgggtggcaaggaagggctggacatggtagccaaggacctgctttcaaataactttctttctttttttttttttttgagacagtctcactttgttgcccaggccagagtgcagtggcacaatctcagctcactgcaaccttggcctccctggttcaagcgattctcctgcctcagcctcccgagtagctgggattacaggtgcgcaccaccatgcccggctaattttatatttttagtagagacagggcctcaccatattgaccaggctggtctcgaactcctggtctcaagtgatccacctcccttggcctcccaaagtgctgggattacaggtgtgagccactgtgcccggcctcaaagatcttttggccttgtcgaggtggcgagatggacatatggaatagagacagattaactgctaatcttgtgtccctgggcccatgtgtaacaggagccttgggaccctgttgtgtccctgcccaagaagggacatgagagtcaaatgtcctttgagaacccagccctgtccctgggcctgggaccccaaaattcgaccccaccttcctcccaccctgatccctggggattcctgtggccctatgtggttgcctcctgcaggatgcaggcgagggaggggcgggaaggctgcagggaagagaagagccttctgtttattgaggcacagccttctcctgcctttctgggggaaaatgctctcttttagagtcctcttttttatctgaaattctctggggagcaattacctgacagtgggaattatctgctgtctttattctagtgcctgtctgcctgagttccttcttggagtaattgattttggtaattcagagcttctgaacgtttcttaggggaaggtgtgggtgcagaggcagggggatacccacataggcgtttttaaaggcgttggcggctagcggctctgctggtggtagttggtgacagggatggaacagtgactaaaaagaatgtattttttagctttgaatttttccccacttatacggaaggtgtgtgggttgcatgggagcgctcctgactgtggaactggggcgggtttgctgaagggaagtaaggagttgaaaggcaaattgtcaggtctgatgggcttgatcactcttcgccacaggcaggtcagtcctgagtaccggccctggcccgaccctggccctcaccatcaacctttggtctgccagggagcctgggaggtggcagaaactccttggagagcctttaaagagagcagcggctcccagttggcttgacctttctgctgggcagaccgaggtactggctccagaccctgctgccccaggcactgctgtcccctgggagaagagggctggccagggcacctggcttaatagggggacagagaaggtcatgaagggtggacctcagggtgaggggcctgggtgactggagaggtttatctgttccgtgaataaaaagggagtagggtggccaggcacgctggctcatgcctgtaatcccagcactctgggaggccgaggtgagcagatcacctgaggtcaggaggtcgagaccagcctggtgaaaccctatctctactaaaagtacaaaaattagccaggcatggtggcacgcgcctgtaatcccagctactcaggaagctgaggtgggagaatgcttgaacccaggaggtggaggttgcagtgagccgagattgggccactgcactccagcctgagcaacagagcaagactctgtctcaaaaacaaaacaaaacaaaagggtgaggggagtagcgagtaaatttgctcctagaaatgctcccctagctaattccccaatttcaaatgagtgaatactctggatatgggaggaagagcttggactagaagcttcctcaggctctctcatctcaagcgttctgtgggagggacagcccaatacagcggtttccgtggagtctctcttctctgcacctcacccaagggaaaggaacctgtggggcactggtttgggtccagccccagaggcagcctgtcctttgtcatagtgaccaccctccccgctgaggtctggacactgcagctccattccatggccttcggcctggtgttacttggcattttcattcctattttacagatgaggaaatcgaggcccagggtgattggttcacaccatgagttaacagtggggcaaggcctcatacccagtctcctgatagctggtccaggattcctgtgagcctgaatggggggtcaggagctcatcagatgcccagtggaagagcggggtgcgtactcacgtgggaggggagccggtttctctggttccattgtagctcttagctggattttcaactccatggctggttacttgagtctatgtttaatcacctgctagactgagaagcccctaaaggacagggaccttttgtcacattgggatcaccttttgtggccagctcagtgcttgcatgaggtcagccagggcgctttaggtacaagacagaaggcccccctcaagctggccagagtgaaagggattttatgggctcacctacctaaaaacccaaggaggcccaaatggattacgatgggattatctgtctgtctgtctctctcttcccatttccccccagttctgggttcagtttctccactgagctgggaatggggaaaggggagtccccaagggaaatgagggtgctggccccagaagaaggagggagcagacacaggcaaaaacaacaaaagcctcataaacatacaatgtgcatgtcatgaatggtaaattcaatggatttttttttttttgaggcagagtctcactctgttgtccaggctggagtgcagtggcacaacctcggctgactgcaacctcagcctcccaggtttaagcggttctcctgcctcagcctcctgagtagctgggactacaggcgcccaccacaatgcctagctaatttttgtatttttggtagagagagggtttcgccatgttggccaggctagtctcgaactcctgacctcaggtgagcctcccaaagtgctaggattacaggcatgagtcattgtgtccggccaaattcaatggatttttgtagaaacattttttttttctcccaaaaggaattcacgctgtaggcgtgacatccaggtgcacatcagctcctataactaaacagagcaagccctgtgcattgagaaagattctgaaaccacctcttggctcagcagaaaagagcatcataatcggtttaattatttgtgcctttgccttggtggtgggggtggcggggcaggggctgtgtgtacggcatccctaatctggtcccaattttggtgttgtagaagtacttttaagagttgaaaacaattggattgaacctaaatgatgttgcaagatttccccaaagcttaaagagccaattatgtggttgggagccctttctgaccggctgtgattccatcctaaggactgacagataaattattatgtggaggccgtgatgaagggtgattgttggaaggtgtggctcttggcactctgatggctccagggagagcttcgtgtcctttgtattgttttgtttttgttttgagacaagatctcactctgttgcccaggctggaatgcagtggcgtgatctcagctcactgcaacctctgtctcccaggttcaagcaattctcatgcctcagcctcctgagtagctgggactgcaggtacgcgccaccacatcccgctaatttttgtaatttttgtggagatggggttttaccatgttgcccaggctggtcttgaactcctggcctcaagtgatcctcccatctctgcctcccaaagtgctaggattacaggcgtgagccactgagcctggccttcatatcctttaactgtgacaagagtgagctgcatggcccctgcctgcgctaacggtgtcaacacatatttattcagtgcctaccatgtatcaggcacagttttggggcagattgagataaatttatcccggattatatgtcacacttctgaaagaggagatgttggaaaaggaggtagctcttaagattttttcctagttgggacttggtaagaattgcaaatgtccttacacttgggtggagtatgttgtgatcccagtaatgatttccgggagcgcttgtaaaccacctctggtgtctgaaattccaccattagtgattcattcctttggggtaagcattgccgtttctattaatagcttaggtattaggtactaatgggatactaaatagggatctcattcatcgctaaggcctccttaggtaggaagttattctttgttttttctcccatgacaaggccctaagaagagaacccctatttgggtggagttaaactgggatacaacattgggttggtggtggaagccagagtatgtgcattataagacgtggtgcctgccccacccagagtgctaaacttagcaacagtcaaaaattgtcatcatcaaatcacttttagtggtcattgttctccaagtttggatcctgaaggcagaacaagaactaaaggtccttcccggctctgaccccctgctgcagccttccggatccagccgctcaaatgggcggctccgactcctgctgcctgggccagctgctggaggaagttgctggagccctggccaggcacccctgccctcccacccttcccagctggaggtgtggctgtttgcttccacctgtttactttctggcttctagcagctccttccacactgaaaatgccagccactgaccggtccacaaacgccgaccatccccctgctccacttgcagtggttaaaggtgtgtgtgagctctggagtctgaatgggtttagaatgaggcttgacctgctgagtaactgagctgctctttgctgacattcccatctgtaaaatgggataacagtgctaaccccagtaggttcttggaagtatcagtgaggtagctaatacatatcaggtccctggttaaaggcctggcttataaaaggagctcaatatatgtaaactttgatattatgttattgcttggggccttggccagccaccctgggggggtcctgcccctccagctgccctctcttgccttcccagacactgtgctcttccggtggctcagatgtttctctattgagacttctctgttgacaccgcttgaccctctgaggtcctaacccgggtaccctcctcacctaccagctctcacctgggagccccacccatgcccagggcattaacaacccctgaacctgggctactcccaacacagactgtaaacctcccctgagctcagatggagagaagtgcttttcactggctgctctaaaagcacatcaaccaatccaacatgaaaggcccttcctttctcctaacaaccacttcctctctcgcattcacctgctcccccaggtcccaactttcctctttgaggggaagaccgcactggccagcccctgggacagggaaccacacccaggtgtttccttccttcccttccctttttcctacctgcaagtctggtggttccccttgggcaccatctcctgcaccccatccctgccctcactgcccattaggggacagcccagccacagccccttctggtgcagcttcctgttttctccatgctgcctccagggggagtccctggaccttggtctgaggggtccctcccttgctcaaggtataatcaagtccctgcttgagggactccctattttccctgagatataatccagacttctcagctcggttttcagggcccttcttccaaattccagtaggatcctccttgccaacagttccttcctatgtgctcaggagctcagctgactgaacaacccactccatggcctctacctgttagactgccttgcctgtgtttctcaaagttcccctgcctggtgtgccttcccctcagcccggtgcctgcctgtggatctgatcacattcacaaagcctgcaagggatgtaagtcctcgtgcagtccagtcccctgtctcccatcagaatatcatggctgtttgtatttctttttttccttttttttttttttttttgagaccagtctcattccgttacccaggctggagtgcaatgacacaatcttggctcactgcaacctccacctcccaggttcaagcatttttcaagcaattctcctgcctccgcctcccaagtaggtgggattataagagcatgccaccacacctggctaattttttttttttcgtatttttagtagacatggggtttcaccatattggccaggctggtctcgaactcctgacctcaagtgatctgcctgccttggcctcccaaagtgttgggattacagatgtgagccaccatgcctgaccctgtttgtgtttctttttcttttttctttcttttttttttttttttttttttgagatggagtctcgctctgtcgcccaggctggagtgcagtggcgcgatctcagctcactgcaacctctgcctcctgggctcaagcgattctcctgcctcagcctcctgagtagctgggactacaggcgtgtgccaccacgctcggctaattttttgtatttttagcagagatggagtttcaccgtgttggccacgatggtctcgatttcctgaccttgtgatctgcctgcctcggcctgccaaagctttgggattacaggcgtgagccaccgcacccggccccgtttgtgtttcttaccctccccttggctccttccatagaagcaatactttttgcagtctgggaatctctggggtctacaagagggggatcttgccttctaggaaaactgcctctcaggggcaagatggctgcctccagaagtgtgtgctttgaggaggccaggatggggacctccaatacctgacacagggcagaattctattccttgtgactcactgtctcgaaggttacgtgggttttgtcagatacgctgggctccatggccgggagccctccactgccctcgtgtcggggctctgctttcctgtctctctctcgggaggtaagatttccacttctcagggctggggctgccgggtggattgagcaatggtgtgggtgaaagcaaaacagaagtacacaaactaataattaacagatgtcaattgttaatagctgaaaaataccaccaccaccccaccccctgcccccaggagggaggagagcaaatggtcacttgatcccttggaggagattatttcacagccagcttggggcaggtttggccaagacagtgacaagtactgtggggtatatgggcaagggggatgggaatagtgccattgccagggccactgggctttgacttactttgattcccttgtttaatgctcacagccttaagagtcaagggcagaggcattcctgagaatgagcatgtgggtgcctgggggtgtgcacgtggggcaccctgggtcctatctgccgagtctgagccttgcgccatctctcttaagcaagtgagatgcttacttaagagagcaattttgctctctttctcacctcagttttgcagatgacattggcttgacatgcctgaggtcagccccagattgccaagccggggtcctcgctgtgacacggcatggccagtccctaccctagacccaggtggcagccccaccagatttaacatccaggggtggtgcagggccagtggggactttacctagcttgagaggcctcctctttgaggcagggcaaccccaagggtgggttttaagctttcaggtttaagagttcagttttgttgttgttgttgttcttttggtggggggaatagggtcttgcccttttgcccaggctggagtgcaatggtatgttcactgctcactgcagccttgacctcctgggttcaagtgatcctcccacctcagcctccagagtagctgggactacaagcatgcaccaccacacctgactaattttggtattttttgtagagatgggggtctggctatgttgcccaggctggtcttgaactgctgggcctcaagcggtccacccacctggcctctcaaagtgctgggattacaagcatgaaccaccatgcctggccagggttaaggttgttttgttttgttttgttttgtttttgagatggagtcttgctctattgcccaggttggagtgcagtggtgtgatctcagctcattgccacctccgcctcctgggtccaagtgattctcctgtctcagcatccttagtagctgggattacaggcacatgccaccatgcctggctaatttttgtatttttagtagagatggggttttgccatattgaccaggcgggttaaggttttgagtttacttcacatctgtaagctgcttctctccttcctttgcctccatgtttgtacattttctaatgagagaaaccatccatttgttctctcacctgccttgggcccagcccagttggttctgtctggaccgcagttcccacccctcagccccaagacttggaggtaccttagattcactcctctcctagtgccaccatctcactacctacctgtgcacctgttggccctggctcaggtgtcaccttctccatgaagcagcttttccaggcagagtctatggttgtctgtgccacggacccagcggggctgcccagaggcaggagctggtgttgttcctggtgtccccaggactgaccaggttaacacctggcagcttgtaggagtcacagaggttcgtggcaaggaggaaggcatgcacctgaggagcagggtggagtggtggctgagattgctgaaatagcctacggccaaatccagaccatgccacttacaaaccagccttggacaagtcagatcacttctctgaggctcagtttgctcatctgtaagatggggaggtaaaaatacagtcatgtgccacataatgatatttcggtcaaggacagaccaataaggtccttaagatttaacaccatatttttactgtatttttctgtgtttacatacatgaatatttacaattgtattgcaattgcctacagtattcagtacagtaacatgctgtacaggcttgtatcctgggagcagcaggctacccaccatctagcctaggcgtgcagtaggctacaccatctaggtttgtgcaagtgtactctatgatgttcacacaacaacaaaatcgcctaatgatgcatttctcaggacatatctccatcattatgtaacacacaactgtacctaccttctggaattactgagaaagttaaaagacaggaacgtacatgaagcatttaacacagtgccaggaacgtaagtctcaataagtattcatttctgttgtggggatttagggggctgcgagaagagcacgctgctataaacaggccttcctgggccgggatctcggaggctaagcactcgcactgcctgccccgtccagggcatggatgaggggctgagatggggagggaggggccctgctttggcagtcagcccctctgtgacgtgtccacataacatccataggaagttattgtttttccccatattttacagaggaggaagtagaggctcagagagagaggctcagagaggtgaagtcattcacccctgtcacacagctgggagctgcagtgccaacatagatgctaccaaagtggctgggctttttttttttttttttgagacagagtcactcttgtcgcccaggctggagtgcagtggtgtgatcttggctcactgaagcctctgcctcctgggtttaagcgattcttgcgcctcagcccccgagtagctgagactacaggtgcgcaccatcatacctggtgaactctttttttttttaaattttaatttttacctttttagtagagacaggattttgctatgttagccaggctggtctcaaacttcggacctcaggtgatctgcctgccccggcctcccagagtgctgggattataggcgtgagccaccacgcctggccaatggctgggctttgaatctccctttggcagtgaggtttgggttgcagtgagtaggttttggagtttgggctgatgggatggcaggatcaggagggctttctgctttttttttttttttcccaatgatgccagttctgaactgttgcttcctggggcaccacaggcagggagtctgggccagtctggccttcagccctatttgctgtgacctgtatggtgtgtgtttattttaatatgtgatctagttgtctccattgaacgatcaggattttacatccaaatctggtagcttcttgtaaacttgatcttccggccatcgtgggcccacattccaataggacagtgtgggctggagtgtgttccccatttagcctgcctggccaagcctgcttctctcctttcctttccctcctggctcacattggcatttgcgtttgtgattcctgagccaagtgggctacagggctggggcacacgtggggtatgggccctgggagccccctctgaggagctccctactaagaagggcaggcagaattatgattcaaggcaagatgagtggccccagagagatgtctagacagtgcttggggctttcagaaatgttaatgtgttcagaggagggcatccagtgacttggcacacgtttaatgagctcttgccttgtgcctggcactgggcatccctggaggctgcagagatatattcaggacacagactgtcctcagagagcctgtgtttccgggggtgagggcatccaaaatgggctttcatggagcaggatatttgtgttggtaaaaatgaagatgtgaggcactctgggcagacgagatagtgtagaccaaacttcagacgagaaacctttttttttttttttttgagatggagttttgctctattgaccaggctggagttcagtggtgcgatcttggctcactgcaacctccacctcccgggttcaagtgattctcttgcctcagcctcccgagtagctgggattacaggcatctgccaccatgcccagctaatttttatagttttagtagagacagggtttcaccatgttggctaggctggtctcaaactcctgatctcaggtgatccgcctgcctcagcctcccaaagtgctgggattacaggtgtgagccaccgcgcccagccagaagagaaaccttgacagcaccccctggtttgagctttcggagagtggctcttgctcaagaatgacgaaggcacaggaagattcaacctggagaagcactgactttggaggaaaaggttctcttgtgttttgaatttctaaagacttttaatctattttttaaaaaatagcctttattttttagatcagttttaggttcacagcaaaattgagcagaaagtacgagatcccatctactctctgtgctcacacaagcacagcctcccccaccatcaacatcctgcaccaaaatctgcttcttagtctataaaaatggcatgtcatgattttgtttattaaaaataaaatcaaatattatagactgaaaactaagccttttttcttcacccctactcaacacacacacacacacacactcacacacacacacacacacacacacacaagcatatgtaagaatctatccacccaggagatcatcccacatatcctgaagtatccgatgcatcttcacctcgaagtccacggtgtcggtatacacatttccacctcgcgctgcagaacggtcacacaggattccattttcaggagagactataatttattcaaccaggccccctgtgatggacacagacgttgtttacagttttggtgctttttttttttttgtatgctgcttcaaaccggagtgcataaacatccttgtacatctgttcttacacgcttgtgagagtttatctgaaggatagcatgtagaaggagaatctatgaatttaaaatggacgtttatggatttttaacttttgatccatgttgcctactcactctctgcaaagactgtggctgtgtactctcctggcagcaggatgtgagagtcggtgggtcatgatcttcctgtgtatgaagagcggggctgggctagggctggggcagagttggggtgggcccctggcagcagagtctagccaatgcgtgggaggcatttggagggcatttttctcagtgctgccttgcactttcatgcacatgtatatatccatagaataatatgattctgtttaaatttcttttttaaagtcatgtatcgttctgcaacttgcttctttcgttcagtaagatatttggacacatttttctagttcagctgtagaattccacctcactgtttctatctgctgcgtagaactttctgcagtgtgagattgacttagccacccctccgtgggggttctgcttcagggaacatcctttgtgggtctcgtcaggcttgggtgccagcatccctctgtctgcaggaagcacatttattaggaaagtggtcattgctaagaacgacactgctgttattcctgccatgcacctggagcagaggttgtggttcttgccttggccttgggcttgggcctggcacttctctgagttttctcaagctccatgtgggtgcagtgaatctgctgactttgttcctggagctgagtggagatgctggctcagggcttctcctagctcagagagtggctgtgatgtgattcctagccccccttagtcatcctagcagactggattaggtgggccccccccatcctagtgatcctgaggcagatgcccccctgcccaggtgtgaacagactctgcctctgggtggaagattggcacaagccatgggatcacccatttatcttctagcgagatcttcctccaggtttaaaagagaccctgtagggcacctggtcctggctatgggtgtggtggttggaggtgataaggaaagaacttaggggctgctggtggccactgctgacagcttctgctaagggtgggaggcactggaagacttttgaatctgcagagtgtgggcaatcagggaaggcttcccggaagaggtgggactgggcccagtgggagttttagaatgaagaggcagtgtctctgggctccaaggcatcccctcggcaggggcaggggagggaaagcggggcatgcagagggcctggcaaaccttctttagagaggctctttggctacctgtggttgcaggatgaccacttgatgtccagaaagctactaaaggggagatttggaactggacagactgggctcaaaccctgactctgttgttaccagctgtgccagtcacttaccctctctgagcctcagttacctggtctgtaaaatgtgatgataacagttccttcttcacagggcaagtgggacggtggcttgagctcctgtttggagaactgttggcaccgacctgcaaaaggtgacaggtgtggtcacacctgaaggtaacccaatcacttgcgcctggagtgatggctagagttggccatggtgtctgggtgaggccagagacacttgcctagtagaaccccccagactcagtgatggacccaaggtgctggtgaaggcgacagaaatgatgcgatagattccctttcgctcttgggtcccaccccaggggcccacctcggggccctacctgcaaaaagcagtccctcagggacattggacaggtgaagaggctttgagggcatgacccaagttggaaggcgccctggagtacctggggagaaggaaagcctggccggctgatggcagagggtggtgggggtgacagccaagcttcaggcttggtgcttctctcagaaaatgccaccatagatgatgtccccaagcagcattgggtgtgtcctcatggcgccctttcttcctgggtaattaatggtgctctcatccccctgagagggtggtggtgggtatggcgggctggccgggcaggcgccgggcagacagtcagagcccactccagtcctcctcatccatttattacctgtcagctttgctctttctgaacataaaataagtgcctgggaggcggccagggcccctgaagccccgagctgggctgtctggggcactctggctccagggagtcattccctggaggcttctgctaagctcaccccactgaggggcttcagataagctgggacaaccaggctgtgggcacaggctgggttcctctgtgatgtgactgaggcaggtgggtggagatgcaggactggagaaggtcagggcctcggcagccagctagaggccagaatttgggttctgagacaaatcctcctcttttccctcaaacccccgcctctcagccagggcttcttaaccagggcttccgggacccagtgagtctcaggatggactccagagtgtccaagaactggaataggaaaaaaagaatcccactgttattttcaagaaccattaattagaattacaaatggtaattcctgcaattataaatgtagatgatcaaccacagtggcattagccattctatgatgttgcagaaatcataggaattgcagaaattctcatgtcctattattgtggacctgataataggacatgagatacccagttgtcatgggtatcctaaaataacatttttgttcaccgtacttcaaaattacaatagttattagccccagatcttgttctctaaggcattaataaagaagcacatatattgctatagcattaaaaatatttcgggaggtggaggcaggcagatcacaaggtcaggagtttgagaccagcatggccaacatggtgaaaccctgtctctactaaaaacacaaaaaattagccaggcatggtggcaggtgcctgtaagcccagctacttgggaggctgaggcaggagaattgcttgagcctgggaggtagaggttgtagtgagccaagactgtgccactgcactccagcctggtcaacagagcaagactccatctcataaaaaaattttttttttttttgataaccaggcatgcgccaccacacccggctaatttttgtatttttatttattaatttttaatttttatatatatttttgaatggagtcttgctctgttgcccaggctggagtgcagtgatgcaatcttggctcactgcaacctccgcctcccgggttcaagcaattctcctgcctcagcctcccgagtcgctgggattacaggtgtgcaccactacacccagctaattttggtatttttagtagagacagggtttcaccatgttggccaggctggtctcgaactcctgacattgggcaatccactcggcttggcctcccaaagtgctgggattacaggcatgagccaccatgcccggcctgttttatgtatttaaaaacatttttctgagagggggtccttagaccttactagagcccaaagggcccatggcatctaagaaaggtaaagggctcctgctgaggcccagggaggggccctcacaggctgggggctaccccatgctgacagggatgaggtgtctgactgtcaaatggactgaagtctgcactgggcaaggctgctctttgtacccatctctgtgctggcctttgggggacagcagctcctggtgagagaggaccttgcctcaaggagctcctggcctggttgcgggagggggcaaggcacacagacagctgaacagctccctgcactgtcaggagttcagaggaggagagagaagtcacttccaccactgggacctgattgaccatcctgggaaggcttcatggaggaggtggcattggatttgggccttgaaaattttgacgtaagagacaggggaaagcaggtcaggctgagagggaccagactaagcaaagaaatggagtccagaaggctggggcatgagtggtgcccagggaggagcagggttcaactggagggtacgggagagagcagagggaggtgggaatggaagtcctgaatgcaaggcaaagaagcttgcggcccgacgcggtggctcacacctgtaatcccagaactctgggaggccgaggctggcggataacaaggtcaagagatcgagaccatcctggcccaaatggtgaaaccccgtctctactaaaaatacaacaattagctgggcgtggtggcatgtgcctgtagccccagctacttgggaggctgagacaggagaatcgcttgaacccgggaggtggaggttgcagtgagctgagattgtgccactgcactccagcctggctacagggcaagactccgtctaaaaaaaaaaaaaaaaaaaaaaaaaagaagcttgcactctgctgttggcccagggaaccgtggcagggctttcagcagggagcagggcaggtttgggtttgaggacagaccccctggttggtgtgtggagagacgatgggagaggatgggcgggaggctgggtggccatcgttgacaccttgcagtcatctgatggggaatgtggagagctgaactgagcccagggtcctcgtggggagagacaggggccgtcccagccatggaatgaggtggaaggtcaggaggctcagacctctggggctgggactgaccgcctgggtttgaattgtggcctctgcgggttactagctgcgtggcctcgggcgtgtttgttacgcttgcgaattaatttgctcatctaagacgcacggtgatagcagcacctgtctcgcagagttgctgtgggcgtaaaatgtgacaagggatttaaagctcagcacagttcctggcacagagtaagctctggacacgccatagctctggttgtttattaccggtgataaaacagatgggtcctggtgacccagtggactggaggagatgcagggacaaacgcggccaagtctgaagtttcagatcaggaccaaagcccgggtctctgcagctggtatctgagcacagaccaggtctccaggtgctctcttccctgctgaccctaagggctggggccaggacaccccctcccctgccctcacctcctctgcccagctttcccttagcaaggcctcctctggcccctccagcatagactcccaccccccaggaagggtcaaacacaaactccatctcattccaacacctggtgccgtctaaccccgttcttttcctccaggagttcccagggtcgggaaggtgcagtgaatgagacaggcctcagagagtgacactgggagctccacttgggtttctaagtctcagagcaggaagtgtctagaccagcgtcccactgtgagtgagcgctggagcctccctgaagaggaatgcggtgggcaaggtggtgtgacaaaggtggggtctttgaacgtgggattttgcaggagcagcttcacctctgggcctgctcacactggggctgatacttggggtcctggaattccatatgcactttcccctagaccctttcggggggctccccaaccctgctcagcttccctctctcccagactgaggggttccagctgctccgggcagtgggagcccactgatgccggagaataaatttgctgttttgtagagcatgtggatgcatatttggggggcttaatcttcttaataaattgttctcaaattgtgcactattaaactcctgaaaaattcatgagcacgctgggaatagagacctcatcgggaaggtttgacatgaacaatacaataaacgcagcttctaaattgggtcagggaagccttcgaggcccagagagaggacattcccgcttgaccctccccaggcctataaattaatcatgtgcacaaagagggccttgttctctcttgtcagagccaggggttgtgtctttgcccactgaccccaccccccctaccaaaccacctctgctgcaaacagagtgcctggtgaggccgttcagcgtctgtgctttgttattcctgtgtctccaaagcaaggtgggtgtacgtttcagcaagagagatgtaggttagataggaggaagaacttcctggctgactgtggggtggtgtgaaatcctggaatgggctgctctgggaactcgaggagactcttttcattaggcttttaagacctggcaggctctatcccccttggtgctctcagaccattgcccagagacagcagtgaccaggacagacattgccccagggtttggccacaggagctggcctggatgtgcctcattctggaccgttgtgggagatttaaggctcagctaaggggacatcaggacagcatcctccaggcccaaaccctcaccatagtctaagtacatggcatttggataagggaagtcaagttaggtctctgccatgggtctggggctgctgctctcttcctcaacaccctcagcctcttggagtcctattcaaaggcttggcccagatgccacctcctctgtgaagcctttcttgatttctccctgccctgtcagtcaaaattagttacttcctcccttgtggtccctctgccttgggcccttgttcgagactctctgtggaagcctatgtgtcccaccagactgtcagctctctgaggacagggactgtgtcagagccctctcaggacacaaagggacacagttcttgaagggtcctccagagaccatgccatgacttgcattggttttcacatgccaactcctaggaagggtcccctatgcaccccggggtaggagctgaatggcctggcttcccaatgacaacatgggaatcctgtgcttttaagacaggagtagggccagaaagaggagagatggaggaggcagaggccccggccggccacacttgaccccgcctttactctcttagttctgacatttcacaagcctttgtttttttctgaatctgctcaaagtccttcaaccctgcaggtctttggaggagggtgaaatggccacccttagtgtacacaggagccccaccctgagccactgtggccccaggtgtccccttgtgcctagaaagcagcctcactccagcacaagcctgggcaggtgcagcctcggtgcgcagtttggaaggggtgacgcgcaggtctgagaatgggtgggcagtgggggtggagttcactgtcagcgccaaagaggaagtggggaggccctcgtgggagtgtggaagaggagcacctttctctggggagagcacttccgggagatgtaactgggtagcctacccagacccctggccctggtggtctagcctctaaaggaagcagatgatagcaataggagaaggcagtggacagccccattggtcctgcccccaccccagccaccacctgtggctaggctgggaggaagctgctcttccactcccaccctcaccccgtgggctcggctgctccctgctgacttgcacctcagaggcacccccagccccctcagccagaacagccaacaccaggcaggtttgatgcctgataccatggggccctgtgtgccagtgcggcccacccagcctcagacctgtgtatatgtgtgtgtgtgtgcgcgtgcgtgtgtatgtgtgtgtgcatgtgcgtgtatgtctatgtgcgaaggggaagcttggcagagggtggctatggagtggagggggctggagaggccaggcctccgtgtggccggtcaatgcctcaggaggtcagcaggtggagaaagagagccgtgtgtggggtcaaggagaccctggggctgttcattggacagcactaattcaatgcctaaaaataacctcggacctggtagggcacttcagaaatttccaggctctttcagaccccccacaaactcatttcagtctccaacatcttgtgaggaagttaattccatccttattttaccaccaggagcaccaagttctagagtaaatctgtgaagggctcacagttagttggtggtagagctgaaactggaactctggtctctctggccataggttcagggccacctcctgtggacctactgtgtgcttagccccgtgcagggcctgggcatggaaacggagtgaaggaggcactggctttgctgccaacatggcctgtctgcagggaagaaggccacctgagagagaggttaggaagcaccagggcaaccacaggaaggaggggcgctgagatgggagcgaggccttggacaagaaaggatatccagagctagagagggtggggcttgagggtggaggccattcaaacacaaagcactctgggtgaagacaagacagtggggagcgggttttggcccagccccacgcagagccttaaagacgcagccatgggcatcccctgcagggcctggcaggcagtctgcccaggagagtcacatttgtgggaccctgctgcagaggaccttcccaagggacagtcccctgtttagatgtcttttttgggggggggtctgggggatggagtcttgctctgtctccccaggctggagtgcagtggcacgatctcggctcactgcaacctctgcctcccaggttcaagtgattctcgtgtctcagcctcttgagtagctgggactacaggtacatgccaccatgcccagctaattttttgtatttttttttagtagagatgggttttgccatgttgcccaggctggtttcgagttcctgagctcaggcaaaccacctgcctcggcctcccaaagtgctaggattacaggcgtgagccacggtgcccagcctcagatgtcttttgggggtggaaccagggctgcactgcagaggtcacccccctacccctggccctgtcactctccatcctcttcctcctggccagacctcctgctctggcctgcttttattctccttttagcataagatggcaaagtgactgagaagaaggaaacaatcaaaggaagagaagtggttgccacggaaactataaagtggaagcagaaactttcaggagcaggagggaggagggaagcagacctggtggctgggtgggaggagaggcgggaggcctggcctgggctagcctggagtgcccctacgcccagttctcgctgctctccccagctgagcaacgctgggatctgtgctctcgggagcaggagggccgtctggtttctcccaagtctgggcaggaggtggctggtacgagagtgaggtaagcagcttggcctgtgggtgcatggggctgaggaggagccctgtcttctgcccagatccccacattgttctgaaccgccagtcccatgtcagcctggaggagtctttgcatgtctttacaccacgtcttgattcctccgttctaacaagccaaaatgacacggtgcaggactgggcagtttaccaggcagcttcctgagtgcagtctcattcaagtcttgtgacagttctgggaggatagtattcagattctacagagtggggagtttgggcccagagaggttagggaacttgccctaggtcacagagctgagaacccccaggggtaggatttatcccctggactgtcagatcctaaagccttgagctctcttttccttctggacactttgttttgtaatgcagggctctgcatgaagccatgagttctctgtagcctccagccccttctcatccttcattccagtaagactttcccccagggagctgctatttgcttcctggaggagcctagggaaatttagtgtctctgaggcttgatttccccatctgcaaaatgggcataatagcaccttttccctctgaaggcttttgtgaggatgcaatgagacaattcaagtcaagcactgggtgcagtgcctggcacagaggatacccttgaactctctgctggctgagcctagcaagcacccgtggagtgggcagggctggggcaacctccctatatttcagagaagccacttcgtccgtgaaacggttccgatgggttcctgccttgctcggggaattggaaaggtagattgagatcatggctgtggagccttgaaaccactgagtctggtgggggaagaagcagggtctcccctgctgtaaaactggccactagagctccagtggacattgagacgtctcagccaatggtctctctgttggaggaagggaggggagagggattgggaccctgcccagttagcccctgagtaggaggctcagacctgctgaaggtttgggtctgaaatgaccccttggaattccgcgttgcctgcccccgaattgcagccaagctttagatttctcccgggagaggcccagccagtcaaatgtattattaaatggcagagaggccgagcgctgcatgtgaaagataatgggggaatttatatgatgggctataaatcacagaatgagaagccctgcaacctgtggggaggaaaattaagaagtcctgagcagtgacttgtttggggtgggggcggaaggcatttggccctgttttgctgtgagcctggcaggttcatgatgcacgaggcccaggggtccgaggggctctgatgtgcacacttcctatgtactcaatggtgacacccccctccccccattggcagctgctgtgtgacaatgccaagctgggcactgggttatgacctcagggagagcagtgtgccaggagagacagatgtgagatgaatcatcaaaaaatatgcagtcggccctccgaatctatgggttctgcatctgtggattcaaccaaccaaggattgaagatagaaaaaaattgcatctgtactgaacatgtacagactttttcttgtcatcattacctaaacaatacaactatctccatagcatttacattgtattagctataagtattctagagatgatttaaagtatacaggagggtatgcatatgctatattttaatgtcagggacttgagcgtgcttggattttggtatctgattggattttggtatcctggatccaatacccctgggataccgagagacgcctgtatggcactgcacaaagcagtgggctccctggaggaaaggcgcagggagctcagagagagtgttgcaggagggctgtggaggaggcggtgaattgagagaggggagtggtggtttttctggaaaggaagagtgaatgcgagtcagccaggtggctcaagagagctgtggcagggaaggtgagccagaaagagtggccaaaggccagcagggccagggcagctagggcaggggctgtgtttcagatttcactctggctgttttatggagaaccacactgaggaggcagcggaggatttggggggacagttcggggggatggaggtccccaaaggtagagatggcgatgccctggttctgggagatgtcaatgaaggtgatgaggtggacagcctcaagctggaatttggagctctgaagagcccatttcacagagcaggctccaagtctacaaagccagccccatgtcctgtatcctaggaggtgggaatcatgggagcaaagacacaaaggaaagaagcagtgaagggctgggggccagggtggttggggaagggataggagtagggtgtggtaagagggaagataggagtagggctggggccatatccactgaccactatcctaggctaggactagagtcaaggctgtgtgggattgaatcctgtctctgccactaatcaactcttgtgcctgtaaaatgggagagtaacaggattcactgcttttggtcattagaaggacttgctgaattgacactgcctgacaaaggggaagcactgaattgggattaagtatgcactgagtggccttgggcaactctgccctctctgagctttgctttcttctagcaggtctctgcaaaccctctaggccaaagtcctctaatctccctgtgctagcagtgtgcagctcccgagggtggtcagagcacagcggcaagctggctgtattgcctcagatgggaccgtgtccctctctgccctgtaaggggataccatgcctatcagagctgtaaggggatattttaatcagcccaggacctgctgaggtcagagggcatagggaccagaacaaagaatgccagtcacggctgctgcctggccctagatgacctgctgggccccagaatccagaccacatggggagcctgcggagggaggtggaagctgggggcctcactgtgggtcaggcactgttcaaactgggtgttctccattttgggcctcagtttgcccatctgtaccatgaggtttataacccctccctgcctgcagcacatggggtgctgaaaaaaaggaacaggctgcagtttggacaaagcagattcaggtctttattgggggctgtggtctcaaagcctgagagagagcaacaggtgggcgagtgaggctcagtgcggcccacggatgacctgctttggaatcacctgtgggaccactgcccgctgatgaaaaatgcagactcctgggctgttccccagactggctaacttagactctgcccggtgggcccaagtgtctgcactttaacccacatcccaggggactggaatgtctcgaagtccaagatctgaagttctgggcatccccttccttgcatcaggggaacaggggcccagagggcatggggtcggctggcccaagttgcttaggagactggaatcctatgccatgccactcaggggtccttcctgtgcatcgccccaggagccctgggagtcctgggtgatgcctggggcaaggggtactttatcctagggctccatagcccagcagggggcagcgcagatcagcacctgctgagggctccccgctgctgtgtgggcctgggctgggtagtgcggatctagaaagagctcactgttccggagaggtaggtgtgggcctgggtgggaagacgggcctgtgtgtgcatgggagcctgtgtcaggggggcgacaatgagagagagagcaccaggaggacacaagaaatgcgacatcagagaaagcaggcccagaacattgtgaaacttccttacagcttcccgggacagaggctgcaggggaagaggagagggcatctgttgcccaagctgcctccctaggactgtcagtgggattggggtgacttcaggcctccccacctccccccacaccatgtcctctgggcttttaaatgaggatcaatcagaggtcagcccctccccaagttcagcatcagagtcaggagggactaggggctgggctacaggctaaactccagccccaactctccaactggcccttccttactttgcctgctacagcttcctctgctgctgggaacctgtgggcaggcctacggcgtggggtggggccagtcctgagcctctggacctctgacttgagagtgggctgaccactagatctcttgaggccttctgcagttcccagttgtgggaaggcagcttcactttcatactttctcagggcaatggggggctggtttggtagtgagctccctgtcaccaaaggtatgctagacaagactaggtgaatttttcttcctcttaagcctttggtgacaggctaaagggtgggtcctgggccatcccctctttataccccatctgtctgttaatcattaattgccaagagagctcctcctgggatggggtgactccttggctatgggggatgctgatatccaggatgaccttgaacttgtttttcttggccccaaactttctgctacttcctgtttgagcaggtgcagaaattataggggcccaacccttccttgttttcctggtagaatttccagacaaaatgctcttcccaggatgggggcagagctgggattgttctcactcccaaggggatttgaggaatgaggatggcagaagctccatttaattcccacctacctggtcttaggatgctagctatgggctaggtgggatcctcaggaaaggccagtaaatgtgagaaccgtggctctggcagtgcttgcctctcctctaacaccagctatggctcccatttatgttccagattggacacagaggctctgagtgtcaatacccaatggccttgaacacccacccaggccaaccccattttgtaggaggggaggctggggctgtgagccagaggagccttgttcaaaggcacacagcaaagtgaaggcatttattcatccattcattcattcaccgagtgcaatctctgtgccagttccttcacggtcaggatttgcaccctggcctgctgaccatcctcagctgccactcaaaaataaactttccagcctgccatccatgtgtcacaccaggcctcaagaggtaggtcacttgttcctggtcccacagccagcctgcctgcctgcctgcctgcctgcctgcctaccttccttctttccttcttccttcctctttctttcttttctttctttctttttctttctttcttttctttctttctttctgtccatttctttccctttctttctttctttctttctttctttctttctttctttctttctctctttctttcctttctttctttctctctctctctttctttctttctttctttcctttctctctctctctctctctctctctctctctctctctttctttctttctttctttctttctttctttctttctttctttctttctttctcactttctttttttttgacagggtcttcctctgttgcccaggctggagtagagtgacacgatcatagctcactgtagcctcaacctccctggctcaagcaatcctctcacctcatcctcccaagtagctgggactacaggcacacaccaccatgcctggctaattattattattgagactgagtctcactctgtcgcccaggctggagtgcagtcgtgcaatctcagctcactgcaacctctgcctcccgggctcaagcaattctcgtgtgtcggcttccagatgggatttcaccattgctggccaggctggtctcaaactcctgatctcaggtgatccacccacctcagcctcccaaagtgctgcaattacaggcgtgagccaccacacctggcttttttttctttttttttttttttttgtagagacagggtctcactgtgttgccagggctggtctcaaactcctgggctcaagtgatcttcctctcttggccttccaaagtgctggaaccacagcttcttttctattaaaaaaaaaaaaaaaaaaaagaacaggggctttgagcccagctcccttcatgcacctcgttcatcacacatttattgagtgctattctatgcactgggcatatggctgtgaactggactcacaaggttcctgtcctcattaaagtctggggaaacaaattaatgaacatctgaatacacagattagatagtttcaggaagcgctatgtggaagaaaataaaacagggcaatgggatatcatggagagattggggcaaaggcacttgagataaggggtccagggaaggtctctgagggtgtgatatttgagctgaggcctgaatgacaggaaggagctgtccatctgaagatctggggtttgtgggaatgaggcagcaggaactggagatgcaaacgccctgaggtgggaccacgtttggcacattcagagattgaaaagttatcaagctgagtccagaactatcttagccagtggctcctcaagaaagccactagaaagctcttttaagaatatagattccttggccctacccatcaaaatctggattcagggatgctgggagtggggccctggaatctgtttctgaatgctcccaatgtagttaatggcatccagtccagccccacacctgtaagcctgccatatggagccatccccttctttcattttttgcagagggaggatcagagaggcaccgtgacttattcaaggttgcacagccacacagtgacaaatctaagcctcaagcccagatctcccaccagagttctgcccttaccacttctcttcttcccctctggagaagctgcctgggcctcaccccaacttggttctatctccctgtctattctccctgatctcacccctcacatagcctgctccccagtcctcactgtatcctctgctccagcctcaccatcctacccactgtctccagtacatgctttgttcatttccacctctggggcttttctcatgctgtctctccctccaagaatatacttttctgctcgctatgcagtcaactcctactcagccgtctagctccatgccagtgtctcctcctccaggcagtcttccaggacttctctcttctccaaattctctcagtgctgactccaggtcagataggctcagccacttttttcgaatgttgccatcatctctcccactgttgctaagagcctgctctgggctgggagctgtactgatcagctctggactgtcctctcaaccaatccacaaattagtgagaaaagaaatagccaaggctaggcatggtggctcaaacctataatcccagtgctttgggacaataaggtgggagaatcacttaaggccaggagttcgagaccagtctgagcatcatggcaagactgtgtctctaccaaaaagttaaaaaattagccaggcatggtggcacacacgcctgtagtcctagctgctcgggaggctgaggcaggagggtcacatgagcccaggcattcgaggtcgcagtgagctataatcccaccactgcatttcagcctgggcaacagagcgagaccttgtctaaaaaagaagaagaagaggaggaggaagaagaggaagaagaggaagaggaaggggaaggggaagaggaaggaaacaaggaaggaaggagaaaggagggaaggaaggaaagagaaagaaggaaagaaagaaaagaaaggaaagaaaggctgggcgcagtggctcatgcctgtaatcccagcacttggggaggctgaggcaggtggatcacctgaggtcaggcgttcgagaccagcctggccaacatggcgaaaccccgtctctactaaaaatacaaaaattagccaggcgtggtgacacacgcctgtaatcccagttactcaagaggctgaggcaggagaattgtttgaacctgggaggcggaggttgcagtgagctgagatcgagccattgcacttcagcctgggcttgctgagactccatctcaaaaaaaaataaaaaataaaaaaagagagagagagaaagagagaaaagaaaagaaaaagaaaagagccaggaggggaagctgcttgtcagtttatacgcaaggctttgatccactatgttatttgactcttccacaacctcacaaaatattcatatacccctttataccttaggaaatggaggcacagagaggtgaggcagtgatctggggtcacacagtgaagaggggaaggctcatcactccaaatcccccacctgaatgggggcttcctaggagctgactacagggcccgttcagctgtcctcctctgtggtctctgcaggagttgagcaaggccctcccctggaacccaggccagtgccagccatgaaatggttcacagatgaccaggcaggcctgcttgagaagggagggggctccctgacctcacactgggaccatatgccaccccctctggtttcccagtgggtgcggagctgtctgggcccttactgaagggggaggaagaagcccagagacctggaacctcagccccaggcctgggccagggagaaaggaggggctgtgggcgtcactggggcccagggcccacctggagcttggcagcgtttctgggtcagggcagggagaggaagtacacagagagagtggctccaggcttggccatctgggctgaaatgccggctgctagggttggggtgaggaaggagggctggggctggggcctggagagtggattagtctcccctgggccacaggattggagccctcaacttcagggcagccagtatggaggggaagcccagggctcctgtgggcagaaggcagcaggcattctgggagaggtggtccaggctctcgacggagagaggtggtcttggcggctgtatttgggttccaaggtggaacccaccctaatccccagccccatgtgaccttgggtgagtcgctccctcccttggtctcacttccccatcttcaggaagggatgctgccccaccctgactgctctgtgctgggatgagagagccaaccagaccctcagtgattgcagagttgatgccagatcccagtttgccatgggttagggagggtcctctgggtaagcagctgattttgagggcctcagcttcccccgttcatcagtttctctcaaggttccttctacctcggacattccggggctttatgacaggctgtcgacgtgtacgagggagacgtgcatgtcctcttctctgggcttctggaggactggaggggacctgtaggtggccctttggggaatggggagatttttagatcctgatggaatctctgggaggtgagctgaacagagctgtctcatctccatttaacacgtggaaacctgagacccagaggtatcacacggtgaccccctcttagagttccggcctgtcccgagggctctgccctcggcccagccctgggtgacttgattggaaaaacactcacactccccgaggctctgtctctgtgtgttcaaatgtccacgcttgactggtcccccacttccgcctgtgttgagaggggcagagccatccaagcctggggtcatcttgtccctgactgcaccgttttctgcaaacgatgtcattaaatatatcggtggcttttgggaggaagtctggggggcggtggcagtggtggtcgcctggctagcctggagtgctttagtgtgacctcttggggcttgtctatgcttttccctgaatggggtgacctggccccagcctcccccatcttcctagtgaagatcctgctcctggtccagccttattcccggatgaacagtggatgcaggaagtcgtcattgcctgccagacaggccacctcctggggcagaggccatgaccttaaccacaagtgtcccgccaccccccccaccccgaccctctgtcccccccacccccacccctgcccagagctccagagactgaaaggttgagactgtcctgggaggcggatgtgtgcaggcctgcctggctggggacttccccggtcaccaccacccaccctcatcccaacaggaaacctgacaggtctgagccttccagacacccattgtgtggggcctagtgtgggctccgatgcttcccctgtcaggactcctgtcgcccctagcctcctcctgtcccttgacaaagctggctattaaagaaagttctagactgtttccactcccccgtctctgcattccgtactgctcaaccttatgatcgttgctcctttcagccccctgggttcaaatcctgcctcctagtgcaagccctgtgactttagggaactcacctaccctctctctgcctcttgacatttcttctggaaaaagaaataaccatctgcctcctaggattattctgaaattaaatgagatgatgtgggtagaatgctgagaacaggatctgggacagtgcatgctagatgcagttcagctaccatgattaggattaaacccaaactccaccctcaaacaaacctcttgaggtcaaacttgtaaccctcctctgttaagaagccttgggtttctgtggtgccccacgcatgagcatctccccttccctgggggaggctggtgtttgaagataactggttgtggttgctgttatcatcccccctgtacagaatggcccatcaatgaaggctgtgctcttctgttttgtgcttagctgcagaaatgggtgatctgtcttaagattggaggaaacactatgctttatgggcaatttaaggcttttcaaaggtaattttggcaatatgcttttttttctctcttttctcactgacttcaaccctgacaccgcagagggactcaagactgccttgggctagcctccctcccctgcatctggtgcccctgctgacccaccctggcctggcccatgatgtacctggactttcagcccagctctgatgctacccactgcttcttttccagcagggatgctgatggttttctgcctagaggggaattttttgggtccatccctccctggtcttcacaagtagcctcctgtgtccccattattcaaactgactagtggggtataccaggagccaggaggggggtgtctctccttggagtcagagtagacttttttaaggagggggtgcttcaatttgcaattgcaaaaatgtatatatacacacacatatatatacataaacacacatatatacgtatatatacccatatatacacatatatatacatacatatacatatatattatatatatacatacatatacgtattatatatatatacgggtatatatgtatatatatgatggaatactactccgccatacaaaggaatgaattaatggcattcccagaaacctggatgggaattggagaatattattctaagtgaagtaactcaggaaaggaaaaccaaacatcatatattctcactcataagtgggagctaagctatgaggatgcaaaggcagaaaaatgacacaatggactttggggactcagggaacgggtggaaagggggtgaaggataaaagactacaaattgggtttagtgtatcccaagttactgctcgggatatgggtgcaccaaaatctcacaaatcaccactgaagaacttactcatgtaaccaaatgccaactgttccccaaaaacctatggaaataaaaaatttaaaaaataaaaaactgaggggatgcttgagctgggtcctgaagggtaagcaggaatgcaccaggtgggtgcagagggaagaccttggtggcagcggtccaggtcccaccaacagggcgaagactggtggtgggaaagagtgtctggaggatgaccaagggggctgaaatgggttggggtgcaagcgggaggtggtcgctttttgacacagcttggtctctgagagttcgccttgggaggcttttgaggggagggtaaaggtgctggtggtggggttaggtcagatctgatttagccagtcctagtacccacacccctacttactaaacttgcatgtttccaggccccatccagacccactgaattgagcgtcttgagggaaactcagaaatatgcctgttcactgagtgaaggtgatttgggggctgcagccctgtccccgctaaagcagcacatgggagaggtgggagctgggcctattcaggagcccctctggaggtgggagaataagaccagacctttagccctgtaggtactgaggctctcatgttggcagggctggaaagtccgatctgttggtctgtcacaggaagcagtggtagcaatggtggtggtgggcactggaagcagggcttctcctgttcagagagagaaagccacaggggcgccggcgggaggtgggagcagatggggggccagtttcccagcaggattgattccaggtcccctgctgggctgtacagggagcggcctttaactgccctgttcctgggccaggaagaaggaaaaggagcctgggctctttctctcctagctcctgccctgcccccttcccactcagtacccggagagtacctgccccaggcccgtggagatgctcggctcagctggttggcgatgcccattcccatcccaagggtagaaatgcacaagcttcctccatttcactagctgaccctccttcctccacaaggcagatggattgggggtccatacgttctccctataggtagggaaactaaggcacagagaaggacttgaaaagctgaagtggggagaccatgccagacctttggagcccagctgtgcttacagatgaggtcctgagttccaagttactgccccctctcccctccacacacactcctcagacttcctgttgggggcccaggctaagaccacttgcccacaccactgataacagtgagttgattgtgagcctcccgtcccctccagggagggctggaacctggctgatcagagggttcctgctttgggaaacaaaatgggccagatgaactcaggccctgggagcaggaccgttgcccccgtcctgagtaggacttcctgggagtccctcacccccagaacccgtggacctggctacggaggttagtcatgcctggaagtgccaagatgtggacaggtggtgctcagaaccccacctacgtgaggaggcactgaactgggttctggcagtttggccagaggaggatgcatgctaacaaggcccccagcttgcctggggactgagtgactgtgtgtgcgctctgtccaggggcttctttttagagacgttcctgcaccatgtctgctgttgaaaggagatagggcaatgcctccaagcttgtctgacctgcagcctaccggctgcatgtggcccaggatggctttgaatgctgcccaacacaaattcataaactttcttaaagcatgatgaggtttttttgtgtgtgtggtttttttgtttgtttgtttgttttagctcatcagctatggttagtgtgagtatattttatgtgtggcctgacaattcttcttcttccagtgtggcccagggaagccaaaagattgggcacccctggcctaacccaaaggaggctaagggtgtcctcttgggcaccctggttttccatcttcctgtgggattggccagtattcagggaagaggggaccagggcagctgatagctctggactcctcagactgagtttgctggagtaacacccctcctgcccctcccccctggtcagggaaggcgcctggcttccagctgtgagacaggctccgcaggactagggaccctccccgctggctgagagcgctagggagggggcttcccctgtgaggtgcaaaacccggcctggatttctgcccagacggccccgcccactccagggccccaccttccccactgttctggaggaagatcccctagccggcctcaggcacttgcggtgactcacaccccccacccctaagtctgaatgttgagagccccaggctaagaccacttgcctctgccactttccatgtgactgaggcaagacctccttgccaaggcctcagtttccccctctgtacttcaaaggaggcagctcaggcaggtgtcttaataatttaaacgacgaatattgctaaagagataaggggcggggagagagagagatcactgtgggccatggttagggaagggtggaggagctgggtcctgaaagggtggactttggtcgggtggagaaaatagccaagaaggcagtccctgctggcagcacagcaaagagaagtgagaattagggggagcagaggtgaggctggaggggactttggttggggcaagattatttggggtccaaataacaaggatgtttagacgtattgccattgtgctctggggagccacggaaagctcttgagctgaggagtgacttggagaaagtttttcagccaatgcaatagagggagttggtacctttccttctgccaccctgagtttctggtgcctacggtagggtagggattgttctgccctgccttcagtgctttgagtgcttgaaacagacaccgtaattttaattacataaaaatgatacgtgtatcagacgggacaacctttaaaacgtaaagaagaggcaagtatcctgcatcacaggggagtctttcaacctggctgggccagggcctgcggagcagtgagggtcgtttctcagcccagcgagcctggggcaggaacggaccctaattgaaggtgaccgtccccaagcatgcgtcctaccccgggctccggagagcgcacaagcaggtgtgcaccgtctacccgcgctggcgggattgggtgcctggtgcgccctcaggtcgacggtcgaaccctcgggggcgggggtgggagccagaaccctcgggacgacccgtctggggtcccggggaaactccgggccgcctcgccccgccgattccaggccgggatttctcccgcactgactttccgggccggtgccagcccggcctccgggtccccagcccccgccgcggggccggctgctcggggagcgggagggggcaggaggcggaggaggagtttgagcgactttgtggggcagccagggcctcggcggccgctcgggcgagcgcgggagaacgcgtgggcgcccgccgggctgtccggagcggccgatggggcccgtgtgagcgcgcccaggcccggcccggtgcccggcgggcggcagcatgtccgcgggcggcagcgccaggaagagcaccgggaggtcctcctactactaccggctgctgaggcggccccggctgcagcgacagaggagccgctcccgcagccggacccggcctgccaggggtaggcgccaccccgacccctgacccctagaccctcctaaggccactaagccacctgatgccctgggatgctagggaccgggatcctccttccagccatttgccgggggtttcctcatccgccccttcctgagtctgccggaccccccattcccccagcttctgcttagtcctcctctcgccgggggaagccgaggctctagggtctcctcttaagccagggacagggagaggggagcctggaatctttctccgcatctcagatcagacctcctaccccactgtgcctcagtttactcagcagccgggcaataaagtaacccagggtggatctgagctttcccacaccttgccttcccagcccaggccgcggacttctttcttccctttccaggaacttaacgggctccccacctcttgggtgctaggacaagtgggtggacctcagggaaggaaccgtgacccctcgagcgggtgggcgccagctcctttgcaaagtttctctccatcaagctcaggaggcaggacgagacggagggggaggtgcgagcagcattttctttttccagtaacaggatcctcggctggaaatgcgtgtgatcccgggggctgcgtttgggcgggtggtggccgggacttccttccctggctgagtaggagggagggaagcccctgggaggaggaggccttcaaaggggctctggggaggctggagtcctaggcagaggttcaggcccaccgagggtgcccgtggggtggaagggaggagaaagacggcgccttagcagggacctgggccgagttgacaccatcaggttatcttgaaagtgggaagccgggccctgtgccaacaaatgccatgcagggaatctggtagaccaagaggggccacattcccaccctgcaggctgccgttgtgtgacctgggctgagctgcctctgaacttcagttttcttgtcggtgtgagggtaaatgaagcaggcaggtagtgttcggttgcttccaccagaatggggaagacttttcccacagtcaggtctgagtagcactgtgcagtccagggcttcctcaggaagtagtgagttccctgtgcacagaagggttcaagctgaggctaagtgtgtgcacaggtgtgtgctggtagttcagtcctcaagggtctctcaaagcctgcaatccccccactcctgcctttcctgaagtcttagtaagtacagaattaacagtactaagttacttagtaagtacagaattaacagtactaagcctttagtactccttggagggagtactaagcctttagtactccttggagggagtactaagcctttagtactccttggagggagtactaagcctttagtactccttggagggagtactaaagacctggggaaggctttatctcagtggttcaggttttggttcttctatctctgtccttctatttaattctgtacttgctaagacctggagaaaggcttagtactgttaattctgtacttactcccttcccctggacttggtctgggagaccgggaatctgggctcaagctttgtgactttgggcaagtcatttcccctttctgagcttagttttcctggttgtaaaatggacctgccgtatgtggaggattcagtgaagaaactgagaaatgggagctttgaaaatgcccagtactgttcagaccaccctggggcctctccttctgcacccacctcacgtcacctcacccacccgcccctcctttgcctcagaaatgccctgtgtgaccttttcctcttctcacctcagcccagttccatccctgactgtaatgggagtctcgctcctgttcagctgacctcctgctcagctgaccaggcaggggataatcaatgtgtcaggggctgtcacctgagccccagctcccagaccccacatacacaggatcactgcttgtgtcccagcttgaaggagctcacggcctgcagagcggggaggagactgtctctgaacagaagttatatctggggagatcagggagagcttcacagaggaggtgacatttggatgggatctcacaaaatggatagggtttcccttcgcagagggagtaattgagtcagatctgggttcaagtctcagctgtgcacacaactattctacagccagttacctctccaagcctcagtgaccttgtgtggtcaatggggctagcagtgacagggtcatgtgagggccagaagccagtgcctgggactaaggctgcagctgagggtgagctactgtcttctctctggacagaatgaacagactgcgcagtcagggagaaggaaaacggcttgggtattgagaatagagttcctcctgggtttggggaggggagtggattgggaagggggctgggtgagtgggtggggaagagcaggcaacagtagtttggatttgataaagggccttgaactttgggaggccaaggcaggaggaatccttgagcccaggagttcaagaccagcctgggcaacatagcaagaccctgtctcaatattgtttttgtttgtttgtttgtttgtttttttaaaaaaagaaggcctggagtgatgaggagttagttacagctgcagccagggtgtagggtggaggctggaggcaccctgtcctcctcctccttggtgggaggcagctagggcagccattgccctccctccactaaagcctcagacgcctgactctaccccagagccacaaccaccacctgagggcagggccccacccagggagaaactcaggctgaggaagccaccctgtggcctttgagccagtcccttctgaccttgaacttcagcctccccatccacatgggggcttggtcccatggtgtggtagcatcggacctcagaggagtgggtggtgcctagcatctcagcctggatcagactcttgcccccacaccctttctggcctctggcactagcagggaaggaaaatgaccaagaactcaggctgtgtatttgttcagaaacagaaaaatgcaaggaagagttggttgctgccaggttctgcaggtggccaggctgggggaagggagcagggctttgtccctggtagggctgtgagtgagggacagtatctgcagtctccctagtttgaccaataagggacttaggttcttcccttttctgggcttcagtttccccatctgaaggatgggcagagtgagacctgctgtggtggggggtagagcacgaagctggagggtagctggaggtggggtagaaacagtgaccttcggagggtgagggccatttgcattttcccactgtgtccctaactccacttgaaggctgggcatgtcccatggatttggggggatcctttccccagaagggtatcatcagcaaggtgcctccccacctagtcacaccaaaatcaagaaaagttttgtctctgacccctgtgtttccccagggctgctaggagaaacagaaattttcctctagccctggataaagttctgacccattcattcagccagtcagctcctcttaagcacctactatgtgctgggcttcagcttgggtgcaggggcacatggagatgaatcacatgtgctcccagcccttgccaagcccccagtctgttggggaggccagcttgttggggtgcactagggcacaagtctctttctaggggacagagcagtggttagtgggaggcaggggctgtagttccagctcagccgcggactggttgcatgactgggcacatcatagggcctcagtttccccatctgtcgaggggggttaatcttgctctcctgcctcttggaatgcctatacccatagccatgaggggttttgattatgttgttcatgttttcatctgagtttttctaggggtccagccacctgccaggccctggctgggagctgggggttttgcagatgtttttctcttgagatggtcaggtcctcctccgtgcctgtacacacccctcttgcatgcctctgtatcttgcccgcgtggtgggagaggatggtttcatacaactggttcctaaccaagagaacagttaggtaaggacctgtgtgccaccatggggggtgggtaacttctcaggggaccctggctttttttttttttgagacggagttttgcttttgttacccaggctggagtgcaatggcgcgatctcagctcaccgcaacctctgcctcccgggttcaagcgattctcctgcctcagcctcccgagtagctgggattacaggcatgcaccaccacacccggctaattttgtattttcagtagagacggggtttctccatgttggtcaggctggtctcgaactcccagcctcaggtgatacacccgcctcggcctcccaaagtgctgggattacaggcatgagccaccgtgcctggctgggaccctggctttgataaggtctgcaagaggcctctggggcaacagcttggacttcatgagttgggcgagcctgagaacagccctgaggtgggggggttttgtggttccccagttttcaaatgttccctgcaagggccctaggcctggctctctgcctccaccttggatgacacctgtgaaatcattatgcccttttctgccttgtctcttcttctgtttctgccaagacacaatctttcatttggggcttggccctagcctttccagtccctcctctcccttacatacctcaaggattggggagctcactccctctcaggttgtgtaatgagggtgaaaatggctcctttttgttacggctcctgtgtgctgcgtgcctgctccatgcctggcaatgagctcaactctgaacttgccttgtcttatgcagtgttcagaacaacactgtgagatggatactgatactatcctcatttcataggtgaggagactgtagcccagagaatgaaagctttgcccaaagccacacagctcagaaatggtggagcccagctctgcccacctccaggtcctgagattcaccttgcgatatccgtgggcaggcagacctttctaaggtcaggccctggctttgagaaggccacctcccttcacagccaatgacttcactgggtgttcatggcaattgtctctcacagtcttggtcaaagcttgggagggaggcaggggagtggccccgttggcatctggttgcctcctccacctgcctgggatagctcaggtgggacctccccggcctgcccctgccccctggatcctgctgtcattcatgacctgccaaccatgccctttcccagggcatgcgacaggtctcagggcctcagccatgtttctccaccaaagcccttagtgctgagggttcagagtcccctggtgtgaggtccctggagcctggcagacacctgaggcctaatccccagagctctctaggtcctcgaaggaggccacaggccccagtgaatctgctggaatgtcagcctcttgcccttgcctttgtccttcctgacccaccctcatcatctttaataatcaggaagagaacagctccctttcaccaagctgaatgtgtgcccggccccatgccaagagctccccctgattacctcatgtctcatctcagttctccaatcctcctagcaggtaggggttattgttgtcactttcctttaccaggtgggaaacggagctctgggtgtgatatttcctctgcattttcctgtcggggtggtgaaataactggtttgaacccagtccactggactcgaaagctcatgctcagaagccccagggctccctctaactttcttggttgctgcaactcagagagcgctggaatggacccagggcatgctcctcatctcagcggttcaggttttcattcttctatctccatccttctatttaattctgtacttactaagacctgggggtacagggaggggcttggagcctatttgcccagctgctgaatggggaggttggagagatggatacttatggctccagtaccaggagccaactgtttcccttgacaactggggaaactgaggcccacagagccaaggccacttgcccgtggttacctaaagatgttaacgagaaatccgggtctggaactcagatccctttgtatcctgtttcggtgttggtgtagtttgttgctttccctaagatgagcccagatagggaaactgaagtgcctgggctcctggttgggtcttctgcggggagagaatggcgattcaactcccgtgtactgttgaacttgacacaaacacgctcacatcccaggctgcatacgtgttttgctttagaaatgacatgaagccttttgactatttttaagagaaaggcaatggctgtgatatttcccctgcacctccctctcggggccacttggttaaatgtcaggaaagggagagtatttcctggtcaggaacattcagagcttgctgggagctgaagttttgttttccattaagtaggtattcggggagtctatttccctctgcctcctctgtttccctggaagcttgcgcttgacagttgcagggaggaggggtttgagaatgagcagccgagatgcccacgtatcgcgtgcccgctctaggagtggcggggtggctatttttagccatcccgattcagtagaggcatttcagcgtttgttcaatatttaattatccatctgaaattggcccatgtggccttcagtttggaagcagctctctgtgctgtgatttcccagttgcataaataaggaagcaagggaatctcaatagccctccaaataataataacgagaaaaaaaagtagactcgatactcagcaaagacaggcttggttcctcggtctagacagaccacctgtatgttagcagagaagcaccaccgaggacgcccatcacgcccttggaaatgcggcggtgctcagtctccgaatctcagatccacaactgcctgggttttattggggatgggttttcctcccttcgccaggttcctgtgttgactttgacagctgctgggtacctgagaggtggtttggggattttgcttttggaagccttgttagcttttatttccctcttctcttctccctgacagacaggagagtactatcggcatctgggctgtgctatttctttttccttggcctttggaggcgatgtgccgacatagttgtgaaatgaaaaaaggcagagcacagggagggagatgttggggccatgaggctctgccttccttccccaagcccctggctgatgagggagagaggggagaagaggagagagtggggcccaagggtgctgggcagtcggagatgactccttcctactgtcctgcttggcatggagatttgtggactttgggttcggagactggaaaccaataaattggtaatctggaataagcttggtttttctatccatttacacctctattctggggacacagagtttggcctaggagcgtgtacagagtcctgactaggtcataaatgctgtgtgactgcagacaagtcactgaacatctctgggctcagaagcacatgtaacagatagatatgatgcagcatagggtgtcattataggccaggagaattgtcattattagctgttcacccaaagtctgaggggttgcttgcaaatcagttagggctgatctagaaagaaaacgtttgggaggccgaggtgggcggatcacgaggtcaggagatcgagaccatcctggctaacacggtgaaaccccgtctctactaaaaatacaaaaaaattagccgggcgtggtggcaggctcctgtagtcccagctacttgggaggctgaggcaggagaatggcatgaacccgggaggctgagcttgcagtgagccgagatcgcgccactgcactccagcctgggtgacagagcgagattccgtctcaaaaaaagaaaaaagaaaagaaaaagaaagaaaacgtgatgccagtggggactggacccacctaggtggtttctcggcatccctaccctgagaggctgccacaggtctcactggtacttgttcagagcagcagagctttagcgagccacctagtatgtgtgacctgggtgccaggggctgccacagcagatatagccagcccccgccctcgggagctcagaggccaaggggaagagtcttggcataaggttagcagatggtgtgactggaaaggtaggcagggccttgagtggtgagcaaagaggggagaacagcccctggcagaccactgggaatcaaaggaaggattttgaaaataacaggaatgataacagtgatctccatgtcttgagcacttacacagcaccaggggttcttctaagtcctttacatgcatcctgccttaaatcatcattctcccaggtggtgttatcagctccactttctagatgagaaaactgaggctcagactggttaagtgacttgctgagcatcacccagctactgagtggcagagtccaggatgtttaaccctcactatacttaccagagctgtgatttaggaaaagaactcttaacaaccctcaagctagactggtatggtgcagggagaagaaagtgggaagagggagcagggaggccagtccgcttcctggggaattttgaaggaggccggcaggtgcaggatgggggaaggcagagggcaggtggagaggagctgggaagtttggaagggctgacacaggagagaggatgccgccatctgagggccagtgctgggctcctgccacgatctctccctggcctgcggtgaaatgaggactgtaagggcattgcagcgagtttcccataacatccatttcacttcagtaacccattttgatgcctcttttttattctgagatgatggtctttggattctttggggttagaacattccttttatgcaatacataaatgtctagtatgcaccatactaaatggtgttcttttttttaaacatctatatttggcaagaaaagaagtcagtggttctgtgtggcccaccctcatattatgctacttcatagttttcatttatagacattgaactagttcctggaattctcacaggatggtaggctgacacccacgaaggagaagtccaggggtcgtccttacagcgagaggagtgggagctggtggtgggataaggtggtgggataaggcccttggaaaggcgtgaagaagcgggaggatgagggtcattgagggctggggtgggggatgcccggcaggctgtggacatggctgatgggcctgccttggatgctgatgctgcaggggttttggcacaagactgggcaaggggcttttcagggagcagcttcaggagaaggcgagaaaggtgctggagcctgcaggggatcgattatttgggggagaggaggtgtggggtgcagaataggacaggattggagaagtttggtgaaaatgggggtgcaagagaagcttggatttcccattaactgtcaatacagtcatggttccacctggtatctagaaacctgttcacaattgtaggtttagcagcacacagggtggggtaagtgtctctccccatcaggagcagcctctgaactctcctgggaccctgagcttcagggaacccaggctgtggcccccctcccccactttggcaatgctgtctgcagagggaagggccggttttactagcacagggagtgctccggctcctgtgtgtcggggaaattctggaagaggctctcttccagaagttatggaaggtccccgggagacagaccaccagtttgggccaaacccctccatctacatgaaacaacaacaacaacaataataatgtttacggccaggcaccatggtttatgcctgtaatcccaacactttgggaggccaaggcgggaggatcacttgaggccagaagcttgagaccagcctgggcaaatagtgagaccccatctctacagaaaattttaaaattttttgttgtggtggcacaggcctgtggtgttaactgtttaaaaggttgagggtggaggattgcctgggccaaggacttccaggttgtgatgacctatgatcgcaccactgcactccgccctgggcaacagagtaagaccctgtctcgaaaaaaaaaaacaaaaaaacccaactcctaagattacaaaaagcagtaaatatctattacagaacagaagaaaataaaaatcacctttaatccagcacccaccaataagctctgggatcactggggggttatttccagcccttccccttcttttctttaagtttttgaaaattctaaaatattctaaagtagaacagaaaagcatagaaaataatattgcagacacccacctctcaggttgaacaaaccttaacattgccatacctgcctctcttctcttttctttctatctttcttagaaatagaaatgattcaggtccagaaggagtcaggacagtgtggtctactggccaaacccagcccctcatctgtttctgtatgacttgtgagccaagaatagtttttacatttttaaagggttggaacaaaaagtcagaagaaggagaacatagggagttatatgaaattcaaatttcaatgcccataaataaagttttattggaacacagccatgttcattcatttgtgtattgtctatagctgctttcacgctacaatggcagagttgaatagctgagacagagaccatatggacttgtaagcctgaaatatttgctatctggccttttatggaaagtttgctgacgcccaagatacagctaaagccacctactctctctccaggcataactggccacctaaaggtggtgggtatcctgcctacatgtgctttctgcttttacatagaagcctatgcttccaagtgtgtcgaattgcattgtgtgtttaaaaatggatatggtgaaattgcacatggcagagaggagcaaacacatatggacaccctgagacctccttagtttcctgaactccagcagcacagagtaaatgccagctctctgccagccctggaatgggccctgcagatgcagagaaaagaatcgtgggaagaaaactccagaagaaaaaatggggaaagtgacactgccgactcaaattactagaaatcctcagaaagtaaaaaaggaaaaagaaactcagggttgagagaagactttgggccggtgaattcatccttggagtgttcaggaaatccagagatttttggaaggctgggaattctttggaagtgaggcgtgtctggagataaggaataggaagcatgggctgtcaaaagcaattgttagggagctcaagtagagaagcaaaaggaaaacctggggacaaggtcgacagatgctgaaaaccttgtaggatttatactaggctacaccagactattaacgcggccaaccagagaccaacaagggagcaaacccttgcactgtccttgcggaagggccctacccagcatcctgggatgtaactgggaaggatgtgtctcattagcacctctgccccacctctggaataccagctccaagccaaacacgtcccctctgagcagctgctgtgccctgcccccgagtgctctatgttgaggatcctccgggcaggaatggtgggctggatgctgagccctctacagttgtccccatgtccctctcccaccagactccactccccagcagcagtgggcaacctcctctgattctgaaccacctcctgagcttacagaccattggaactcgatcccagttccctttaggagacagcaggctatcatagttccatggcctcaggacactgtacctgtaccacctccaaactcaacatcataaaaccaaaacgtgaaatcaacatccctcatctctttctgccaggtagctgggactgagctgggccctggggacatagagagaggccaagggccaggcgcgaactcagcttcctgagtcacttgggagcactgtcttctcactcatctctgcacagtgccattcctttcccacattggggcaacccttagattcagagatatccgggcttgaatcctgttttcaacgtttcctagctgtgtggtcatggtttgaacttcagtttcctccgattaaaggtggagctgatgtttcttaattcaggagtcgattttaggataaaaatacaaatacgtggcacagtcattatctctcttagatctgtttctccacatttcctggtgatccatttttattacatagagacaactagttgttttttagaactatttgttgaaaaacatatcttttccagcatcaatttacctcggcactgtttttgaaaatcaattgcccatgtatgtatgggtctatttctagactctattctgttccattgatctgtatgtctatccttatgctaatactacactgttttgtaaattagctatgtttcaagatcaaagtacttcttgagaccaggtaatgtaagtcccccaacctgtttcttctttctcaactttgtttggctgtctaggtcctttggtttgccatctaaatttaaaattcatcttgtcagtgtcctcaaaatttttattttggattttgattgggattacgttgactctatggatcagtttggggagaaatgtcaactaagcaatactgagttttccaagccttgaatgtagtatatctctttatttagatccttaatgtctctcagcagagtttctgagttattagtctcttatgtgttaaatttattaagtatattttggtgctcttggctaatcactgaagtggctgagattttactttacttgcagctaacaagttaaacaagtagtttcatgagtgctggcggaagacacgagacccctgggtcagagacaaaggactctatgatccatggcgtagcagatggaataagcttcaggtttatatcagttccccttcccgctaacttcctagtgctattgtagaacataaaatcatctatgctagaacataaaatcatgatctattctagaacataaaatgatcttctttgtagctttcccaaattataacctcatgtcccctacaggatcttatatacagtctgagtcaactgttctagaggctaaaaattacacaaaggactgaaattcagttttgctttagtatcaaatcattaaattagaactttggagataagttaaaatttgacttccaagttgtcaaatacagaaaggtaaagaaagtttcaaaatgatatggaaaagccagtatgtacacacttaaaaccttatgcctgtttatatttgttagaaaaaataagcctgttatttcatatagccatgttgttctaatttaataatatagatttcaaataaacatgggttggacatggtggctcatgcttgtaatcccagcactttggaaggccaaggctggaaggaggattgctggaggccaggagtcggagaccaccctggccaacatagtgagaccccgtctctaatgaaaataaataaagaaaagaacaaaagtgcagaacattactaaggtggaaatttggggggaaaatagtttacagttaatgaatgaaatgaaaaataagatgaattaaataatacatgtggatatttaggttttgataatcatggttccctctggagtgctataattagaatttatataccctaaagaagtattactgatgtacttagtacctatactaaaggtaaaatacacagagtgtggagtgactgtatgaaaggataacatgtgtacagatgtgaaaacatctccaagctatattatgaaagaagcaaccaaggtatcctatatttttgtggttttcaagctctatcgcatatgtcttttgataaaaggtgcattatggagaaagagcaaagcttaccttatatgggaataagtgtggtatttctaaaaggaagctcttctcttttattaagccatttgtagatttgaaagaggagagatgggagcccttgaaattccatagtcctgaatcagacgatgatctgaacctgtatctctctatctttactttaatgtaactagaatatgttgagcctggatccatggatgtattagtgcctgtggctgctgtaacaaattaccacaaacttgtaactcaaagcaacagaaagttattgtcttacagttctgggggacagaagtctgaaatcattttcgctgggctaaaatcaaggtgtcagcagggctgtattccttcttgaggctctggagaagaatccatttccttgcttttgccagcttctggaagttgcctggttccttgtctcatagccccatgtcactcccacctctgcttccatcatcgcattgctttctctgacctgcctatctccttcttgtaaagacccttgtgattattttaggcccacccaggtaatccaagataatctcctcatctcgacatccttaaattaatcacatctgcaaagtcccttttgccatagaaggtgacatatcacaggttctagggattaggacgcatggttccttggggaacattattgtgcgtagcacaggtgggtaaggtttagtaacctccaagcaacacctctcctccctgtcccagagaggcgtgcctaaaggctgagctagaaaaagtgtgcagtggtatgttctcaatcataagtgagagttgaacaatgagaacatgtggacacagggaggggaagatcacagggaggggaagatcacacgccggggcctgtcggcgggttggggggccaggggagggagagcatgaggacaaatacctaatgcatgtggggcttaaaacctagacgacaggttgatgggtgcagcaaaccaccatgtcacatgtatacctatgtaacaaacctgcacgttctgcacatgtatcccagaactaaaagtaaaattaaaaagaaaaagtgtgcagtgggagccaggagagctgccaatttatcaatgcattattttagcaaactctttatttggcttcatcccctatccccagccccaacacacacacacacacacacacacacacacacacacacacacacacacaacactcttaaatagacgtacacagaggcataagctggacagctcttcgtctggaaagttctaacaatctgaagattccatgacttgttgcatggtgtgttttgtttgttttcgagacagagtcttgctctgtcacccaggctggagtgcagtggtgccatcttggctcactgcaacctctgcctcccgggttcaagcaattttcctgcctcagcctcctgagtagctgggattacaggtgtgcaccaccacgcctgactaactttttgtctttttagtagagaccaggttttgccatgttggccaggctggtctcgaacccctgacctcaaatgatccacccaccttggcctcccaaagtgctggggaaaagcactttggggtaaattacaggcgtgagccaccacgcctggcctgcatggtgttttttacctttggcttcctgctcagttcacctggcccctccctcggggagcactagccagttcactttccacgtgggagctatgtttccccacccacaggtatgttcctgattcctgatctttggacttctctgatccactttttctttctttctttttcttttttttagacagagtttcactcttgttgcccaggctggagagcagtggcgggatctcagctcactgcaacctctgcctgccaggttcaaatgattctcctgcctcagcctcctgagtagttgggattacagttgtgcgtcaccacacccagctaatttttcatctttttttttttaatacagatggagttttgccatgttggccaggctggtcttgaactcctgacctcaagtgatctgcccacctcggcctcccaaagtgttgggattacaggcgtgagccaccacgcccagccagatccactttttctaactggccatttgtattagtctgttttcacgctgctgataaagacatacccaagactgggaagaaaaagaggtgtaattggatttacggttccatgtggctggggaggactcagaatcatggcgggaggtgaaaggcacttcttacatggtggtggaaagagaaaatgagagagatgcaaaaccagaaacccctgataaacccatcagacctcatgagacttattcactaccaccagaacgctatggggaaaccgcccccatgatctaaattatctcccaccgggttcctcccacaacatgtgcgaattatgggagtacaattcaagatgacatttgagtgggaacacagagccaaaccatatcaccatttgagctgttgttgatttttttttttttttgagatggagtcttgctttgtcgctaggctgtagtgcagtggcacgatctccactcactgcaacctctgcctcccgggttcaagtggcacgatctccactcactgcaacctctgcctcccgggttcaagtgattctcctgcctcagcctcccaagtggctaggatgacacgcatgcattaccacacctggctaaatttttaacttttcttagagatggtggtctcgctgtgttacccaggctggtcttgaactcctggcctcaagcagccttcctgcctcggcctcccaaagtgctgggattacaggtgtgagccactgcacccaggctgttgtggattttaatttgttttgttttgttttctgattttgtattttctcttccttctattcttttctcttcagatgtattcatcgagtacaatttgtgctgagtcatatcacctatttatattttaattttactattagttttgggaagtcttaattatttttcattcaggaaattgtacagtcatctgtttccattcatagcccgtccccttctccaaagagaacgtctgataacaagtttttggctactgtgtaatatgatatttttctatgtaagtgcatgcacatgtaaacaaagtaaaacatcatattaatcacatagacagcaagtgtatttcagcttaaagggtccatagtaagccttactttttttttttttttttttttttttggagacagagccttgctttgtcacccaggctggagttcagtggtgggatcttggctcactgcaacctccacctcccaggttcaagcaattctcgtgcgtcagcctcccaagtagctaggtttacaggcatccaccaccatgcccagctaatttttgtatttttagtagagacagggttttgccatgctggccaggctgagtgttggccaggctgatctcgaactcctggcctcaagcaatccgcccaccttggcctcccaaagtgctgggattacaggcgtgagctaccgcgcccagccagccttactttttattttgaaataattatagattgacaagcaattgcaaaaccagtacagagaagtcccaagaacccagttttctctgatggttgcatcttacataactataggacggatcctccagctgcagttgccctctagccaaagacccaccaagagtacacctctagttgaataagttgcatttattactcattgcagtgagggagagcacgcaccatggggcatctcagaaagtgtgtgttaggaagaacctagtataggatttgggttttggttgggtgacttgggggaggtcgaagggagtgggattcacactagatgaattgcatctgctgtcagaaggcagaggcaagtctataactgtgtagcttgagtcctatctctagggagaggaggctggcattgggggctaaagctgtgactggtaaagtagcagcagtcactgctttcagccaagagagggtgatgattggtattttgtgggtggcacagtgaccttgtctttatgggttacttcaacaaaaattaggtagtgaccttgttttgtctcacttcatcatggcctcagagtaaccttgtctgaggttgtgtcttttgcgattatgtctaaaaggagaataacgtggtatagccgtgaatgccaagccagcttcccgatgtcaggggcttttattccagatctttcgtgtacattggtaccatgcctgcgtatagttctctgccatttcatcatgtatgtagatttgagtaaccaccactgcaatcagcatccaggactattccatcaccacgaagatgtcgcttgtgctccccctttaacatcacatccacctgcctgccccaccaccatccctaacccctggcaaccactaatccgttttccatctctattgctttatccctttgagaatgccacgtacatggaatcatacactatgtgaccttttgatactggctttcctcgctcagcataatgcccaggagatccatccaagttgtcgtgtgtatcaatagtgtgtttcttttttagggctaagtagtattccatactgtgtgtatttgttttctatgactgctgtaacaagttaaaacttagcggcttaaacaacacaggtttttaatcttacaaccctgcaagccctctggcatgggtcttgccagaccaaaatcaaggtgtcagcaggctgcgttcttttctaaaggctctagggaaaaacccatttcattgctaattccttgctaggggaattcaattccaagtggttgtaagactaaggtttctgttttcttgctggctatcagctgagggctgttcccagtttctagatcaaggccatccacattccttggctcgtgaccacctctgtctgtgtcaaagctggcaacagcagatggagttcctctcaggcttagaatttctcctgcctctttcctcatcacatttctctgactcaccttcttgcttccctcttccacatttaagaatgcatatcatttggccgggcacagtgggtcacggctgtgatccaagcactttgggaggccgaggctggcggatcacttgaagtcaggagttcaggaccagcctagccaaaatggtgaagccccatctctactaaaaatacaaaaattaggccgggcgtggtggctgaggcctgtaatccaagcactttgggaggccgaggcaggaggatcgcgaggtcaagagatcgagaccatcctggccaacatggtgaaaccccgtctctactaaaaatacaaaaattagctgagcatggtggcacacacctgtagtcccagctactcgggatgctgaggcaggagaaccgcttgaacctgggaggtggtgattgcagtgagccgagatcgtgccactgcactgcagcctggcaacagagtgagactccgtctaaaaaaaacaaaaaacaaaacaaaacaaagaacaaaaattagccgggcatggtggtgcatgcctgtaatcccagctactcagaaggctgaggcaagagaattgcttgaacccaggaggcgaaggttgcagtgagctgagattgcaccactgcattccagcctgggcgactgacctagactccatctcaaaacaacaacaacaacaaattcttatcattagattattctcacctcgataattcaggatgatttcccatctcaaaatccttaacctcaaccacatctgccaagttccttttgccatgtaaggcaacatattcacaggttctgggaattaagagtgtggacttctttgggggaccatcattctgccttactcattctggatgtaacacagtttgtttaaccattcatctatagaaggatgtttggttgtttccagttttggggctattaaaaataaaggtgctgtgaacattcttgtaaaaaaaaatggtatataagtggattacacaccatttccttttgcaactgatttttttcactcgacatcatatttctgagttgtattcatgttgatctctatagctctaggtcctttgtagtgccattgtgttccatgtgaatagtgtcctcccttccttgctgtgtaatgttctattgaatgactgttcccctattggtggacatttaggttgcttctaactttttgctgctacaaagagtgctgcggtcagtatctttgtgcagatctccacgtgtgcaggatgaagcagttttcttgactggatgagtaggagggaaggttctggccctagcacatatgtgttgtcggttcctactggctattgtgtaattgttcttcaagcccttttcactccatcagcagtgatgaaagtgttctgtgcatctctgccaacatttggagtcgcagttctttttaatttctagactggtttctttttcatttcttttacttagtttcttttaaattctggactggtctaggacctttccaaaaggtatgaaatggcatctgagacttttaatttgcattttcccgatcactgccgaggacacagggacaccccagtccagcacctccttgttctacactcttgctgacttcttttctcctgacgttagcgttaagaggttgctgcctctacctgcctttaagtattaagatctgggcgatgcaacccgacaactgaaatttggtgtcttgtctgaaattacaggatgttcctcaggccgccgtgtttccatgggaacaagtaacagtcatccttcatgattaggtggtaaccatggcaaccaagccagcagcatttgaatgaaactgattttattttatttattttttgcaaacacatgaaggttaaaatgcatttctccagctgtggcttccaagaataggaagacagcctggtaaatggagaccctttccacctcctagaggaaaggggatccaggatcagctggtcccatggcctaattttgcagactaggtgaccgagaggtcacatagaagtcatgcaatgagtttgagccgaggaggaaagactgctggatcatgctcgaaggtctggggcgcactcttaagagatcggctgggtctcccttcccgtgatctaaccctaggaatgccactttcatactgtgtgatcttagcagattcacttcacctctctgggtttctactggcaccagctgtggtgctagacctatgggaccatgaggccaggcctcccagtgtctgtttgcccaaattagaaaagatttgctgcaaaatgaaaggccaaaggcagcatgctggggcctaggaccccgaggctgaatccccagggtccagagttagaactcagggtcagttccctgccttcttttcctgtgtaaaataatagagggtgtgtgtgtgtttttacttggttccaaggactggagatgaccactgctcttactccctgactcattggattgatgaaatcagctcagagagagaaaggggcagccatggagtcacacagcagagtcagggttgaatccaggctcctggtgtcagcttggctcctcacccaaccccatgctccatgtcccctccatcttctctggggctggaagtgtgggtttgggggcagtttaagggactttcggcatatactcttgcttcttccctggaggacttttagaggtagtcacttttgcttctcagaacttcagtttctccatctggaaaatggaactcactatagagctgcccaggttgtcctgtgggattacatttgaaagggtccagaacatgcattctcagcaggggcgagattgcccctaagtgggcaaaaagttggttcttgggctagaagatgaaaaaaaacctttctgtacaaagcccagtatacacacagtacataaaagatactgtatgtctgtgatattaaaattttatggaggggaaattaggaaaaaagtgtctaagaagacttttaagggagagcgacaatgaaaaaacattgagaaacgtgggtccagaacccagcgatccatgtcttcattaactttgtgtttagagcttacggcaggtggctggctccgtggggaaggtgtgtggggtgtcaggtcaggagagagcctggcctggcccagactctgccctcgatgttcagtgtgaccacgggcacatcacagctcctctcagggcctggtttccccatctgtgggtaaaggaggtcccatcagctccatgggtgactcccaggcagttgagctcccacctggtggatcagttcagggtctggagaaaagcaggtggtgcctcagactatggtgattagaggagcgtttaatagaggggctgcttatgaaggcgtgggcaggcctcgggaaccacggggcagtgcaggaccccaaagctagggacagcgggggctgcttccctgaggccccatggaggaggggagagcgtggttgctgggaggcaaaggtccagaagatagggtcatcccgatggtggctgggaccttccgtggaggaggcaggcagcccagatgactctccctcctcccctcatctcttgccagggttcctctttggccaaaccacatggaagttgagggtctagaagctcagatcataaagtctatacaggccagtgccctggagcagaaggcagtgcacagagacgtggagaatggaactaggggccacacaggagatacctgggaaggtgccccaggtttccctccagtttcgtatggagtgcaggccttgccctgggtgtgggctgggagactggagaggtcagggaggagagccagccgccctgtgcaggagggagagtgggcccctatcctccggccacctgggatccttgcggccttcctagcttctcaggtggaggggtgtagccagggcttctgaatggaagttaaagacttctgggagcactctttgctatagacctgttgttgagggatcacacacacatttctttgcttctggtctcagcttcatcatctgtcgaatgggagattggaccaagcaacctctgagagcttcctggcccagacccaggaggcaagaggcaggattctgggcatcagtgttggtctcagtggaaagacatcctcaccgggcacccagtgttctaccagggcactccatgcacctcttgcctggagtggtgagggcccacctacccaggaaagtgtaaagctgtggccagggtggtgtgtgtgtgtgtgtgtggtgtgtgtgtgtgtatgtgtcaggagagggagggtagttcctggaagctccagctgcttttgtcctggtgatcccaagacccctgtggggcagcctgactctgccaaccaggttccataactgcagtgggtaccccgtgtttgttggtttgatggaggcatcttgactaagcactgcagggtgcctggctctgggtgggggtgggaaacagacaacccatcttcctgctgagtcgccaagtagcaagtctgcagggctgactgatgtgcggggttgtgagtcatccttcctaaagtgatctgggcgcccccagcattgccccagagctcaaaggatgacagttcccgcaggaggccattccagggaagagaattctagggagggggagagcataggtaaaggtgtggaggtgggacattcctgcatcgtggcaggtacagcaaagagggttagcaagaacagaagccagagagtgtgtgaggtagaatggctttcggtgccaaggtgaggagtcccttctttctgagggcattgagggcattagaagcagtcgggcttagggtcctgactgtgcctggcactgcccatctcccacttctaccgctttccctagaaaggtggctgaacccgggggtctgcctctggctaaggtttgcatcctgagactaagccctgagtacctcctatgcgttggccccttggctgggtgttgggacccatgggacttaaggctgaaggagccatggactcggtccagacacactggaccctcattcctgttgtggtgctcagtagccctgtgaccttgggctggtgactgcaccctgagcctcagcttctgctctggtcattggtagcttggctgagtatagcagatgggacacaggttatgggtgacagcctcccagagggaggtggcatgtgctgtcacagaggacaggagggtgctccaggtgggtggtgcgaaggggtgagagatgaaggcagacaggaaagcatgggaagaattttcctagcaaaacctccagaaagagtggttatcccctgactgtgactagagagattgtggaggaggaggtccaaggaaagttctaagcaggaagcaccgtgcgggaacagcaagggccttaagagacggcgccaggctgaggatgagccatgtgggaagggagcttttctggaagaggcgcctggggctggatggtctggacctggtgtcaatgcctgccccaggcctgcctggaggtcagcgggcctgaaccagtctcaggacagctttgcctgcttggccatgagccaaggctcaggatgaagcctgtgcttctgtggactcctgtccatgtgactgtgtggagggaatggcctggaaagcacacagtgccccagcatcctgttctgccttctggaaagcctgctccttgtgtgaaccccatgtcatctgtcctgtgtgtgtgtgcgcacgtcccctgctcagtaggtacctggggtgggtctgggagtgtacacattggagtatctgcatgaatataaacatgcacatgtgtttgtctgggcattaccgtctcactccacacccctgtgtgttcacacctaccagggaaacctctgccctgtccttcttctcccttgcgagtcaacaggtctttcccaggcaccccccacgcaccaggctccatgcagggtgctggggaggtggagatgcaaccagcttaggcgtaggtgttaggagttctgcagacgcacacacacacacacactcacacacacacgcacacacactgcaaatgagagcgttgataggagactcaggtctagttattgctgtaggagccaaaagcgaggcaagagctggaagtagagggggtcacccaggacctcctccagggcctgcaggatggaccaggctggggaaggggagcaggaagggagtcctctgttgggggccacctctggagcaatggcaaagaggcagctggtgccacgctgttgtgggggaaccagtgaggaaagtggccaggttggcaggttggacagactcaggaggttttatgtaggtgtgctaaggccatgactaaaagttttcaatgagctgtcaccatttaagagtcagaatacttcatattttgaaaaacccagattatcagcctctcttgaaccatggcagctatggctgccctgagcccctccttgtgatgtagcagtaaccaattagcgccgagtggctggctgctttcctagattctggatttcctgctggcctctgtaggcctcccaagtttaaagcctctggaaaataactggaagccagaagtcacagattctcatgtttgaaaaaacgtgggggctgacatagtggctgagccctgtaatcccagcactttgggaggccaaggtgggaggatcgcttgaggccaggagtttgagaccagcttgggcaacaaaggaaacccccatctctacaattttttttaaaaaaattagataggtgtgttggggtgtgcctgtggtcccagctacttgggaggctgaggcaggaggattgctcgagcctaggagttctaggctggttgagtatgattgcatcactgcactccagcctgagcgaaagagtgagaccctgactctaaaacaaacagaaaacttgagaagtcatccaagctccccaagtgtggcatcccaggagatggctcagttatctgtctgcttatatgcctccagtgacagggagcccactacattacaaggagtgggggttttggggaacctttccccccgcttttttttgagacagagtctcactctgctgcccaggctggagtgcagtggcacgatcttgggtcactgcaactttcgcctcccgggttcaagtgattctcccacctcagcctcccgagtagctaggactacaggcacacaacaccacacctggctaatttttgtattgtcagtagagacagggtttcaccatgttgaccaggctggtttcgaactcctgacctcaggtgatcctcccgcctcggccttccaaagtgctgggatcacaggtgtgagccactgtgccaggcctttttcccccctttttaaaaaattgcgataaaatatgtaaaacataaaagttatcattttaactagttttaagtgtacaattcagtggcatgaagtccatttgtaatgttctgcaaccatcaccactatccattcctaaaactcttcatcaccctttacagaaactctgtaccattaagcaataactccttgttcccctctctcatcagcctctgctaacttcaaatctgctttctgtctctacgaattggcctcttctagatagttcatataaatgggatcatacaaaatatgtccttttgggttactcagcgtaatgttttcaaggtccatccacattacagcttaaatcagaacttcattcctttttagagcagaatggtattcctttgcatgtcagtaccatgtgtgtgtgtccattcttctgctgatggacccttgggtttccaccatttggctgttgtgaacatttgcatacaggtatttgagtacttgttttcaattattttgggttatacccaggagtggaattgctgggtcatgtggtacttgtatttttaatttttggaggaactgccagacttttccatagtgcctggaccattttctagggaccggtttgtctgttgtcctgactgggatgggagtggcaggaggccctagctgtgtggccttggctgttcttgttcaacctctctctcctcctctgttggcagagtcgcctcaagaaaggccgggctctcggcgcagcctgcctggcagcctttccgagaagagccccagcatggagccctcggccgccacgccgttccgggtcacggtaactatctctgcgtcaccaacaccgccactgccaccaccatcaccacctcgcccggggtgctgctctgtgaccccacggccccccttcctggagcctcatggacccggagagcatccggcctcccttgctctaggtatccgatccctcagctgctcccatctccgtggctcagccctggtcccgggggccacatggggggtcccatcctgagagggagggggcaggtggaggacagacagcaccgaaggctatggggcccagcgctgagctggcccggaaagagaagaggctcttgttagtttagataaatgtacccttgagggcgcacacacactgtgcttctgcaaccccgaaaagatgcactatttttgtttccatatattttaacacctctcatggcataccataatttaaatctttcttggtggtacataaaataatgctatatattataactgatgatggcttagaaccgacaaaacacagaatatatatcatagctattgaactgagtggtccccacaagcacacagactttttaaaaattacaaacctaaacaactttatggaaacagaacccaatgacccttaacgtctgactgttcatacccttctgcatttgtgcatgtacacacacacacacacacacacacacacacacacacacaccagagttctgggtcccttcactccctcgttcaggagcattactgtgtgtacctctctccagggctgtgccaggcaccagaaacgcagcgatgacatagacacattcctttctccacggagctcaggtctgtaggtcaggtggatgttggatggtttgttcatccattcattcactcatcagttattctggcatgcctgctgtgtgcaagcagaggaaagaaggttctgggtggcaggaacagagagtgtgcaggcctggctgtcactggatagcatcatataggggctccaggggagctggaagtgattggctattcacagtgggttgggagggggtcccacgggagctggcttttgagctgcatcttgaagggtccgtagaaaatggctaggcaaggacagagagagagagagagggacttccggggagggagaacagcagttgcaaaggtatggaggcaccctagaaatttcctctgcttgccatagggctggctcctcatcccttgggcatcagctcagatatcagctcctgaccacaccacctcaaggaagccctcttgcttttccgccatcacagcagcctgctcttctgtttcctaatacttagtgtcagcatgagaatgtgagctcataaggtcaggggctgatgtgtttgtggcatgcagaactgcttggtggagctggagttgaggggatctggaggacagtgtaggaggtgaggctgggaggcctggccgagtcaaggtcacgtggaacctccagtaccaggccaaagggatggggctttccccagggccactgattctctccactgccagtatgttataaaaatgccttaaaaactagcttattgtccttctttaagatttcagtccactgggccagggcagggcctgggaacctgcattttaacaagctttccccaggaggtgattctgagtccccagctgggggttgagcccatgggcaatgaggaggaagcctgcgctgagacgattcagggtcatggccctgagtttggccagggggtctcaggaagctggtctccagcctgcagggagcgcttggaggctgggacaagggtgacccccatcagctggagcgaagaccaagttctgatctctctggatccctggggccacagcaggcagggtgggccttcagggggaccctagggaacgatgactaataataattagtaatagtagccacctccattgatgaagtgcctactgtgtgccaggcactgggctcactgtcctacatccctgatctcttttttttttctttttttttttttttttgagacagaatcttgctttgtcgcccaggctggagtgcagtggtgtgatcttggctcactgcaacctctgcctcccgggttcaaatagttctcccacctcagccccccgagtagctgggattacaggagcctgccaccacccccagctattttttgtatttttagtagagacggggtttcaccatgttggccaggctagtcttgaactcctgacctcaggtgatcctaccacctcggcctctcaaagtgctgggattacaggcatgagccaccacgcccagcctacctgatctctcttcatccaggagacacacctacagctgaaacattggttaccccatttcccaggtgaggaaacaggttccgagaggtaaagtcacttgctgcccaagctccaactgctactaagtggcggaaccaagattcgaccccaggtctctgtgactccagggcatgaggcacacccatcctcaggctaggaggcggatccattgccccacacccccccagaaccccatcagcatcgcttttccggctatttccctttctgagttgctctaataggggtattatcacaccttaaagtttttataatttgcagctctttaagtgacagctaggatcagtgttttccctgtagtggtgtcttcattctgtctcccagggtagaaaccaccttcagtcagagccagccttgggaacctcgagctgcctgggactcaactcgcagtcccacctgcccggttagggtctgcaggatggagagcgtgttcaaggtggtcgttttgcccacttctcatggcaaccctctaggggaggcaccattagtgtgcccatttcacaggtgaggaaactgaggttcagaggtgaaattctttagctggtgtcactcagctcctgagtcaggactgccggacatctacgttttgtgtcctttcctgggcaccttggtccttaagagatgtgatttgagattctcttctgggctgggtgctgggagctgaggggactggagaactcagaggtggggatctgggttcaaatcccagatcttccatgacccatgtgatttcagtagccactgagcctctccgagccttgtgttcttgacagtaaaatctggaatgacagactttgcttggactgtggacttggtgaatgtggtcgcccaagtctgacccatggtaggtgcttcatggatgaaatccatcattaacatccaaatcgggtttccatttttggctgtaaaacatcagtaaagatctaggagggttggagtacaggcagaggacaaggtgtttgggggaaggtcagtggtgagcctggcctgggccttggggacagtccctcacacagaccctgtgcagggccagaagcaccctcctccctcccctagcccgtagcacacacttgctcacttacaggctcccaaaagctatgtcctcacgtgctcagctgacttttgctctgtgtagaccctcgagggaacccaggaaacatggttttgcctcggggaggcaggggagatgccacaggatgtactggaataactgccaccttcactgccatttcaaacccagatggcaggctgtcagcatctcttacaggggtgctccgcagggagaatcaatgagtcacggtgtaaggtctacaaggctcagcctgtccaccttctccatggaaactgaggcctgggaagggcttgtcagaggtcaccacccagctgacagcagttcaggagcctgggttgtttacaccatcacatgccacccctcctcattttgtgagtcagccgaggacctgcagccactctgtagggcattgaaggctcagtgctagtcctgcccctgcctcttgtagactgtatgaccctgggagagcctcagtttccccttttgtgaaatgtgggggatggactttgtaaggcagcgtacagttcaggcataaataggtgcttaaatgttctggtgcagtagctaagagaatgggctctagagagttccccgacccaggtttcaggccctgcacagcctcataccagctttgtggcttgctcaggagtggaacttttctgcctatctgggacaactccctccctcctatagggagagttggggggtaggggagtggctctccaggaccacacagtgctacgaggctggcatgtgccctgcaagttatagggggccctgaatgaggatgggggaaggggcctgggagtagatgaccagagaggcttcctgtgcatctgtggccatcagctctcaggctcctgagattcaaacccaggtctgtctgctctgtgccagtagtgtctcctggaagggaaggagggaagggtggcaggcagcaagctggggccctggatctgcatagaccaatggtcagactgggtctgggggctttgcatgtgcccacccagcttccccaggccctggaccccttagcagcaacagcatgctgttctttctctcctgccactccatggcagaggagccgtggtttgatttgggaggcaaagagctgatgactcttcctggtctccccacgagctccttagcctgctcccttccccagccccaaacttccctgttgcgggctgggtccttcctccctccctccttcctctgcccccacccccctcccatcaaccttgaggatggctggcaggcctggggtgtgggaggtggcagaggctcagggaaacttgacagccaattgattcctcctcgggaagttgaaagtggagagtcgtgtttgaaggtttagctgaaattaggtctcagggctattttttgcgagatggagaaggagaagtgtcagggaggggaaggcccaggggtctggcagaaactgcagataaactcaacattgggttgattatggatgcttctaggagcaggtctttggtttctttcaacaactcacttttattggtgcttggttgtgcacaccctgcataggatgctgtgacagaacaaggaacagttatctctggccaggaaggacagggaagaattcttaaagaagggactcttggggctgggctttgaggagtgtataggagttcgtcaggaaccaagggagaagagtatttcagttagtgaagtgaatagaaggaaacaagctaatggccctgtgtgattggagtgctggatgggttcagggcctggagagaagagtgagagaccttggtgggtgagctaaagcctttggactttcccctgcaggatacaagaaccacagtggatgatggctgtgagtggagctagcagtagacctctgagctgtggacctcaggttttccagctgctcaccccttttctcactcctgtagcctccctgcaccctccccatgtttcagctgtctttctgtcacacaaactcaagaaacaggcatgtgaacacaaacatgcaagctagtgggtgaccctcccgcccatgtcaccatggaaaggctgttggaaattaactggttcaacccttccctatacagaggagggactgagaatcatagacgggagggtcctttcctgaggtcacacagcatgtctagggtagggcctggagttgagcccaggtctctgtccctctcccccgcatccagtggtcctcaccccttactccttcctgtcctctcctcccagcacctggatatcagccaccccgtctgagctgagcccttctcccagcccccatcacatttcctgggaggaatgggtgttctttggtccaactgccctcggagccccacgacagctccttcccgctcatctgcacactgccccctcctggccaccaggccccagccccagctgtagagggacccgaagtttgggctgcgggctgcctgaaggaggaatgcatgacttcaggtccaggagggggcattctctgctccctgcagagccggccccgctgccccccatttgtgccccttccaagctacggaggctccgggtggctgttggggtggggaacagaaaagccagccaggctcacagatcagacaagccagatctgtcccagggtatatggggaaactgaggcctggagaggagcagcttgcccaggatacttgctggggctccctccactggcccaggctgctgtgggtccatctcagatggtcgttcacttgggacatatttatgtttgtggcccatcaaccagtggagggatgtcagccacgtggtcctggctgtaacagggcggtagtgctggacccctgggtggggtcccaccatgggcgccccagttttctccttgaagtatgaggaatttgcttagttctgctctgtgagtcagtctcctgacccagcatccggcgtgtattcagcggatgggcggggtggtggaagagcaaaccctgccccctccgccccctccaccctcactccctccatccctgcccttcacggaggctgattggtattaaactattcaaacccaaaaggaacattaccgtcattttggtctgtgtctgccttccgcggggggcatcccccttttctgcagagggagtgttggaaggtgggactcaggagttgtccggggtggccagggtggggcaaggatgttcttcggggcaggagtctggggacagggggtcttggagcctcctgaatccaagaccaggctagtctgaggcctgggacagaggtgggactgctgcagtattggtagggttgggaggctgtcgccccaccccattaatacacaggaaggtggtttcatcagctccattttacagttgaggatcccaggcttagggaggagagaggcctggcctcagcaggtctccagctggtgggtggtaggggcaggagcccagctctcgtctgcgagccttgctgcggtgtgaacgaacttactttcttctctccttttgcctttctttattctttctttcgataaatttgccatcatcaccaactatgtgtcagggcctatgccagtcattgaggatacaaagaggatgaaaacgtagttgctacctgcagaaatacagaagggccagccggggcttggtgaagtaatttccaggcaggtgaaggggaaaggacattccaggcaaaggccaggacatgggaaacagcatgagcaaatgacagcaggaactgagcgcagtttgggggctgaaatgtgaggaagtggctggaatggaagcgacaagagatccacggcagtgaacagagcagatgggatctaaggccatattaacaggagtatgaggtcctcagcaagggaggtgaggtgggccagagtaggccagagcagacatggagtgcagcatacttgaccaggctaggagagtctggagctccttcagtgggcagagaccaagactgggtggggatccagcatggggttggggggacaagcaaattgcttttctcaagcaggttctcaggagcctgttccaacccccccaacatctgtgctcagaatgcccttgggcaggggtagggggaagagcccacttcaaggatccctggaatcttctgcctcatcctggcaagtggcagctggcttgggcagtgtgagtgaggaggatggaagtgaagggaacaagccagcctctgtaccccctcctcttcctgccctggggacttccaaatacatcagaaggccatccctgtaaattccatttccccagccctgcacttaagcctgttgggcagcatggaatcagatgaactggttcccgttaaggtgtaaaggccaccaccccagtccctgccaggttcagtaactggcgagtggaatgctctctgtgggggcctttcttcctctcttcacacccactcagggtcttggggtacagtgctggcctctcccagggatagtccccccaacccagggatgaagcaggattagaatcttggccactgctcccttctgtaggatggctcaggcaagttgccccactctctttccctgtctgtaaatgggcaggaacccctccccacagagtggctgtgagggctcagtgcctggcacaaggcagcattccccacacctgttccctttgcttgtgtgaggggtgcacctccaccccacatttcctccagagccccaggtaactgggcagacccctcccacttccatacccttccgtcacggccccaaagcaacatcacccctgactgaacttctagggctcagccctggcagtagaaggtggagaggggctggaggggttcctaggggaccagagaccaagttcttaggtggtgagttcagatggagatggaggtgtctgcgcagggtggtttcctgccagttgggggcagcagagggtagcaagtggacttctgggtggctcctcccagtgagtgttgaagtcccaggggtttgtgtgtcaggggccacagggagctggcccaacaaggtgttagctggctaaacaaggtgtagaacatactgctgggggctgggagcagctcagatccgggagcacctgtcaatggctgggcctggcatgactggctgtgccagctgggcctaggttgaccagaaagccaggggttctgaaaggggaccctggtcagggacactggatggaacaaggtctggggctgggacagctgtccaccaagagaaagggcacagggtgaggtggaccagcatgtgatctgtcaggcagggctgctgcactgtggtcaccaggctggggccaacagacactcagtcactgccaccctttgatgggttataggcacctgttccacctaccactgctttgagagggggtaaggcgggcattgtgggagaggcagggtggtggtcagagcttgcactccaagtcccactggcctgggttcgaatcccagctctaccacctctgctgtctgtacgatgggggattttgaatcctgttctgcatagtactctgagtcaggccctgtgctgagcactttctaagtattgtctcatttaatccttacaactcgaggctcagataacacaaatctcactcatagaaggtgacaaaatcaaggcagatggggagtgaagagatagctgagggtggctcctctcatgggcctggatcttgaagttctcacagcgcctggaccatagcatgcagcccagtctttgctagtcagtgctgtttttctcttcatcttacggacgaggatgttgaggcccagagaggggaggtgcattgtcctgggccacacggcttgcagggacagagctgagatttggacccaggcctccccatctctctgccttatcttgtcctgcccctactttgagcaggcctggccctaggggtcagacacccctgggataggagagaactgctctcctcttgtcatcctgccctgtggccctgcaggtcctcccctttcctgggaggtgggggagcctgcatgtcaggggcaaggctcagacgccttcattttcccacctcctcatgctacaaaaatgaaacgatcaagtggtattttggtgggattacagacataattatatctgagttgtcaagcggcaattgttgtttccaaagccaggaggccctctgtggaggtggcagcagtgacatctgtttctaacacaaggctctgcatcgggatgagtaacttctcctgtggaattgcttaaagaacgtctaaaacgagctgagcttgttactcccctgctccagcaccttagatggctcccagcagggtgggggatccagctccccggcctggcattcaagccccccaggctgtcccagcttccacgcctttgtgtgggcggatccttctacccacaattcctccccatctctctctgtctccagagctcactagtgccatccagggctctgtccaggttgcagaacaccccatctgtacacgctccctcacggactctgtgacttcatgatccatcacttctgtctctcccaccagacggtggtcaccttctcaaggacagggactgtttctgatttgtctgaactcccagcactggggcaaggactcacctgtggcaggctcatgaggggcttgcggaatgaaggtgcacgagacagagagagacagggagtaaacgaattaaatggagtaagcgcagggtgagcagggaagagggtgagccgtgacctctccacttctgccagcccccacacttctgccagcccccacactgggtgtctgaggccagagtggtcccctgccttgggaggacaggtcaagacaagtgacccagcccaccagaggccagcaaggacaccagcccttgccttgaaaagtgccggacgtggtggctcatgcctgtaatcccagcattttgggaggttgaggtgggtggatcacctgaggtcaggagttctagaccagcatggtcaacatggtgaaaccctgtctctattaaaaacacaaaaaattagccgggcgtggtagcgcatgcctgtaaccccagctactatggaggctgaggcaggagaatagcttgaacctgggaggtggaggttgcagcgagctgagatcgcgccactacactctagcctgggtggcagagtgaaattccatctaaaaaaaaaaaaaaaagaaactgaccttgactccaccccatacccatgggccttctgaggccaggactcccaggtgaaccttggcccgcagatggtaaatcacccaggagaaatagcctataaaatcctctcctaaaatggtgcattttgtattctgtagtgaaaagggcttttaaaagcactgcttactcaggtggatttatggagtttcccccacccctccctcccactagtgtttactggtcctcagtcctggagctccctggggtcctgttttttccttggtggctcttggtccagggagagaaacaagatagcatctctttcctgccttgctgccttggggccccccgggccagctgggtgcctggaagtgcaggggaatcctacccaacagaagctccctgtggcccagcgcaaacctgaaagtcccaccattagtgcccatttgtccccgggagactccccccccatgtgttgtcacctgcaaatgggtcaccagggaggcacaacaaagctggaaagaattcagagatcagctagactaatccccgcattgtacagcagggaaactgagtcacagagcagcttaggtgctggctcaacgcctcagtctggtaatggaattacatgagagctttagctctggagcagcctgtctgctgtgttgaacccagctctgccgcttcctgaccgtgcggtgctgtgcaaattagttgccctttctgaacttctgttctcccatctgcacactgggttgtgagaattaaagagaagtcatgggaagctctaatacagtgcctgaagcttagacagggcttactaaacacatctgactaattctcagcagcgtgttggaagagccctcattagtattaatagcagagctgggttttgaccccagacttatagactccaaacgtggttttcttgccactcatgcagtgcacagagcacaggataggggagttttgctggggaatgagcactaaagtcagcaagccccgggaggactggctgggacctcagtgataggacgtgcaggcaggcggagatagtatagaccctgctgcaggggtgtaacctcctggtggaatcggcttccttgcagccacgaggccctgggtatccaactccccaccccttagccagggctggctgagagcttaaagagctgatgaggtgtttgtagccatccagacctctgggacaggcttattatgctaaggcaagtgtcagctggaggatctatgggacaatgagtcactccctggctgctctgggttgtcacatcccaagctgagaccttgggaatgcgtaactggtttctgttcgctgatgcccgcctaatcctgggcactggcaggtaccaggagggctctgctgacgtcctcagctcccctcccagcttcacctttaccctcttcaaatctgggctcccctctttttcctccgttagactctcagtgttccttagggttcccctttacttgggtgtcctctgccctggggaagggattacaagcccaggctcaggtggtggtgtataacttggaggctggagggacctgtgataactccaggggcctcccagggcagccagactccccgctgtcctacctctacacctctgcttatgctgtgagtctgcctggaatgcctttatgtggctatcctgccccagccaatctcagcaagcccacctgctgtcccaccttcaatgtttctaaaatgctgtcaaaagctgcctcctccagcaagtctgcccagattgctcccaagtgaaatccttttaaaaagccccacagagcactttatctttttccttttatatcattaaatatttgtgaattcattcaagaaatattgagagaatacctgccaggcgtccagcactggagacccaggttgccatggcccctgctctggaggctttacagtccagtatggggtgggggaggcactaaacaaacacacttataattacaactgtggtaagtctacagggagacctggcctagtgtggggacatccggggaggcctctaagagaaagactgaggaggtacctgaagggtgtggagagtcttccttcccaggcaggaggaacagcccaggcccttctggctaacggctgggctggtctctggtggtcaaaggaagtgatagcagtgagccgagatcgcgccactgcactccagcctgaggacagtgagagactccatgtcaaaaaaaaaaaaaaaaactatgaccatgaaagtgatcatgaccgcaatgatagcagttcgtatttattgtatgcagggaaatgggctaagtttcttccatgcgtgatctcattgaatcttcacaactacctcgtccccattttacagaagaggacacaggcatagaaggttaagtcatgagcccaaggccccagagccattaagtggtggaatcccctgctcccaccttcttccggaggaaggatgaaaattatttacattttacctggggattcctagagattgaattacccttaggacctaaagaggtgtgtcaaacagtggaatttcagctgtactgatgggcaggagaaatgtttagggcaggaagcttcagctcttgccagggaacagaactccaaaagtcacaggttctgggagctgtaagctgtaaaaacgagctttgagtgtgagagaagcaaacaaattgtccaaagtgaagccctgcgagaaaagcagggggagttatcttggaagccgttaagagctgttttcttgccttggtcctgagatctgggctcctaactctggagcttcctgggccacttgcccttcctgtcctggttgtgaatgtgagcacgtgagggccagcgtgtttagcttgtgtgtctgcacaattctgctggtgcctgatgatagctgagtacatgtgtatatttattggcttatttcagtgtatttgtatgttagcttgtatgtttcatggctgtgtatgtgtgtattcgtgtgtgtgctgatcaatgtgtatgtgtttgtgtgtgtctgtatgtgtggtggcactggggtacttgtatgcttacacatacatttctttgtgggatgcctttcctgtgtgcatttgtatgcatgcctgtccttgaacttgtgtatgtttctggccctgtatatttctctatgagaacatgtttaagtgtgtctttccaggcagtattttaactcaacagtgaccctagagtgtcagggtccagcctcttcctggggcttccctgaaggctctcaaggcctatgaattggttttctttgtttgacttaagtagtctggctaccttctccaggcggaatatgtggcgatctcactggtatgagattgtagaggattctgtgggcatagggtggcctgtgagtaggtggccaccaggaagtcaccaacttaatcccagcttaaggtgcctcccctctttcgcctgtcacagtgtctgacattccattagtgagtcattctccagctgggactctctttgatggtgcatacccttgaggggaggaggccagagaagcccggcagcctgctgagggtagagaccggggaacagggaaggggagggcaggaggaatgacgcatctgaaggatttgggcaaagccagagaattccctgatgccattagtgcctagcttggggcggcccaggcaccctggccctggcagctgctctgactttatagaatcatcaaatatcagcgctggaaaggagcttggtgatcacccagtctagcccctagtgttgtagatgggaagactgtggcccagaaagaggaagtgtgggcagactgggaggttcttgaagcgtggatgctgaagatgcaaagagcactgggcaaggagcaggggacccaggttctaatggctccgcctggtgacgctgggcaggtcccactgccctctgggcctcagatgtctcctcagtgtcactggcctggctgccctctgtgggccctcctgactctcactctgtgactctggaagcaggacccccaccacccccagcccttttctagtgcccccaccagcctgccgcggtgtcaggtcggcctgccagctcatgcacccagcatctctcccctcctggagccgagagaggtggcaggatctggatgggatcttctcctccctttcctgtttatttagatgtgcttttggcattcgggcaaagccccagaaagatattgagagacatgcctgtcaaaacagtctcccttctccaaggctctctctttggggatgggccttagaaactgccatgggaggagccgggccttggcggagggagggcccacagggttctgcctccatcctgagtactgtcttggggttccccagtgggcagctgagagcttaacgggtgacaaagttctgccaggcccacatgcccatctgcagcagcccaggtcagtctgttgaaaggggagagggtgatgaagacaggcctggaggaagaatgcaaggacaaatagatgctgggcttgggggaaggaacccgcccttgattgagcacctactatgtgctaggcatgttgctcagtgcttcgtattcagttgagaagcagtgcctttgagaccattggtgacgtggggctcccgggtgtccaggtggcggtgctgaaatgcagatccctggttccctaggggctgcctcctcggctgggagtgtggcacagacaaggacagcactgggcaaggttcccctccctgggggtgggaagcctccaggtcttcactgggagcccctgtgggacagctctgcactcagggagtgagcgggcctccctttcttccctcccgccttggctttggtccttgaggcctagtacagtgcctggggctgagtgtggggaggatgatcagagctgtccatctgtttccctatatgggggagtccccacgctgcccatcccaggggccagaactctcttggttacagtcccagctctgccactttcagcaggtgacttaacttctctgagcctgcattcccccacccggaaatccaaaacatcctgaattctgaagctcttatcctcccaaggattcctgataacaggcattgggcgctcctaggcatcctctcctagggtgggagtgattcgtcagaacagaagcttgattgctggtaatatatcatcatcatcatgtggaattcattgaaatgagtgaatgaagaaatcacgtgtcttgaattctgaaaggcctttgagacagtcgttcaggaccttctggagaagcagcagggttgtgggccagatgtcaggatggtggtgtagctctactcctggggtagtagagctgcttaagaacttgggtccttccagccaaagaccccccaggcctctgacccccactcaaactgccctgtgctttgctcagtgatatgatggaagcctagggcctaggggatcagctggcataggaagggtgtccagatgggcaatgggccatccacagagaggggcgggggctacacagctatccacgcccagccgtcagggaatgagctgggggggtggcaccaggcagcagccttgtgcagcagccttgtgcaaaagccctggggccttggttgacctcagcgtcgtggcacagctgcctgacaagtagatggggacatgggctgctttaatagaggcagagtgccccatctggggagggagccgcgggtccctgcagactgtgtaggctgcttgctgagctttagacatcagtccttgctccagtgaatgaaagctgaggcctccacctgagcagccctgcctgccccgtgcactttgggcatcgggagtctcagtgaggttgctttaggaaaaaaaaaaagtgcttgtttaagagagttcaaaactaccaaactggatgacattctgcggctccagaatcattttgcaagcatgttcattcatgtccctgtccccctgccgggcggcccacagcctccttggagagcccagactgactcccacccttggttgtcatttatccatttgggcaaaaagaggtggtggtgctcagccaacatcagtattggttgcaataaacctactactctgtgtagttgcttaatagttactgtctttctggcgacattgtacctcatttcatccttcccaggtcccataaagtaggtatcatcatcagtttattttacacatagggacactgaggttcagagaggtccagtaatcggcccacagcttgtctgaatgaagatttgaggccaagcgatgtgagggggctagagctgcccagtgggaatggtcagcaagcgtgggctcctgtggtccagcgccatctgcaggagaagtgggatacagccaggccttagtgggtgtggctagggggtcatagtctgtccctaggcaagggagtgattatggggaccacctataatctttgcagatgagctaggcccgacacatgtcactacaaacggagtgtttttaacagtcctgtacatgtatatgggaattgcacatggcttttgttgagcacttactgtcggctacactctgagcctagagctttatcagtttttcgtttttgtttttgttttttgtttttttgagatggaatcttgttttgttgcccaggccgaagtgcagtggccaaacttggctcactgcagcctccacctcctgggttcatgcaattctcctgcctcagcctcccgagtagctgggattacaggctcgtgccaccacgcccggctaatttttgtatttttagtagagacggggttttgccatcttggccaggctggtcttgaactcctgacctcaggtgatccacccgcctcagcctcccaaagtgctgggattacaggcgtgagccaccatgcctggcaactttatccacttttatctgccaatttaatcctcactgcagccccccacccacttcagagagaggcaaggggccttagctgtcttctcttgcagtgaggggtctgtggagctgggtttgacttggttcttagccactgggctgtcagtgggctccactgcggtcccggaaagtgggtatcaagaaccctgtttgactgaatgatttgcccactgcccctcaattaaaggttgtcttgggtctagaataagagtttctgacttgaagaccagtcagcccctcttcccaagttaggggctgtagctgcctccagaaatcaagtcccaggagctgcctctgaagggacagcagaaaaggtttgcctcccttcatctggcgaagagggagaggacgcccttggccctccacccccatgaaggagagcaacaagctgtgtggctgggcagagcagagcagaggactggagtccacggtccttgattaaccttgctttgtgatcttggggaagggccttccctactctggtccccagtcaccctgtaatacagcctttgcatctgagtccccttctggcagtggctttccaagatgatgagtatttgttaagtctgtcatatgcagggtcctgagctgagttctctgggggacacaggtctctaggtggatgtgtgatgtgatcggtgggtgggtcaacgggaacactctctgttccctggaagaatctcttttcccatgatctgagctccctgacctcttgaatatccatatactgctcactccataatgttcatggctatcttggccactgtgtctagcacataatggctctcattaaggtgaaagagtgaatatgacagggtattaggagtccccaaggtcattgtcagtttgggtgggggagttaccattctgagtaggctttaaggaggaggctgcttgtcagaggaacattaagtagagtcacagggggtggagtggggaagaggaagtggcacatgtgcatcaaacctcctagacgggagaaaacttttttgtttaaactcagaaataggataaagccatcaatattgctccagaatgagctacataaattgtgaaacatgcttctttgttcttcatacctcaagattgcaaaaattgtgaaattttcatcagtgtagaaaataaaaaccaagaaaaggtacaagcccattgggataacttgcttgaccacaacccctgggagaagagaacccatccaaattagccaggtgcagccccctctcctatagctggcaagaggcagagtttgggagagctcagagctcacgcagaggtgcaggcctctgcctccatgccatgtgtcctggagagcctagtgctctcctgacctgccaccgtttggggtccctctgcattaagcattgccttgtctatgggtcatgcctctggagaagggtccctcctgcagcccctaatacctaagagatatttgtggcggctgattagaataccctgatggataattccaggctgcagaggtgagaggcatttggactccactgcctgggatggccttctggtgaggtatcatttcagctgggccttgaaggacacgcagaatcccaacaggtggccacaggggtatgtctcctgtggatatgaatggctgaggaaggaggaaaaggcagaaggagaaagataggaaaagggaaatcttgaaagctcttgaattagccaggcccggaagctgggtgtccttgggtaagtcactttacctgtctgagcaagcttcttcatttgcagcaaatgtttttctgtcattttctgtctgtgcgggtgacatgagatgacttgtacagcccatgtttgaccttgtcatgttgaagatggacagatacagcccagggcctgtgccaaacatccactgctcctcttgaacacagagagggctgccaaactgaccctttattttgtgatggatggaatgtggtatttggattatgtacattaacctcaaattaaattaatatcccacttgccacctggaattgagactggggtgggtgagcccccagaacacccccctctttagaggactccccctcctccagttttcctctccctcaagctgcctgtagtttccaagcccggcaggacacaggctgtgtcccctggggcccccacatctatcccgtcacctgtaaagggaagattggtttgacctgtgtgtattgaacgcctgtctcctctgtctctgccattagaccaggagctcttgggatgggggaggtgggggattaagctctgttttcagtcagtgcaacctgttaggtggataaatggcgtgaataaggttccccaaatcttgaagcttttaatggggatactcagcaaacccttcagcccctcgggcccctccctgagctgagcactagggatcccgtcccgcaaggtggttgtccttgctggggtacatacaacggttccggggaggggccccaccctgacatcaagctactgccgctctgggaaggaaagtcgcccggaatcggggtctaagtggccagggcactgccaggcgcaggccagccggcgcctcagccgaccacgcgcccgctctcatcggtaccaccgagggctggagagcagcgacctcgcagcggaggaaggcgctttgtcaatccccgacggggtgggggggcgtggattcctccaggtgggtgtggggggtgtgacctcgcacggggaggacaagctcggaggcggcagggaggtgagcggggcggccggccctggcggtccccgggggtctccgcccctccgcagccccgccccctcgtcccggtactccccctcgccccggcgcccggggggctcgggcagcctcggccgcggtcggcgcggctcggctcggcgtcgccaaggcaacagcggcttagggggcgggggcgacgtggcgggcggggtgggctgggccgcgctgcgcgggccgggccgtcggcgctcggtcggcgggcgggcggcgcgggccgcgagctgctggggccgagcccgagcccggcccgccctcggccgcgcggccgcccagcaagggtgcgggtcccgcgcgggtcccggcccgccgccgccgcgctaaccccgcctccccttccccctcttgtccccccgtgcgcagggcttcctcagccgccgcctcaagggctccatcaagcgcaccaagagccagcccaagctggaccgcaaccacagcttccgccacatcctgccggggttccggagcgccgccgccgccgccgcggacaatgagaggtgagcccgccgccgccgcccggtcccccgcgccgccgccccgggctgcgcccctgaggacgcggggacaaagcgcgagcccggcccggggcgagccacacggcggtggggggaccccacgccgcccgccgggaacttatggggccacctcggccggactagggggcccgaggggaggaccctgtgcctccctccggggttaggtgagtagaagagaggagagcagagggtgcccgcggcggcccgggcgaggccgggcgcgaagtcccctcgcagggaagtcctgcctcgcctgtccgaggtgggcattgtttcccgggccgtgcggtgcccgaaccggggacggaagtggggcctctgccgccaggacccatccccctgccttgggagcccctgggtatcagatacaaaaggcattttcggccgggtttggccgagaccgggcgctgcccgtggtgaggggaagggtgaacatctggaggggaggagcagggggctgggccacttagggggcacatctgctctaagtagggcgcgtgctccactgggggctggcgctagcagagcgggcagtgcccaggccctgagctgggggcacagcctgaggctggggagccagggccatctcctctccagcctaggcagctgcttctctccttccctcacctctccactctcaggggtgtctcctgctttctgtttccttctcctgggccagccgggagcaggtgtggaaattccgcggggaggtggctggtggggcagaaggggagagggaggaggaggtggttcaacctgccgggagacgctggccagggagcaggcttcagctcgcaagggcaagccatcctgtcctccagggggcactgggcggacacagcctctcagggcccaggtcctcctcgagtggtgccagccacaggcacctttccacttaggcacaggcatggtgatggattccagtgccagttagaacatgtccctgcccagcctgtggaggtgaaagtacgggcaggcaccgaggagccttttcagcattcagcccgaacgtctcagaccactggcatctgccttcgtagggctgtgtccgtgttggcactccctgtaggggaggcgtaggtagcatgaaaatgtctctcccctcccccttggttctagcgggcagaggagtacaagttacagcccaactcctgcccaaggttgagtgactgtttaactgacccctagcatcttcctggagagtaacacttccacctcccagtagaatggctagacgtttaatttccatcgtcccagagccgcgctctccagtgcatcctcaccactgcctgcagctggtttcctgccccagctgccaagcccagcctgaggcgggaccctcagcctttctctgatggccctggtgccccaggggaccaggcgtgccctggcaggaagatgcagccaggccagagctcagcgctgggtgcagtcactgcgtctttgaaaatctcgcttcccatctttgttattgtctgggcggcaggccacccggtttgctgccttcctccctccaccgggcccctgccttcggctgtcttccccaggaacatgcccttctccgcgctttccttggcgggggtcaggaccctctgcacccgcatgcgggggcttgtgtacgtaccccgttttgtgtgcatgtggtggttgtccggggagcaggagagacaacaggcagtccggcttctgagtgtgtctgctctcccgggagcaggcggcatgcatgtcatgtttacctccttacagcgggaagcctgtacctagaagccggcaagtgctggctggccaccctagccagaggtcggggcatggccaagacgacctcgtgcgggtcctgccccacttggcctcaggtcagccttgccacatgctgaaggggcgcagagtgggggttgggagtgaaactacaagcctgtttctggaaacagtaggaaacggtagcggttggagcagaatgtcactggcagcggtgtggaattgtcttattaattttctataaacaaaatatggcttggtggcctctctggcacaggaagggagcctagatttcccatggacaggcagaaagactgggtttgaaatctctctacccagccttggagctgaaataggctttcccaggactggggtctcctgatttgctgctttgcttaggaacagattcgtcggctgctgctgggatggatgggcagaaatttctctggggctgtccctggagtcatcctatttggagttcagtgagtaaaaacaactatggtgaccccgcccgccccccagctcatggccaaacctggatgagtggagcagtgcctctccctgctctgatgtggtgtggttgtgatgttgaaggctgggagggcaggatgggctgtctttggcttggtttagcagcaaggaagggttgtgtcctggctccatgggacccccactggctgccatgcctctggctggggagagggtaagtgccaagacgctagcctcagtgagtgggtgggacacgagtgggaaggacggtgggggcttctagggtgtcgagcgggagtcctggtccccatggccttcccgtgtagatgagcggcacagggcactctggggcggccacttgagttctgactttggatgaatctatctggtttatatggctgctgaagaggctttgttgaatgctgtctgcgtgctccgcaagctgctgtgttggggaggtggtttttttgcgctggaattctctcatctggaggttggaaaccagttggttctgtgctgggatttttttggctccctggaaaaggagtcggtttcaggggtggggatgccgaacctggctggttgggattgagggttgctatctggttgtgaggctggggtcaggccaggcagtgcttggttggcacagctgggctctgggggctgggggctgtaggacaggcttgagccttcggacttattcttctgaaacggcctcaggggaggttgccagctggtctccacagtctctgggtccctcagacactcatttcttcttcagaagctttggcagtaagcaccaaggacaggtgatcatttctcctgggtaacaaacacatgctgcttggagcgctttccaggtgaaaggtgtgccggcaaaagcattttcattttgcacactggaaatgctgctgcttcatttacagggctgttttaatgttggtaaaagtgatatagaggatgtggttctgtcagcccagaggataatttccaagtcattcatttatttattaatgttactgaggagctaggagggtcagttggcaatattatgctttcctcattccttctctctcctgatgctgtttctgggtgactctagccctccacacctgctgggaatatgcttcctttggcatgctacctgtctaaacttaccacagtagttactctaaagtgtctgtacccccatcaagctcttcccagtcatcctggtgcggagcttagctcataaatgcaggcagctctggggcaggtaggcaaggctgctatgtgtggagttagggatcgattcccccttccagagtatgtgtgtgctggctggcgttcccacacctgaaagttactaatggtggaattccaagtgataagggactagggaaggagatacagtacttggatgttggggatggcagcttccagggaccctcacctggacctgggtaggcaggaatcaattctgccccttgtggtgagacagtccctggaggagggagagtgaggaaggttgatgaggaacaggggaaatggaagttagggtctattttcctgctttagttgctgacagtaagtgcaggcaggactgggcacccaagtctggtgtttcttgcccttgttccctcccctactatagacagggagggcctggtcctttttttggggactagtctgtctagtgtggtgatgtcaagatgatagtgcagtttagacaattgccaggagtcatgggatgtatgtgatctttggatttgaagccaagcattcctggggcaagtcacgtaaccttttgcagcctcagtttgctcatctgcagaatgggcatcatgataatcatgttgttgaagacattaacattaatacatttagcacacttttcatagaaattttctggttcagtgctgttttcttagcatttaacactgggtcttgcacatttcttaaatgtttctaaaatttaattaaataatgtgtgaaagaggttagattaatatgtcataggttttcagttaatattggtagggttaagtcacctcgtcttggtaagcctcagttttctcatccacagtgtgggaataataagcaatcatgtggcctcatcctgaggttcaagagataatagatgttgctgtgcctggtaaggtgattcgagcttaagatgggtcattattgccttaaacttaagaaacagccattattacctagagcacaggatgttttcctagggattcctgcttacacctgggaaagcaaagctctcatgtgtgttttaataatcagttttaaaagttcattgttccatcttccgtttgggtcatacttgtttttaatcatttaggcatttaggttatgtctaggttttctttattaaaaatgacactgggatttaaatccttgaatatttatctttgcctacatttctgatttttcccaaaggataaagtcttagaaacagaattactaggtctaaaaatatgaagagtttgagatttttcttagaaaaatgtcacccaccaaaatcctgtaataattcatacccctccccagtgatttttgagagtgcttacctgtttcctcacacccttcaaaacattggatgtcatcattaaagcagtctttatcgtttggataggcagaaaaagggcatttttttgttatttgcattcatttgcttgttggtgatcgaatagtgctttcctgagtttcatggccagtggcagtgcttcttttgagacttgtctattcctgtcctttgcctgagtgttctgacaagcctcttgcaggattcttggttgccctgtttggtcttcctcagctctgagaggtcccatgtaggtggatcctacacgttaaatgagcctctgccttccaagaggtatgacaaggaattcattaattacctgtaaggaaggctcacctggctgtcctctcctcctccccctcccttcttctttccaccttcctcccgtcctctcctctccataaggaaatcaggtttaattcctaatcctatcattcataaggatgccctgtatttacacagcactttaagaggtcttctgccctgtagggtaggtaggcagtgaaagggctgctctatggccaggaaaactgaggcacacagtcaaaggcatggagctggggcctatgcagaagccaggcattggaaccagatcccctctcaactgcagcattgtacttgagccccatgggcacctttgggggcagggctgaccggcccaggagcacatgattctgagtctcatctctagagaggaaggggagagccacagaatacgacctggacgtatagaagaatcaatttattttttgctttctcatttttattactctcctttagatctggagctcccttgtgtaccttcccaagatctgagctgggcaatgtttttaggaacggtggaaattagctagtgagaatgggatcagcaaggctggggtttcaaaggctggagaagcctttctttgcacaagcatatgtttgtctgtgtacgtcttttgtatgtgttgcaagtgtgcacctgtcctcatgaagatgtgtgtacattatatgttaatgtccttatacatgtctgtgcatttaattgagttaatacaggtgaagtatttggaacagtgcctggtacatcatatggggtgagactgtataaagttgctgttttgggaggccaaatacaggcaattgcatatgattcaatctatgtgttcaggttaagtgttggctactattgttattatcgtgtgttttcttcttgggtatgcatctgccagttgtttgtacatgtctgtgtacgtataccctgttgtgcccatgtgtatagtgtgttctgtgagcactcacgtgcatacttgtgtgcatgtgtgcactttctgtctgggtgcatggacactgagctggccggtgtgtgaataagctccccaccttcttggggagaacttcccagagagcaactctttgcctcccctctcaccttcggttaccaggcagagcccaggcccaggtgccaggcctgacaggtgccatgggactgctttcattctcctccaggtagccctgcctatttccaggccccatattagaatatgcaaatcgactctttaatggaattcctttgcaaaatattacttgaaccagtaagttaattaccaggctctaattaatggctattttagaaggccacagaacaaaactggaggagatcataagagaccaaaaaggcaagagggaaaagcatccagctcccccagtcggcttggtgactccttccagggtggcagggtgtgcttagcttctctctgctctgagctgccagtccgctcccttgtgatgattggctgtaggtgagtgaatgctccccttgcacgaagaacctctggtggttctagtctcttggccatcagtgcatccatctgcgaggtgtgtccagggcagcatctgcctggggatggggtgagaatgtgtggatagcaagcctgggctgaggtggggctgcaccaacctcagagcagccgggtgacatgcccaaggcttgggctgtgggagggacagtcactggccactctgttttcccacccctccaggggcctgtgggctatcgctgcagggaagccaccccccagtcagagcctgggagcctgaggcagcttctcacagccaactctccaccaagggcccaactccctcccctccacttctctctgagttcgcggtggagtcacctgtggcccatgtgtgatgtgagagcttgcttgcacaccccttccttgggctcttggtcaggccctgcctctgtgtgactatgggcaagccgtggttcctctctgcccctccttccactcatccatcaagaggagtgattgtacctgcccacctacctcaaagggctggctggaaactcgcaggagattttagtgatggaaatgataggggagtttcccctcccagctggggcatgcctgtgttaccatcccctcctgagatagaggtcgtctctgtcctctgtgagcatgtggctgtcctcccttgtgtatacaggccatgccacctaccacctgggcatgcacacatgcacgtccttgtggaagccaccagcgtgcagcagatatcccctctgggccacaggggcgatggggtgaaaacctacgggagggagagggaaacagggtccatccccacccacaaaggttcctggcaccctgcctgagaattgggggaggggtaagaagtgatcccaaggctggaggtcaggccccatcttgagggttgcccaaggagtaagacctcccttcctcccctccctgtgttggcttaggaggcctgcgttctgcagacccctagggttatccccttgtagacctcagctgatgacagtgccttggcggtgggctgcttggaggcactaacagagcactttgcgccctgtgccagaggcatttagagttggcctgtgaataactgagtgtgcttaaattttttaagagggatggactgactggtgggcagcctgagactgtactttttagaggttgcgcaaaaggcagcctgagaaggtttttgccacctccacccttctgccgcccccctcagttttcccatctctcaggtggggctagtggtacattactgcatcagatgctctgccgagtgagttactccttagcacaatgagatcccacctccacttttcagtgggcagcccccacgggggaccagagcagcccttctccctactgtcccagttaaccatcacctcctgcctgtcgccctaacttttctggaacaagcagggcccttgttttcaggctgggcctgattgtaaaagagtgcactggggagagatagagatggcaccagggtagcatgggccctaatttgatgcgacgttgtcatgggaagttttcataccaagggcagtgaattagtgtagtgtctccctgtgcccaatgactaaggggaagttaatttcatgctctgcctttttgacattcataatcagaacgttgtattgcagctgcagattgttagcaggtgaaggatgtgtgagcctcaacaattactgtttctggcttgggaggagattgattaatagattgttcccagccccaccccctctgcttcttactcccgtttgtgctttctttccctctttccaacttcaccacatttcgtcaggaaactaagtggctatgactaaatccctactcttgtactagaaacccagggcagaggaggacctgtatgaggaggaattgcctaggacacctgataaaatgcagattcttggactccaccccagaccttctgaattataccctctgggtggggtggtcttgcttccccaaagtttgctccttttgcagaggggcaggcattgtgccccagctgtgtgctagtgacttgcctaagcacttcctgtgctgtattcttactgatttctcatagcaagagggctttttgtttcccatttcacaggtgtagaaactgaaacccgatgtgtgagtggcccaaagtcacacactggaggaaacccagtaaccaggcaagtccattccctggttgatgtcaagatcccaccagtagcatgtcatgtcctttctcattaaggctgtgatgccttttgaaataaaccctctccctcctcagagaagtagcagtagcccccttctgtgcttgcactaggctcccattgtgaaaagctcctgcacaccagtgccctgggtctcctgagggtgcttggaacagtcagggcattcatgactgatctgcattttgcagctgtggtgggtgacgctcagagaggtgaaggggcagaggcaaggggagctggaacttgtctcctaactccaggtccagtgctcagcccacctgtgccaccaaggcctgctcttctcactgacttcctggttgcaggtggggaaactgaggttcagggaagtgtacccatttacttaggattgagcgagcagcagtaatgcaattcaaggtccgccaagtcaaattccacaggacaggactagtcagcattttaggagtggatcttgtacccttggctcccgcctgagaatggaagtcttccagaccccttggaaggtctcggctcagggaagagaatgactgtctttggagagactaggccaggtggggtgggctgcactcccaactaaggaggccaggcacctgctagggtagtgggaggtgatgggggatctgcgcctgtgaggtgggcagctggaatctgaacctagggctgccttactctaaaaccccgtcccccacaccgccagttgccatggaggttaatagcaggcgttcctgagtcagtctcccagagctggtccaaggcccagctccaccaactgcttccctctgagcttgagattctctatttcagtaaagcaaaaacaaaaacagaaactagtgtctcggggcccaggattcctggcacagggctggcccagtctttcctgggctttggtttactgcattcaggtcatgaagcccctggagctgctggagaatggagccatcgtagcggggcgggggacggagatgcctttcatcctgctctgttcatggcaagctgcttctgatgctgtgatagccccacccactgccccacccactgcccgtgagtggccactcaggatgggccaggctctgtgcctggtgctttctcgtgcatttgctcagctcattcttactatagccctttgaaggatacgtgctattactgtccccattttacagagaagaaaattgagtcacagagagactgagcagcttgttgaagtcctacagctcataagtggcagagctgggtttcaaacccaggcggttggctttattatgtaaggccccctgtcaagcaccgttctacatagcctgtgctcatgtgctctgtttcacattacatgttctgtcagtgatcacactgataaaccacctggtcacttaagaagcacccgtgtggcaggcattatgcatggtatgtgcatcatctctgattttcttgactaccctcattttatccttcccccattttacaggtgaggaaactggccttagagtataaaatcacatagccaggattagcctcaggttacctttagaatctagatctctttgtatccacagccagggccctctctagtatattagctgacatggctgggcacatcctatgcgccaggccctgctctctacacttcactgagctgaactcacttcaccctcacagcagcccgtgagatatatactgttgcagtccctggttcacagccaaggaagcgtgagttgcatggccagaaatggcagagctgggattaaacccaagccgtctggctcccacatcagtgtttttaaccaccccacagtactgccctctccctatcttacaggtgaggaatttgaggttccaagaggtaaaagtcacttgccctgagtcggacagcaggtgagtggcatagacaggatttgcatccaggtctttctagaatgtttttctgtctcccaggtgagagaatgtggctgctgccaggcggtttggaagtatgtcccaagggcacccggggctctgctgggggctgctgtgggtgcccaagtcctgaggtggtaggggtggcagtggaggcaggccttaagaaagagtcatcaggatgtgagggcaggctcggctcagtgactgcccctcctatttgcaacttatcacttattctcaagcgtctttttctgtggctcccccagggttctgggctcccacacctcttttcacctgggcagagctgatgagctgtggctgcgtttggatctgttgacttataatgctgggtgaggtggggcaggtacaagaaggggtcgtggctaggctaagtggccttccatagcacttcccttcctccaaggtcagaagaacatagaggtgacttccatcactacccaggagggtgaaggcaaacagggtgatgatgatggtggccagggactcccccaccagcctctgctcaggatctgtgggaagatgggtgaagctggcgctgaaatccccagccaccccaggcagtactacagcagactcaccaagggagttgcctattgtgctgcaggccacactgccctggtgtcaccaccttctgtggactggatgtgacgtagggaagtggtagtgccagggccagatgttctgcccggagcccatccagcctgcctgaggtggtcttgctcagttgccctaggatcataaagtccacgaatttgatggttgtttatgaggatagtgaaaacctattccagagagtttcagaattaaggaaaaatggagctggcagagaacttagtcttagagtctgtacaagccaggggtgcacttgaaaggccttgttgtctttcgtacctctgctgcttattgttcagagcacccataggagtgttttcccgaactgggttccatggaacacattcttaaagatgttaatgggcgtttgcgatgagagaattccatagtccaaacaggactggggagcagtctgtccagagtttctcaaactcagtgtcagaggttcttggaggtgagacttgatgttttactccagtggggtgattgtgtgctcaaatacattttacatcctcaaattttgcttcctcattcttgggaaatcatttgtgacccaggagatgaaaggccctgagaggtcctgcaatgaagaagtcagttttgctttgtttaatccagggtttcctgtcccccaaccccaggagcagctgttaacatctgtggagcagttgtattttgcagaacattatttggtaaacattcttttgaggtgttatgtctcctcagaagcatgttttggaggaaactctggaagtgttccctgcccttagtacctgcaggagtaagccttgaatgatggcattgctggctcagcaacaggtagtgggtcatatgtatttgaaaaaagtcatcctaggtcctcaatatcattcctcaaagcagctaccagctctcctgtgtgtgggatggggcctggctctggtcagagagccctctgtggggaggtggtttgtctgggaccagcctaggcctagggtgtaggggtttattcccctttttgcaggctgggtggcgtccatgtacctggcagcttgggctctgggcctccccatccccctctagactccctctgcagaaggcagtggtcaggcagaggctgcccacagatttgcataattgcaccgtctcctgaataattaataaagctctgtccttgctgggagcaaagtctgcaccgttatggatgggtttgccatggataggtttgccggagctcttccaggggagccgatggttcctggactcctctgcttttcctggcatggagcccccagagagaggagagggcactgggttgggggctggctctggtgtgtccacatggctcccatagcatgataaagggcaggtgaggggtagtgtgtgctttcttccaggatccacacatgggttttctagcacacagatggtttaggattcttattcttcttgctttctgtggtcccactaaccctttttctctgaagtgtgatcagctgttgtggggcttagccctcttttctggcagcccaaagggagcaatgcttatgcagcaggtaagagcaatgagggccagttttcagacaagtaggggagggggaggtgtttctgcttggggcccttcttcaatccctcccagtttctgggcttgttaaagttggaggtagcctgggagtgattcctatttgagatttctaaatcccttttgatggtgtttcattgacgtgaattttccctctgacgcatggccttgtctccctttcatgctagaaaggagagtaaggggtgggcctgcccccaacatgtggttgacattggggaaagtcctagagtctcgccacgccatgagtactcttgaaaggccttgctccaaaccttctgtaggagtatttcttaaatgggttctactgaacatattcttacagatgttaatgggtacttgggatgagggaattccacagtccaaacaggtccagtgaaccaagtcagtcagtttctttaatgcatggctccttagaggctttaatgtgccagcgtgtgtctgagcccctgggagggcgtacaggatgctctgcttcccatccacaccggcactccagagtgttggcacatctccagcaatggggagctctttccacctggagcggcccctgcccttggaggacagtgccaactcttgtaaacttccccctttgtggagcttccccaggcagcatttatgtggcaccttgtcattccccacatggccctcacaccagctaggaaggtggcagggcagggattattccattttatagataaggtaactgaggcccagagcgggtaattgtctcacccaggggcacatagagttgatatttaaacccacgtctgccagctgggccttcagctctttcctcttggccaccaagaaaccatttgctccctggatagatgtcagtatgttggctggggtggggccttaggacctgttgctctgacagtgcccttcccagcttgcttggagtgtctagagggtggaggcaggagtgagtgaaagccttccttcagggtttccaagctgtggggcctggctttggagccatttgtagacaggggcctaaaaccgccagatgcctgcttatcacaccattcccgactctcacccttttccttctcctgccctcttgttgtagggtgggaatgtttgaggtgccccagaaactgggtatgcactcaactttggccagtagtggtggtgcaggggtgaaggagcagggcagggggttccagctggcttgtctttctccaggccttcctgagagttactggacaagcttggtggatggccaggggagcctggggtgaatttgttcacagcagctgggcttagaggctgcaccggggctgagatgtgacttcaggactcaggccaactgttttatatctcaaaaatcttgggttataccatacaccatgaaaggtactgcattgccacacctgacacttccattctggtcccaaagcaagccacacgggggctctctgatgaacagaatcctgctctgctgacacatggacccagatccagatccgacgccctgacttcctccatgatctgggacaagtcacctaatctctgaacctctgtctcctcatttttaaatgggcaccatgattgtggtgcctacctcccagggttttgaggtctacatgggatcatgttacatggtaatttgatcatattctgtcatcacacacatgtactcacattctcacacaccatgcttttgcttttttgtttgagatcccacaacctgccagcacatccaacccagtcttcccagggtccacctcatcatatatatagcaagagatggcccaagacacatgaagtgatgtttgtgctgacatttctcccacttagaaaatcaatattctgtggtctgcctaattgctctgttgctgctaaatgagtcattatggagggaaaatagcaaatgcattgtgagattaatgggagaaaatggttggcaaatgactttggtttgcttcggaaactctgagaaggtgttactacgtgaaatctgcagagccatgcaaggccgagtcctgagcagcagggagacaggcaggcagctattggcgctgtgagcctcccttttagggcggggcaccgattcaaatattatagaggctggactcaggagttactgagtgatgaagtcaggagccaacaatgggacaggtgctctgacaacctggtctcaaagaagaggatactcttcagttagagccagttacatgccaggcatggtgctaagctgagggatgtaatggtgagcaaaaccagccccagctcctcccctagtggaggacacaggctgaagtgcaattgtcctacaggtgactgtgtaattgcaattaaggcatgtgtcctgaaggcagtgagagcccagatctgaagggtttcatctggtgggggtggtggggagggcctccccgatgacaaaaggagtaagctgagctctcagggaagaaccttctgggcagtgggagaactcgtgcagtcctgttgggtcttataggaggggctgccacgggacttgtatggccttaaccctccagccatcctaagaagtggatatttctcgtttcacaagcgaggaaaccaggactgaaggtggttaagagacttgccagaggtcatagaacccttaaatggcagagtccagatttgaacatggggaacccatgccaaggggcatgccccgttgctccagggagctggccttggcacttgctgccctgagggtgtctctttagctagggttaaggaccttgctcctgcagggcagggggcttcatggtggttgcctgagagtctttagagagagggttataggactctagaaagggggaaccctcaacagccacagccaggcctctttgctttcttgggtctttgcttccttttaatgacagcgtgacttgggtagttttctttttctttttctttctttcttttttttttttttgagacagagtctttctcggtagcccaggctggagtggagtgcagtggcaggatctcggctcactgcaagctccgcctcccaggttcacaccattcttctgcctcagcctcccgagtagctgggactacaggcacctaccaccacacccggctaatttttttgtatttttagtacagacagggtttcactgtgttagccaggatggtgtcgatctcctgacctcgtgatctgcctgcctcggcctcccaaagtgctgggattacaggcctgagccactgcacccggccatgacttgggtagttttctgatgatcaaaatgccaggtcaactagtgactcctctttcaaaaggctctgtaaataacacacttctctccccatgaaatgggttggtttattccctgcctctaatcccagctggactgtcatcaggtagggcctatcagttgtctgcagaggtgggtggaggtatggtcacctgaaggtgcttctaaggaaggtgcttgtgagttcttgtaaacttcccaaggtttcaggagtggcagcagcagataaggagagtccaggcatttcctgtgggcattatgaaggagcaccagaggcatcccactttgtcttggtgcctggttgtagctgagcatcatagtgccatgagaacctggtaaaaagattctggagccccaccctgggagggtcagggtcacaggtctaaggggggctctggaatctgtattcctgacaagccccaggtgattctgagacccactcaagtgttgagatccccagttagcagctctggattcttccgtctctgagagggtcacaggcctccaagggatggtggtagtggagtatacttttatcttcctgggctggatgtaacactgcctgctgccagctcaggaagccaggccacactgtgcccatagggccacatgtaaggcagagcctggtgctcagctgaaccccaggtgaggcaggaacttggcctgggatgctttgctactgctattgtccggaaactgagtttcatcccaaacttaggtctgactggctgtgccctgtcccttgcgaaatataaactgcagcccttcctggcgagaggctaagtgtttatgtgggctggttgcagagcccagctctttgtcctgctcaggttccatttccaaaataattctgcttagttcttcacataaacagcagggcccttagagactggccctgagagtatagaggggatccatccccgtcccagcaccccagtgtgctgccaggagacaccagtgggcatcctggggttggtacccagtgttctgctttctgctcttgctcctgcctccttggaggccaggagccacatgcctgaggcccaggaatgtgatggggaaacaagtttcccagattggccaaagaccaagatgggagccattgcaccaaggtaggcgtggtaattcagtgccacacgtttcccatggtcaaccctgcagtcactcttcccgctaagtcaaagtgtccactttgctgttgtcaggttatttggtgaatttctgtagcctctaatgatgagtagtgagtgggaactctgtctcctttgctcctagcatctaccaggaagactgtttcagcgaaggcaagtctcatacggagctgggccttgtgcacgcatgtgtcatagcaagcactcatgaagatgggccggggtctcttgtgagcctggggcagccccgggggaatcttgccctcagagaagcacttttcaccatagattcacccctaggtgatgctatgcagtcctcatggtaggaattaccaacttccacatcggctcaggggccaggatcttctaagtggtgggacttcgggtcaagcagaattctggactctgagtggcttcctaagagttggcctgctgcttagcctgaatctcagggcaggtacagacaggatggcggtgcccacaagccctttttatccagctagctaaaagccactcattgtactagcagaagcacgtttctacacatgagaggaaacactgcatccttttcggtgcagttttacagaaaactatttaacgcgcttgctgtagctacccctggcatgtggatcctgagaatccgcccctgggcagattcactcgggtcacacacttgtttatcacacggtgtgtaattgaccttagtatgtgtgcatatggacagcataccacgtagcagtgccctgggcattctgacctgcccctcctggcgtgtttactcctctctacccatagttctggctgccgtgcctcaccctgccatgtggcaaccacatgccgggcactgagaggaggcccgggtgagagtctggtcagggtcctgccttcctgggagcattctcctttgagcaccacctccctcttctttctctcttcccctccccctccagtcctggacttcctgctgttcctggtccagggggagggcaggtaccacacagtgatgggtgtcctgcaagctgagcctgggttgttgaaactcctggcccagaagcctctagcccccagccaaggtccctgtttgggccgcgttatgacagtcttgtttccggcatgtcaggtgtgaccatgccttctgtctcgatggctttccttgctggtggtctccctgtggggctgctgtccttatgtgtcgaggtttcagaatggccaggctcttggtggggaggccctggatggacatgctggtggcccaggagagagcgacccatcctcagtccctctgcctgtgaaggcagactctcctgcctgccctggcaacagctctgcgccagcctgtctgtgtggctgccggcagccgcggctcctgactggctgccttctcccagctccctcacgccctccaaggctcactcactcactcactggctgctcgcagcagctcaggcagcgttcaggcagatggtgcaagggaggcgtgggcgggggtcctcggactctgcttgcacacccccatgtgtgggtgaggtcacgcccaagggatgtcatcaacatacgctgggatgggcttggtgccattcaagatctatctgcagggacaacaaaacccgacttcgaggtcttaacaagtccctcgggagtctccagactcgagtccttacactgcatcacccactcccctgagccaccaggccctggtctcctctcttgacccacaggacactgcaggcaaatgctgggttgaaattccagctctgccgcttgtcagctgtgactttagagaacttagctaactctgcaaaatgggggatagtatcagttcatggcattgtcaagaggaatgaatgggatttgcagctaaatgcttagcagcacctggcgaagagcaagcgcaggagatgagttaaccgggattgtgtcatggagttccccggctcgtgttgtgtcctctctctggaatgctgccttctctttcccctgtgattcctactttgatcatacctgtctttcagatcctagctccttctgcttaaagctggctctgctccccctcccccagtcctaggcggacttcaaggccttcactttgctcctcattttttgtgcctgatttctgtgcttcacttttgggtccactccacctggtagcaagggggtgcttcatgagggcactggatgggatctcttgacatatacatgtcctgccctcactggtagaacaaagcaagaatctagctccttcatagctcctcagaacctccgggcaaacctggctatggtccccttactccctgcaaagtggagcacatgaccaagcccattcgcaaggccttaggatgagaagtcatagtgatccctttacagatgggcagctgaggccaggaatgaggaggggatgtacccaaggacacgtaagaagttggagaccctggcctgctgcttctgtgcctctctgctgggggttggggaaggagtcgggccatctctcaaggaatccgggaggacttcacagaagaagtgacaggagttaaggcttgaaagaggatgggttcatcacataaccaaggcagggaagggcatttaggcagagggaaccccatgagcctagtgctcagaggatgaaaaccttactctcttcctgggacagtcattgagactgcagtgagaggtgggaaagggcctggagcatcgggagagtgagaaatcattgggaagggcaggagccagcattaaggagaggcagagatagagaaggtgagctggttagaggcttggcccagacccgtgtatgtgccagattagactgggggagggagggcccaaggataagcatccctttgtgccaggtgcttcatctcttagtgcttacagtgacctgagaggtgtgcttgttttagagatggggaaaccagatgcagagaggtttggtggcttgaccaaggtctcatgggctagtaagaggcagagccaaaatgtgaaccaccagcaacatgactctcaagtcctctggtggccaccacctgtttgggatggggtggcagctcctctcagggcaggggccctgtagtctactccccaagcaggtgtgggggccactaagagagtgtatggcccacaaggttcattgttaggtcctaggcatgtgtccaggtgcacatagacaccttcagtgaaccagattgttcaccaagcctggcaactctcttcaactaggccctattggaaaatgggtaggatgccaggcagcctacagctgggcagctccaactctggcctctgttgcccagcagccaaaaggtggggctcttgtaagacctgagcccctcaccccgtgtctgggtcctgtagcatttcggtccttacttccttgcagttctcagggtgtggcagttgtctgtgtgcctcattgagtggcagatctcctgtggaccgggcccaggcctcctctctgggcctctggcacctagcatacagcctggcccagcacaggtgcccagtaaatgtttgtaccatgaacgatacattgagcacctactgcgtgccgggtgctgtgccaggccctggaataattaacttcggcatggcactttatgattcacagagctcctcccagtccccttaggagtctgattgtctcagatcaggtatttatttccctgttttccaaacaaggaaactgaagcttaggaagaggagggctgtagcctcaggtcacatctgtcagccagggaggggcagaaccagccccagccactgcccactccctgctccctgggcagtgagcacaccctggaggctgacagctgtttctttccaacccctgcaagcaagagatagagcaccctggctggcagggaagccaggccaacagagaatccgtatcccaggaagcagggctcctgggggctgcagtaggcacctggctcatcctcagggctccacccagcaggagcaggggcctcctcttccactaccaaggacctggttgctggggacaattgtctgtgtctggggtaagtcagaggcaggagaacaaagagaacccttcctgccaatgccactctgaccttgaaaaccctgtggggtttcatttactcgaaagaaaaagggaagagttggttaccagcttcaaagaggggcagacctcctgcaggcgagcattgaggaaaccttggctttgtgagttattgctgccaaatttctccttttcagtttaacagaagtcctggggatcactgtccatgggctggggaggaatccggccaccttttttagaaggcaggaaggtgccaggatcactgctcttactttggttgggctctaggtggcacagcttctgatgtaaagatcaaataacaatagggagatctggatgcagcctgaaggctcaccccagtgtcttgctgcaggtgtgcccagctgtgggaccaggaccccaggaaggaagggcattgttctgtccctgctgtgggagtctctcagggaagcagcatagcactcaggaaatcctgggcaccgtgaagggctgtgtatttattccttattccacaaacaataagcaagtccctgctgtgtgccaggcactgagtgggatcctgggagaaggattgatgtgttgtgggtcctgccatgtcctgcctgttgtgacagtccaccactgtagtggcatctgtgtccatctggagagtacatgttctgctaaggggggcagcagcccctgcaccatggcactgggcatttggtggcaggcctttggatttataagagaagccaaaaatctagaggtttttttgtgacattttaaaatttcacatctttaaatgttggcatttgattcaaaacttaaaaatgtcaacactgtgtgggctaaacaaaacatgaatgttgaccaaatacagctcatactctttagttaaagacctttatcttaaaggttggataaaacccagatgggcagagggcaataggcaaggtcttcctggggagggggcacctggacagaggggtggtggtgggaatctgcctgagcattttcagggcagctgggaactgggaagtgaggggcggaactgatggggccccgcccagtcatggaatccttgcatgccctggacgtgcagatgtgctgcaggcctgacccaggctgccctgagagcctccagctgtgtccatccctccagtcagcagcgtttacccaacaccgtcacataaatgaggctttggccaggcaggagctcaaggaagaagggtcatgagtatttaagagaaacctccaggacacacgatcctcatctccaggaaagctatggaatgggggctgtcgatctctccgttgtccatgcatgcatgtgacctcccctgccatttgcatttgctctcctgcagctccttcaggttctgggctgggccaggagggctttcgcaagaacacctaaaaacccttggaaaggggctcttcccttctcctcttcctgttcctcccctgcaggagtcctgcattgttcagagggtttgaacggctctggccaaagcctgtttgggtgtcttcctgttcggggcctgcagttatgactcctccctttttctcagtttctccccgtctgccactccccccatgatccatatttgagtttcttctaaatgatcacctgcagaaatggtccttcagattgtcccagagatttgcccaggaaactttcattgagcccctgctgtatgcagggccttgggccagagaggggactgaaacccagggctcccactgactggtagagtagacagccacacagacagccagtgggtttgaagaagaaactcaagtgtggatcatagggggagtgacagacagggggaagaaacagaaaaagggaagttatgactgcaggcctacctgggaggctgaggcaggagtatcctttgagcccaggagtttgagtctagcctgggcaatataatgagactatgtttcaaaacaagataagttaaaaaaattgcaagtatagagtaccaaattccaggcactataaagcaaaaagtaacaaaacttctatgccactcccaccatagaatctcttactccaccaaaagccacggtggactgttggtcggggactttttctgcagacttttttctgtggccaatgaaatgatcttatccacgtccctgtgcctggaacaggccacccagcatgctcctgcttccttggcctgcagaaggactgagggagcctagctgccatggcccagagccctctctcccagcacccacagcctttagtcccatagctatggtgctgggtggccctccatggacggagtctgtggctctggaaggaagagggcatggtcttttcccagcagtgccacacagactcaggccgtgggctgcctcagccagcagagagggaggcaacaagcaggctggctggctgaggacttcgagagcacacagggctcccccaagggatcctcgggattgagttatttctgtttttgctcacctgtgcctggccctggggacagagacaggaatcagctgcagtccctgcctccctggaggagctcccagtcaggtgggagaggtgcctgccacccctgatgaaactgtctctacctcaggttctccctgctgctcagaacaagggacagccaggaaccaggtccagggaggagtgtggtctgggctcaggggagccctggaggaagtggattgtaagctaagattgggaggaactctccccaccctggtttcacctgatgggtcttgcagcacctcctgctcagtaagcaaagaactggatgggaaagaactgacatctgtgcaatgcagacacttggagctgttgtttcatttagagtacagtgttttcccctagaggccctgtgtggatgaagacacagagctggttgaggattgggcccagggggtagggcggagaggagggtgcatggtgaagatttgtctacttaggctggtgagcccactcggggtggagcactggcttaaggcaccttggccctgcccactgctgctgggggaccttgatcaaggtacttcatcatcagtcaaatggggcagagagccctgcccacctcccagggcttctctgagagtctgcctgacagtctttctgccttgggagcagcagagcctgggcccatgttggggatgatgaggatgttgatggtaacgaggatagtgacagggacaacatgggggattgtttactgaggattccctcatgctggcgcttgaggtgacacaccctcactgtgtgctgtgtgccctgccgtcatggctccccactggaccctgcaccgagccctagacttgctcccctttcagtcagttctctgcccaggactcacttgttatgactcaggttccttcctgtggaccctgaatggggagcacctgactacctttccagttgcacttcccccacccctccccgttccctgccccacgagtgctccagcatacatctttgtccttgttccctcttcttctcttcctggaacattctttgttcagatacctgtgtggcttgctgccccacttcattcaagtgtgaatccaaccacccggtcaaacacagccccctcccatcctctagccaggacctggctctgcatttgtctctagctgttgagttcacctgatgttgttacatacttcgtgtacttttcccacactctagactgtacgccacatgcaagtagaacatttatgtcttgtaccctgatgtgtctctggcacctagaatcgggcctgacagaaagttggtgaatgaacaaacaaacatttaattgtaccccataatgtggacacattgctgtctacattttacagatggggaaactagactcaaagaagaggtggattgactagcccaatgtcatacagctgcagcgggacagaaccaggattttagcccagtgtctgtggcctctgagccctgtctcagccagtagacactcccacctccccagaatctaggatggacaggaatgggagggggcccaaaaaggtgggtaggattttaccctggggattgaggggtgaggccaaggagggggtgaaccatgagggtctgagagggccaggggcaggtcggggacttcagtgagggtcaggacagggaacccttgcaagacagtctctgaggagagcacccccggcaccagccactcccaaagaccagccgcctccaggcttcttgtgctggctttggttcctggcacgatttctgtttcccagaggagctcaggcctggcccggcttcccagggtggagaaacacatggtgagtgagtgtgtgtgcgcgcgtgtgtatgtgtgtgtgtgtccagccttgctgtttgcgttgtcgtcacgtcttcttaatcagcctatttctgggagcgatgacttcatctcctgtgattctcgacacagccattgtcaggcgtccatggaaagattgggcctggcagtgtccatattcccctaacgagccaggttgggagagccaattggcgggccctggtctgacctggctcgggggcttatggtcaggtctatctccaagagactccactgcccagggtcacccttagatttggcctctttgaccctggggtacccagtgcagcaaattccagccattgtttcctgtgtgcttcctctgtgtacgctctgctgtgggcagggggtaggggacagtcacgccaatctctgccctcaagggctcctgctgtctgacaatgcagatgagtcaacagacctcaccttagagggtctgtgcgtgaacagagaagggagtgaggactctaccagcgctcaaggaaggctccactgagttggtggttgggccacagggtgaaggtgaaggttcccttgagggagggaaagggcttttgggcatgccaggtagttgggtatcactgggcacggggcggctatgtgttgggcctggagagtgcaaggaatagaggggaaggtagcaggaaggcagcagggtatggacttgatcctgaaagtagctgggaaggattttaagaagagatgggacctagatagatcagcgattttagaagcaagtccttggctgtgtgtaagggtaggtgtggaaaggtgtgacactgggaaatatatacagtatttggtttcttggcacacgactcctgaaatccttagattctttaaagtgatgtctacttatttgctaatgagttgactgatggctggcagcccctaggtggcttcagaaaggggtcacagaaaagaccaaggcaggattagagggttagaactttcagcccaccccacagcccctggggcagggagagaggctgaaggttaagttagtcgccaatggctagtgctttaatcaatcatgcctatgaaatgaagcttttataaaaacccaaaaggacaaagcttggggagctttcagatagctgaatgcttggaggttcctggagggttcctagggagggcatggaagctccacgcccctgcccacatacctctccctatgcatcttttcattggtatccctttataataaactggcaaacagaagtaaatatttccctgagttctgtgagctgttgcagcaaattaatcaaacccaaagaggggtttatgggaaacccagttgatagccagtcggtgggaagcactggtaaaccaacacggggcttgcaattggcatctgaaggatggggggatagtcttggggactgagccctcaacctgtggatctgatgctatctccaggtagataatgtcaaaatggaacaaaattagaagacatctgggctggtgtctgctgcccaactaatcgcctgcttggtgtgtggggacaacccctcccgcccccaccacatctggtgttggaagtattctgctttgtgagagtataaaaggaaaggggagaaactgagttgggttttttctacagaaggtgtctgggacagggaggaagaagctggcgactgagggctcagccctgtattcccctttatcttcaaggggaagggtctctttccccaccctactccctcatactgtacttcaggaactggtgccaaggccagctgagctcagccaactgccaggagctcagttccccaccctggaatgctggtgggctggggatgggaggtggagaggagtagggatgtggggtggtctctcaaaaatattgtgctggacttactgcaggcttatgtatagctttgcctggaggcagggggacagttgaatgagtgccagcaggataaagcactctgaggggtgataccttgtgtcctgctcttggcctggacactcgttaccccctcacctccattccccatctggagatccctcaagccccaccttgaagcagagacactgatgtaacagttcaggctcctgagctgcactgcccgcggtgaagctgcttcccagcgttgtggcctctagcaggtgacttgctctgtagtgagttttagtttccctctctgtcaaatggggacaaaaagtgtaaccatttcctaagatacttgtgaggattaacatatgttttaagagggaggcttagcagagtgcctacacatagaggcgccagcgtgccttagcatggcagtgggggtgtggcaagggtgagggcaactgtcttcaccataattgccaaggctcccttaggattcaaaaagccagggatcagaggagtgaggaggtgtgatgggaaggcccaacaggagagcctgtttggcggagcaagaaagagactgggccctcctctccaccactctgtgacctcatctctctgagcctcaatttcttggcccaaagaaatggtgagaaaaggaatgttgggggcccccactgcaggggcaggtgaggagctaatgtatctgttaacacttgtgtatttccttttccctcaaagccgagaatcagctgcttgcctctctcttgggcaggcatccagcagggaaatgctttgaaggaagccttcccaagctgagggtagccaggctctcccacctccatctccttctcccacacagggctgtctgccttctcccttgtccctgagccaccacccatcatcctttgcatgccttcattgttccagctgctcagtgttgtctttttttgtaagaaaacagtccagttcagcaaacatttcataagcacctgttgtctgcctgggtcttttttgggctcagggcatacaggggatggttaaagtaccaacccagctattataggggagaatattatggaattgttttgaaagatctgaatgcaaaagcagcgatcccagggcaggaggccctgggttctaggcccttgttctcctttcttcccttgggaccttgggcaactcatggtacttctctgaatctcagtttcttcaactcaaaacccaggtcagtctgttgatgcccctggttctaagaggcatcctgtgatcagttttggagtaacaccctgtgggctcatcagttagagaggtctgtgggaactgcagtttcaggccatagtgagaacagcagaccccagagggaggagtctgatccaagtttgagtcccgttccactgcagcttttgctagttgcgtgaatttgggcccgttccttaactcaaagactgggttttctcagatgtaaggtaggcattgtgatatgcctgccaatagggaactcacgggtcttattaatgctactgagatcctgttctcagatacagggcctgctccatgccaagaatacatacccaaccctccagagctccttgtatcagagaggggcattagtgcccaacttaagaggagccagtgagggtggggaggcctgcagctggcccaggagctctagaatgactgcaggtgggctgggcaggggcttcttgatttcaacatgcactagtgtggaattctatctagctttatgaagaaaatgtttgctaatgttattaatagtgtaaatgagatttggggagggggggacagccaggggaaggggttatttaaacacacttcaaagaacacccttctccagtatttaagcagcatcatttgcatatgtaataattgtgctaattataggtggcctcatctgttaacgacaagtttgcctggttgagttacattattgtaatcacccaatcataattctctggcatgcttttcactaaagataacaacaacaatagtaataatgcctgtcattttttagtcttttgctctgtgccaggcttcctcccaggtacttgacagtcatcagctcatttaatcttcacaacacctctgtgtcccaaagattcttatctcctgtgtacagaggatgaaactgaagtgcagagaggttaggtaacctccctgggctcacacagccaagagccaagggggaaatgccagctcacaggctctttccactggctagcactacttctctggggacacttgacatgtgttctcaccctttatctctaagccttctctttctcatttgctcctctcagaaacccccattttaccgaagaggaagctgagaccctaggagagaatttggggctgggcaggaggtgagcccaggtccccttaactttatgacaaaaccagccccagcatacccacctgccttcctgcagtaagggatggagggcagcagctcctccatgttctcctctgaagtcttgaaggagtccagccttgaggaggagggtgctccttacctctgctatcaagcggggtaggcctggcctctccatcaaagaaattataagtaaacaggtgggaggactctagcacaccattaattgctttacataggttgtcattaaatcagagatagtatatggatggctggtggccagatgtagcccacaaacaggtctcatttggcccgatggggtggaaagtttttgttttgtttgtttgtttaaaatcattcaccaacactagaacatttaccttaaacattcacctgaaaatctaggtttctggcttctattttaagacagatgtggcttcagtgggcctatattcctatagggcaaataattggtttcttcagttcacctcagactccttttctccctggaaggctcctcccagcaaccttgggaggtgtgtgggtgtgtgtggggttatagtgttcccattctgcagataaggagcctggggcccagaggggaccagctgggccactccacaaagctgttggtaaggtcaggacttgaacctccatcctcatctccacgctttgtggttctcactccacctcgctgcctcccagccatgtccaacccccactggccgccaaggaaagaaagaaacttttcacaggcctaatgactcaaaaataagcaacagtaagcctgaagaactgttcctatctccctcctctccctttccacccttcccgaggccagaagggacatgggaaacctattcatttaaactcaattattttctcgaagacagaacagaactgaattgggtcaacggctatatttgctgtgctcagctgttttcctgcaacagcatcacccgccgggtctgttgctgggccctgcactgccaggctcaccaattatagctccatattggtagccattccttgggaagcttggctcaggaagagaggagtcagtgaatagaacctatcaccctctcctttttcgcccagcaggctgcaggggcagggtccctgggccagtgtgggtccaggctccgtaactgtgtggtcagcacctccagggacctaggcttcaggtattagacatttaatgtccaacacctatctgtaggggaggtgcatctgcagcagagtttctgcagatgaggaaactaaggcttagagaaatgaagtgcttgtgggagaagcagaccttagagtcaggcacagctggcactttctagctgtgtgactgggagcaaagaacctgactgccttgctcctctgatcccacctgtaaaggaggcataatttgacatacctcacagggctgggctgtcctgttgtagatgggttgcagtgtacatgccagcagcctgcccagggttaaccctcctggcaatgagaagtgtgcaccatgtgccaggcacagaagttggtgggggcacagaagttgttggggacacagatctctgaagaaggatatgcttggacatcgttctctccagatacctttcctgattccctgctcccaaactggaaatgctcctgcagtctctctaggtcccctgttggtccaggccctgccctggacacttttcaccacatcttctgggcctacagcctgttatatatatttttttgtttggtcctaatatttgtgtaccttcccctctctactaaactgccagtttcctgaggacagaccgggtgtcttgttcacctgtttggctcctggtgtcacttccttcccagctgggtggccttggactggttgtttaacccggtgcacctgttttcacatctgtaaaatgggaacagtgatctctctccctctggcacatgtcacggcaaggaggttaatatcacacatggcagcactgtgccagatggctgacggaatggagtctagagaaacattgggaggaaaccaaagcagaggctgcccctctgccctccttgaagtagggagtatctaaggaggcgaggcatagtggttataaatgctgtcttgttatagaattgctgtctggttacatggggaagtgggaacagagtggtggccagtgggcctttccttgtctcctccagcttcttgctgcagagtgctgggcttgccccaagaatggactgctctggcctcacggtcatctcagattgcccagtggggctggggctggggctggggctggggctggttgggacctacccacaaccactgacctccaggtgcccgggttacagtacctggcattagatctcttcttttggggtctgggtgtagagcaggatctccctgcactaccccacgatattattgctgatctcagggttggggagtgtttagggaggcttgagttccctgacctttcaggaagcatgcatgtgaacttaggcctcggacctcgtgtagacatggtgtggtgatggctgggccctactctggtggggtggacgcaggacttggggactaagcagcaagtgacctagccacagacacagaaatggctctggtgggagcccagagtggcactggactctctggggggccagggctgaggggactgcccaggttgatcccggcgtcttgtacaatagaaccagcagtcacaggctcataaactgtaaccgtcctctttccgttgcctcttggtagcattcagcccctggcacactatgctgggtgttgcctagtacttggcactgtgacaaccaagaaagaaaaatgctgaccatgtctcactgcttgttcgagtaaatttactctatattttttagagatgtcgcatgggtgggaatttactcccactaaatgttttgatggaaacattacatttttggagtgaacatgtgtcaacatcactgtggagaaaaggttccaggattctctgccagccaaagtcatcaccataagacactggttgggggcctggcaggcggaggtgatgcgaccaggctggtagtggggcagaggtagccagatgggtaggagtctgcctggctggtctggagggagaaggggatctgagctgggggaactgaataggtggtgaggaggaagggagtagggaggctgtgggctgatgacatacattaaccacccacacagctcaaaactaggtgagtggggagcttgaggggcaggaacagcgagcagaggctctgaagtgttgaacactggcagctcagacccgagggacaggctggggccagattgttgagggtcctagaatcccagctcccaccagtaactagcgatgtgagcttgggcaacttttccaacctttctgtgcttctgcttcatttttagtaaaatgtagcatggatagccacagcttatggctctttggagaattaaaggagataatgtctgtaaaatacctagcgctgggcctggcacatagcaggtgccaggacacatttgctgtttgttggtgatgataaagccacacaagtatagatgtactcacataaattaacagctggtgcactgaaactacttcctgagttggccctcaatctaataccaagtttgttttctcaccttcagctaagtacaactggtctcttcagaagcccttgtggtctcttgtaccttgtggtacaactgtggtctcttcagaagcccttattcatgaacagccaggccctgggctgactttgctacagggcatccgtctctggccctgtacctgtttctgtcctacagacggatcctggggcagttggtgggttttagcagcaccctcctttagaaaaagcctctgtcgtctgctcagtctctagaaagaagagatgtctcctctcccaggatgcatgcatctctccccacgggatgtacaggcgttgcctggaggtattccttgacagtcgtggcccagactctcttgtcattcaaagaaatgggaagctttttgaggtgggagggtttcagactcccccagagagcctagcccagttgctgaggacatcttcagatctgaaagaagataagacaggagcatcctgagctctggggagaagacggcctgcagtgtgtgtttctccatcactcacgtatggaatcccttaggccctgagaaccagagatgaacagaccccaaggaaggcctggcagggcaggcagcagtagccaggagaagggagtcagaccaggaattcaggcagagaaagggagagattgtgcactttcctgtgcccggggccactgggaaggcttccctcaggtgggggcagttgagctgggccttgaaaggtgaatgaaaattagaaatgggggcaggaggggagcctcgtggaagcaagtgtgtgactgtgagaaaggcggggcatgcactgggaagagtaaaaaaggaggcgggctttgtgactgttccctgtgataagctccaggtataaaggtgaggagtgtgcagggacaggtaggacctactgatgggcgaggcccaaggctctggacttgttctgtggccacaggagatgctgaaaccaggagtgactggatcagggcagcttctgaaattcccccagctacacgtggccaagaatggtcactgtgtactctgtacttttatgtgttactaaagatgttgctgggccgggcgcggtggctcacgcctgtaatcccagcactttgggaggccgaggcgggtggatcacgaggtcaggagatcgagaccatcctggctaacaaggtgaaaccccgtctctactaaaaatacaaaaaattagccgggcgcggtggcgggcgcctgtagtcccagctactcgggaggctgaggcaggagaatggcgtgaacccaggaagcggagcttgcagtgagccgagattgcgccattgcagtccgcagtccggcctgggcaacagagcgagactccgtctcaaaaaaaaaaaaaaaaaagatgttgctgaaaggagcctgcaagcggttatgcagacttctgagcaggggctaggaaggagggcacagaggaagcaacagcagacagctggtgagggtgggagacccactggagatggacatattctgaccctcagatgcaggctcatttcttgttagctcgtgactccttactatgagagctgtcatgcaaaggaaaaggccctgttatggggccctgttttcttataacaagatattataacagtggggatgactcaacaaggggatgcttcttgcctgagggaaatctaggaaggcttccaggaggaaggactattcagattgaggagggaaatgagggggctagtaaaaggtgcaaaaacagttgtctaggggtgaggcacactttcagatgtagttgggtcaacttgagcaaatgacttagctattccagacttgatttcatctataaagtggtcacagtatctgccttgcctgtttgttgccatgatcatgaaatcagtgggagcagacctggcttggagcctgcaccctggagggaggtggtgctcagaggatgcactctgctttcgccttccttgttggtttggctgctctggagccaaagggggcttctctggccccaggacctctctgagactctatcttcacctctcccctgctaggaaattttattaagacattggataaacagatgacagctctgagggaaaacttctcagaaggaaggggacaggacactaagtgctcttctggctgggagccttttaggcagtagggggagctgggtagctcttggggctttggtggtgtggactgatgcaaatgtgggcagacggggtggtgttggatcgcctggcctgtgtgcacggcagagctgagcctggagcctagggcccagcaggggatggaatgagtcagggactttccaggttgggggctgctgctggggacacagtaaaacctcttcaccagtcctgcaataaccccagacagtatcctgcctgcctgtacacagtaggtgcctgacacagtctgcagcttagtaggagctcagtagttgtttgctaaaacagtggcgcaggctgcaactgccaaggactgacctggggtctgtgatgccttagggtggaggatgcgaggagctgggcaggacctaggtgggactccagggtgtggctcttgttctcccactggcttctgttcatatttacatcgggaggctgtgcagcctcgggttcctggcctcagctggattagcacctcttgctggtggctgtaagggaaggaggtgtgacggtatgataccctgcatgtggtagagactcagtaagtggataccattgcggtggcttctctggtgggatgggaaaaagggtgaccccaggcaaaaatacctggttggctgggtgtgcctttcccctaggggtttttgtttccgtgtttaaatgacccaaggatgaatctccaggccagcaggtggggcaggggtttgtctgcccccaggcttctgggcgcaatcgggaacctgggcagctcacacagctcaccagcctgtctcctccttccctgcacccgacctttcccttctgtcctgccggactagccgggtgctttccagaagagaaaacccgggactgctgcctgggaacccagtgcccttctcagcttaggctgtctagacccaagtcggggtggggagtcgggttaggggatcatggtagacaaacccctggccttgtctggacctcagttgtgttcacttgttaaaatgttggaatggaaatgtggggaagggagagcgtttgccttggttgggtctctgggctgcgctggtctaagcccgacgaacccggggtggggccagcgggccaaactggaatgcgccgcgagagccgggccgcgggcaagtgaggggctggcggggccggtggggacccagactcgcacgaaggtggggaaggagttgcaaggcagagacccccgaacccctgctccagggcctgcgcgtcccgcccgcccggcgtgccgaagcgcagcggcgggtcgctagcgggaagtggctgcagctggaggcagctggccgcggaatgtcacccgctgccgggcctgggaagggctgggcctactgctgtggggtggggggcgggtgggagggcccggagggctggggctggggcgggccgcttccgggctggagagggtttggggcgtggcgcagcccgacgttagtccggaatgctctgggagcagcgctcgggggaggttaccttggcgcgcccccaaatcttttggttcccccgctcctgccttccactgctctggctgacctggctcagaccagcttgaaaaatgcattcattcattcagtacatctgtcgagtgtctactctgtgccaggctctggttcgaggtgtgctgggcttaccggggcgtgcaggtccctgttctcgtggaccggacattttcatgataggtaaaagacagaaacaaacaagatgacttcagggtagttctgtggagaaaatgaagcagggtgataacttgggaggtgggagttgcccctttagctagagagatcagggaaggcctcttcctgggacgggactttgggtctgagaccggaatgaggaggaaccagccttgcccacggaatggcaaatacaaaggcccagaggcggggcttggggcaggatatgaccttgggcggagtcagtatgttaggggaggagcctgtagggacggctcctccctctttcttgacccagacctctgtgctctggcctgcaccctgcccagaggccccagagggcgacttgccatggctggaagcgatagtttgctttcaggagtgtttctcgtcttcttggacctggaggttgtgccatgtggttacctgcatggaagacggtaattttccacttgtttcctgaaggacacggaaacctttagatgttgtcatcactgtgtttatttaagtcatttttgaaatttcagcttggaagacacagattcagcacgtgcctttcgggaaggggaagccctcctaggctcacctcttagatgccggcccggccgagaggccccctaatctgtccagaagagctgcctgggtgagcaccacccttgggaatgggcctctgtggccttggacttcttagtgacaacttcggcaagatcctgggccgggccggaggggctgctcactggagacctggccatcttcggaagccagatctggctccagagcctcgggggttgcaagtgcccagaaccaggtcagcagagaggcctgcgctcccaccacaaaggtctgtttgaagtcctgtgggagggaggacagacaccacaaggaaacttcctccccggtgggtgggtctccagccaggtatggggtcagacaggctttggtcgggctggagggtgaggagctgtttctccaatgaggcctggtcccaggactgagtcctcagtgggcagggcttgttggtgtgctgtgaaagtgcaaggcttgggggactgaatgggggactcccttggacatgggaggaagagtgaaggtgggggctggggttgctaaactggttcctcctccagggaagcaagccctgccctcctggagcttccaacctggaggtggggaggtgggctggggggaagctttagggcacagctcagagaaggccaagcaggcaaggttgtggggcacctggaaggtgggtgtccagcggcctggctgctgacctaggctcagggaaccagcatttggtgggtgagctgtgaggaacgggccttgaccctaggctgcagggctaatgagggcctttagccagaggctcccagcacaggtgagggggaaactgccggtgcccctgtgccctcgcgctctcccagccctgcctctctgagacagatttaataatccatgtctgtctctctctctctcagttagtattgcaggagggaagctttacttctaaaacttttattgatccagacactaataaaagtaaagggtttttttttcttctttcctgctagagcaaagaacatcagacatcagagccctaaaacacaaatgtgttttcctcctccctagatctgggagggagttgtgggttggccttgttcagatctagcctcttcaagaagcctccctaacttctcaggcctgcagtcatccacctgttccagagcagttaaacgaaactgccacatgtgcctctgtctgaccccagaaggctgggctgtcacagaagctttccttcccacctgaggtccccagggttagggagagacgccatgggaggcattcaagacctggctcttgatttcttgtgtctctcagggtttggggtttggttctttggctgctctggtctttgtttttgcatcttgatttcatcaggacttactgagctcttatactgtgtcagaccctctcttaagacacagaaatacaacacgtagagcttggccacacacagcttaccttgtgatgggagaggcagataagaaataagcagagaaacaaagtgattctgctttgggaaacatagtgaagttcccctactgaaatgtgagtcagggaatttctgtctgctttgttcagcacctgtgttcccagtgcctaaatagtgcttggcacatagtttgcacttaaatatttgctagctgcatgagcaagatgctatgaaggaaacaagccaagtgttccactagggagtaatgggggcagggcaggacctgttgtagatggagcagtcagggaaggattgagttgcagaagatgccagaagcctgccagtttgctgttagagtgtgctggagcaagaactcctagcctagggagcagcaagtacaaagtccttgagcaggaaacagagactttggtgtgtgtggtggggggcgttgggtgttgctggatgaggtcagagagtaggtaggtcatgactgccaatgtctttcacctgggtagcagttcagatttattcagtgcagtggggagtaattgaaggcttttaaggtgaggagttcagtaatctgatttgcatttctgaagggtccctctgactcccctggtaggggtaaggggaagcccagtggttggggaggctgcccggacagcaggctgcctggggaagatggagaggagtaaacaggtatgagggatttcagagggggtagcagcaggatttgtgttggattggattccaaaggccagggaaaggaagggctcctggctttgctactgaggctccacgctggacatttcagacgtgaagctccgagaggtgtcccagaggcgctgtcaggcaagcatggagacacatgggtccggagctcagaggaggatagggctggggatgcacttaggagtcgtgagcatgctggaggtatttagagctatgggagtggaaagaatcaccaaaggaaagtgttgtgctaaggaagtgtctccgaaacagccctgaggagctccagcactgggaggaaaggaggtgaggtgctagcagcctgtgagaacagaggaaagctggagcagggtggcctgggttcacggggtagtaaggcacagaaactggttgactttggcaacatgaaggcctttggtgtcctcaaggagacccagtggggtcggaacagacaggtgtgttgagtaggaaaaggaggtgagaaggtggcggggacagcagtgagcaaagaagtgcgtgaggacccagctggcccaggatgttgaggaggggagggccagggaggggcctgaatgttctctgtccacagcgtaggtttaccagcagcagctgacccagtggatctcagcctggagattctgattcaggagcgccgataggccccccacagtgatctttcccagctctctgagccctctccacccactctctggaaggcttgctcactgtgccctgtcacgtttttggactgaatgctgagtctgttgaccctgtgttccccccgtcagcccctttccttacaccagtctctctgggtccacggcccctaaataagagtatcctggagcctggcttacctcaagtgtctttcccagagcagagctagacttcctttacaccaagggtatttctctggaaggctcctttatgtgtttggcttctggagaagtttgagatgttttacacaatattttggtggccaggagctctaaccctcacccccaacaaccctgccccaagactttttgctggctctggggagggttcagaatgcatcggcttgagggtgcagggttggcatacacagctggagataacataatgtctgctagacgcctggtgggtttcagtgtctgttgaatgaatggcactcagatatttgagtttggggttcccagttgctttgttaaatgcttttcctggttaaccagtgtttttacatctgttatctgcaggggatagtgtattacctcattttatacatgaggaaactgagactcaggaaagtaaaaggatttgtccagggttccacagttgctaaatgacacgaccagaattggagcctgggcctgcaaaacccccaaattgggcctcttcttactgactaatcctgggggtgaggtagtaagggtggaggttaaggcacccaggtctcctactacctctcaagaatagtggccagatgttctgccagggctccaaggcattccttctgcctcccacccacctgtttcctctgatgctcgacaccccctcctctccccacatgcgcaccagatgcattcggctccaggaagataggatgaggcaagccttgaaccttgtcaaaccttggggatgcttgcggcaaagcctgtagcttttggggaggctgtttctgcaacaggcgtgtagggtggccctatggctgatgcagaactccccataggtaaggtgagctcagccggatcacatgccatgaccacacgtgagcatggaagacaaacccagagaggtctggaggcagggcccctcccggagaggcaaagccacttatgctgcctcctgacagcctgtgtggctttaggctctcgcttccctcctgctctgcccctcctactcacccagcagacttgcttagtctgggcttgggtagccgagacaggttgttttcaggcctcaaaggatttgggccacagcccagcctttctcagtgtttctcaccttctgtccttgtctccttatgggacggagcaggcatctggaaggtggcagaggggtgatcctgcctggaaatcactgagggtccttttatagaaagaaacaggctgagagaaagaaatgacttggccacagtcactacccaagaggctagtttcctgtttgtgcctccagctatcctggggcagcttccttcaccccagctgaaagcaggcttttgttacgcgctcactctcagcaaggctttgttctgtatcctctcggcaatcctatgaggtaaataatattatgtccatttttgaggaggaaacagagaggcctagggaggtgacttaacctgtccaagaccacacaggttacaagtggcagagtccgggtttgaacatagcctggcttcagagctcattttctttaccatcaggctacacattctgaaacttatttggcttccaggcatcacagaaacagagtgagggtgctaaatccttgaatgactcagcccctgtggagttggacctgaagacgcctcctggccttggcttttctgaccaaagatagccacactgggcagggcacggtggctcatgcctataatcccagcactttgggaggccaaggtgggtggatcacctgaggtcaggaatttgaaaccagcctgaccaacatggtgaaaccccgtctctactaaaaaaatacaaaattagccaggtgtggtggcccatgcctgtaatcctagctactcgggaggctgaggcaagacaatcacttgaacccgggaggcagaggttgtagtgagctgagattgcgccgttgcactccagcctgggcaacaagtgtgaaactccatctcaaaaaaagaagatagccacacagcacctactgtgggcccagccactccaggtgccagaatggcccacgcttctctgagggtgccgtagaccaggtgctgagacgcagacagtccagtctctcttcccttcctctccccatcccactcctattccagtaactaggcaggccctgcccacccttgccccaggagaagctccactcttgtggacagtggaagggcctcggccagcttgcctgagtcctgggcttggaaggacggttgcccccatctgccttggttccctgcacctgccttttcttccccgcatcctccctctgactgcccgcttttctctgctttcaccttcccctagtgttcctcttctttcgtgttgtgtcagaagccatgatttccagtcttctcatctggaagatgaaggaaaagatagacccgaccccacagggttctgaggctcaaactgaaagcctggtggtggggcacctgtgacaggtgagactcctcatcttgcccccttctttcttcatcatgaagaagagacactggaggatgtggagcagttggggcctgtggtccaggtgggatggagcagtcagggcctcgtggagggagcaggtgggaggaatactctggctgggatggacctcacggggtgtggcccagctttgcagctgacttgcatgaagtcctggcgagctggggagcccttgcaccctcagcttcctcatctgaaagatggggcaatggtaatgcctgtctgtggagtggtgaggaacaaatgagactgggccacaaagtacccagtgctgtgcccagcacatagtgcccaaagagggctgctatctcatctcttattcctgagatttagcttccttgttttgtttttgagctctttgggaccttcgtggactttgaatttttactattgttcattgtgtctaaaatcttcctcagaagccgagggcctctaacctgatcatgaattttggagtttcgttttttgttttttttttctttcctgtttcctgtataggaaaaagggacctgtacctttaagaccccagcaggcccaagtaggacactggccctttaaaagcacattacagagagttggaacatagcctttgttgaactagccatgattagtcccagcggacagggctggagtggcatgtctgggatcagggcggggctaggctggccggggccagccaggagcagcggacagcaggaaggctcgcccggccactcggcttcccgagcctggtggctatgctgagggatggtgagtggcctgagcggagcttagaataagagaggctgggaaagccaggagggaggcagccccagagcccagggagacctgaatgagctgggcggcagcagacaccctcagtgagtgactgtcacaggagctggtcccaggagggactccggagcaccctgcccctctacgcagacatccactgccggcccagaatgtagaaacggttaggagggacctgtgaaaaagcgggacaccaagaagagcactgttgctgtttttagtttttaaaataagaggaagcccagtgtgagttgctctgtcccccaggcgcggtgtcccctgtggtgtgctccgttgagaactgggaaatgccagggactgctgacaagttttctgagctgaggagcttggcctttgctctgagtggccgaacctttggctggctgggtggggctgcactggggtttgggggccatggtatctctgccccagctcctcagcagaactttgttttttcttctcccttcctgcttccactccctagtccatggggcccaggcccactgggtggggtggaggcgggtgggagactgggaagactgtgtctgggccaggagcgtgttttggctctgcttgaatatttgaaacagttgtcagaagccagatcactttggtgtggtagcgtctttactgggcaagtacccatttctgaaaaaaagtcagaggaaggattgggcttgttacagccaagtctcagtgcaggttggtcctaaccgccttcattgccacggctgggggcggatgagactgcctgccagtaggtgtcctcactgttttacagacagccacccaggaggtgacaaaggcagggctcagtacatttctggtgacccaggcttcctgtagttacttaaaagttggtgcatttggtcataggatttttgtaggtttggtgaaaacctgaggcattgacgggcagtgaagagagtttgaagttagagccgaagtgccaggtgtcctgttccacccttgtgcctgtgaatcgtgacctcaggcaagctgtttgacctctctgagcctctgcttcagagcagagggcgtgtgcataggcgcaaaccctggagggagttgtcagttctgggggaggctttgtggaggtggtggcctttgagccaggcgtagacggataggctgctggagtgcaaccccttgagcagaggcgtgcagtttagcatgatgagccagatagggccaagcagggctggcatggctgggttgggacctggaaacgtagcttgggaagctggattttaagtatgttgctttctcagttggaatcctgtgggccaggtggcagatgacagggctagcttagcctggagtcagccagtgtggaatgtgggggaaaagggcagacggtgaagtctgacacactggccttgggaagcccctggaggtgtcagagcctcattctttgctgcagttagctgtgtgagggtcagaggtgcagagacagccctacgtgcccttcccaggtatgtgggctcactgtggtgtggtgggtgagcaggtacttgagagccacaggtggctttggtgcatggtcactggcagcaggaggaactcagcagccacactcctggttttctttgacatggtgtctgagtttctgcccgtgccagtggcctggaaccctgtggcttactgagagccactttcctgctgtcttgctgctgctgaacactcctggttgtctcctgctagttacagcctgagaagcagctgctctggtgccccacgcagacttccagacctcaggctttgggaggaatgggcagctgacatccctaggcccatagccccacatgctcctgcagacatagtggaggcgctcagtggctgtgctggtggctggatcaactctgcccaggattggggcggggcgggggtggggggtggggtgccttagcatgatacatcttcagcaaattgtgccaggaggcaagggcaacccacttgacggggtaggatgctgaggtgcaggagaggcccatccgaggtccacactcctttggcccagtgctccttcccttcacatcttcacctcttctgtctctctgagctcaagctgccaacaaggagggagcctctgtcccaaatggtggctggaattgaagagatagctgagctggagtgaccactggggctggagtctagggtgccagcatttgttcgtagatttgtccatctcttcttaaatgggggtctttcagattcctgcttaaaacggcctgtactctggagcctgctcttgaggtaagggggtagagcaggtgaggtggtctggggtcagttggcagaggggctttttgagagctcagctgtggggggagagtcaggaaggatctgctgggcagagtgagagacagatcttggaaatgtcctgggcccaggaagaagccaggagcatccagagaagtgctggcaggaagggcgtgcgggaagggacagaatgccccgggaaggcagtctcagcccagcctggatggtaatgggggcagccagggctggttactgaggctgtgtatggagagctcgctgcaggtcagttgagccctacagccaaaggtggtggtgtccctgttttccagatgagaaaactgaggcacacaggttaattaatttgaccaaagtcacagagttttgtgtgtgtgtttttaaggaaccatgcctgcttaccaccttcaaccagcatagtgccaggagctggggctctgcggacaaatggctggtccttggttgaggcaggaaacctggccctcaaggatgagggaaggaggccatccctagatcaccccaacatgaatggcccacctggtcccaggaagtaacgtggcatggcgcccaggtcttgggtggaggagatgagatggaagaagatgctgcctctgcccccgcattctagggggggcccagcatgagctaaggagggcttcctggatgtggagagctgggaggaattagataagccagaggggaagcacttcctggagaatggaaatactcgcttttcagctaatttattcttttgtttcattatcatttcccacttgggtctcgcatccccagggccctgaggtggctgttggaggtatttatggtcccgggtggggtgcagggaccagttagaaaccagtcccactcaggccatgatgcatgggtgtgttcacatgtgaggaggagccaggcacagactgagctcaaggagagggaacgcatgggtcagggccttgaaacattctcaggagtggtgctgagtggagagatgggggagggcagtgggctagcatgtttgtggtgggctctagagcttgggagcttcagagttgctgcagttgtggctggggttggagccccaggtgctgtgcagggaggttgggctcttttcctggggctgggggtagggggactgtcactctccctaaactttctgagcagccaggctaagcctgatagtttttcctacaggccagggagggctgcagggttgtccctgctcagaagcaagaggggcaggggcagctagcccacagctcacttctgatttgcccaccactcaccctcgtcaatgagtgttccttagatgctttttttttttttttttcccctgagacagagtctcgctctgtcgcccaggctggagtgcagtggcactatcttggctcactgcaagctccacctctcaggttcacaccattctcctgcctcagcctcccgagtagctgggactacaggcgcccgccatcacgcccagctaattttttgtatttttggtagagatggggtttcaccgtgttagccaggatggtctcgatctcctgacctcatgatccacctgcctcggcctcccaaagtgctgggattacaggcgtgagccaccgcgcccggcctagatgctcttcttttaaaattcagggcacttcgctgttctgctgaggtttatgaatgtttaaaaactgctttgcggtccccaaagtaatttgacaagtctgacagctattgattaaaaacccgaaattattcaggctgcaggatgacttgggggattagatggaaagttttttgtttcttctctctctctctgcacccctcctcccccgcaaaaaaaaaaaaaagaaagaaagaaataagatgtggaaaggtaaatgtgttcctgaatgttttttgaaaactccattaggcttgcacagtttatacggggagaggatgttgaaggctgcctctcattcaggagccagtaccagcgccctctcgaatccctggtctctccggagctttggcccaagtcaccccaggcagcagtgagatgttgctattacattattacaggtgatggtagtggtgttggtagcagttatgatagtttatggtcccttatgttctagggagttgacgtagggtttttgtggctttctctgaagtagctcagcgtgtgaggaaatggcacctagaagggggaggaaactcgttcagggtctgtgatagaccttagatacagctgggatagagaccaaagactccttcagggagaggaacgggccgttgctggggtgctgggctgattggatgcctggcctccaggcctgactcactgtgaggtaggtgccaagagtgtcccacagagggtgaccaggccgttagaaccccagctttcacttctggaccatgtgacctagccaagccactccctgtctctaagcctcagtttcctctttagagaacgtcctaaagcttccattgagccttttggattaactggctcatgtattgccccatgagccagggcttgtgggacctgagcttgaatacccactctccctttcttctggggcagtgctgccttttgtgcagagttgttgggagaaggccatgagatgatgtttgtactttggtgagaacacctgcaactggcacatggtaggtgcttagtaagtggctgttaggtccaggctgccacagtgtcattcatttagtcagcctatattgggcaccacgggacaccaggcctcacagcaagcatgagctgtcccatcctcctgttttggttgcagggtgtggaccctcctctgccagctcagccctgtgatgtggggggaagcacaggctcccaggggtgagggcagaaggccacgtgtctccctgtctcacagcccagggcgttctgtgtgtatgggggcgtcacaactgggtcttggtgactgctaggacctaccccttaccttggcctgagggaaccctgggttgagagggaccacgcctctgggccctgtcatccctggaagacttcccaggcagggcagccaacctttctgcctttttaggacaggctctgtctccccagggccctgggagccaccaggcggctgcattcctctcctctcccctgggatcccagctgggccaggagtgagcactggccttctgagcagccggttcccaggccagcggggcaaggctgggcttggggagagagctctgctggacatactaggcagggcgctgccctgtttatgtcctgccgtttgattcccagcaggtcagtgcattcattgtgaccatgtccagactctctttttttccagtgtgggcagacgcttctagcacagcctctggacctgcctggctatgacaggcagaagcatgattggcatgttctgacctgatgaggcctagagagtctgctgaagtcctgactgcagaaccatcaggtcctgccagcctttgggtgggcaccaactctgtggagacaaaccttgtccaggatttctcttccttccagacctggttggggtagtggacagtggcttgggaccacacaggctggtgggctggagactggggctggagatggctgtgcttgggagtcccaggcagaggggctaaaggggcctcctcacgggggtctactgcccactgctaggcacaccttcttctcctttcatttcgcctcaggaaatgaagggctttttaaagaaatttgaggcatcccagagcatttgggcagatatgattgatccccattttgcagatggggaaaactgaggcatggagaacgtaaagcgtttgagtcgtcacgggacaggaacaggaaacagcctgggaagtccatatcttgtcactccaaattgtcaaaagtgtgacctatcccagaaatgtcagccttgatagcagcgtgtgcatcgttcaccagtgttgttcatagctgtgtctccagctcctgacatcgtggctggcaatgaggtgggcgaatggaacagaccaaagaggcatgaacagttatgagcaatggatgggagtcactgacacccctgccctcctgagcctcccgcctgcatggtctcatttgatccttagagcaacccatgaggaaggtgtgtcgttatcctcactacggatggggaaactgagtcctagagagtcgaatgacttaaagtatccaaggttgtatatttcataaggaatagagactcggtttgctctgcagccaggcacccttgacactaggccctctgtcctcctgcccgctcgcagctgcaggtgcatttctgtagcattcacttgtgtgcgcgcgcgcgtgtgtgtgtgtgtttaatcccagggcccactgcactgcctgcctttgtgtactgcccagcccattaccctggcagccctagccatgcagcatgtcttaaaggggccccccggctcctgcttgcacactttcagagacagggagcccactctctctaaaaccagacgagcctggcccattcaaggacagctgtgactgagctggaagtggcctctcctggtcccagccttgccctttggggccacacagggcagctccctctgagctttcgagatttggagggtgaccctgagccccttattttccgaccaaacaatcccactctcaattccccccacccaatagttgggaacacccttgctgtgtcaagtagggatttttaattactgtaagtttcggtttggggtcctttccctccttggaataatgagtttgctgagcttttgtgtcaccgaccttttaagagaaaaaaggatcagagttgaaaaacagcttgtgggttggctggaacgctatcagataaggctaggccccaggagccaggacagtgtccccattgttctgccaccagccctcacaatgagctgctgttgggccctggcgctgtctctcatagcagctccccgtgccttgtgcccacgtttcctgggccctgggcaggggctgccccatccctgtatcccccggtccttccttccccacctggagtgagtgggtcacagctagtgggttagctggctgtggacctttccctgctgcccggctgctgtggacctttccccctgcccggctgctgtggacctttccctgctgcccggctgctgtggacctttccccctgcccggctgctatggacctttccctgctgcccagctgctgtgggccacccctggacgatggaaaggccaagccaaggctggtgcagttagtcttgaactccgctgaactgggttcacatctgactcggccacttgctatgcatgtgatcttgggcaggtcacctcaactttctgggtgcacctttttagtcctgacaggattgtcacgagaattaagtggaacaggtgggagattgtggccctgagccgggcttaggtagcgtagtgtgagctgtctgtctggagagaccagggaccactttgtggtggtgacattgggctggcccttgaaaactgaggaaggactttgtttggcaaagaagtggagggagaggcagaatggacaggctcaggagactgcttggacatggacccctggaggataagagtttgcagctttgtcaggaagtagctggggaggagagtccaggtcacttgtgcgaggggcctttcaggagggctcggacaccagcttgaggcatctgggacttgattatcttacaggccatgaggcgagagaggagggacaggagtgaggccatgccaggcggagtggcttgttcagtggagggtgctgctttggtctagacaggagaaggccagtggaactcccattcccctctgccctcccatgccctggccaagctcctctgtagcagcggagtccagggcaggtcaccctagccatggccttggctgtcccgtgtgtgacctggatgtcatggtgccacctccttcctgggagcagtaaggattccatgccatggaggacaggtaaagggtctctagtccctggagcgctgtcatggggctagtgatctgccatgtttagaagggtctcggctggggccgtggggagcagtgtgcagccacagagggtaggatgagcctcctaaccttgagagggatgggggaagcggcccatacttggacagagcaagggcaggggcatttcccggagactctggaatgaacattggaatgctgctcttgggacttggccttgaacaggcagctgccctgacgacccaccctcaggccttcttcgtccctcctccaagggaacaaccacgtcaccagggtttgcaggctgagggagggctatccctatccccactgacctcccgttccctctgagcttagctgaccttggctgctggtgtgttggggttttggtccaggaactctaaggctctggaccttggagccagccagacccaactttacccacaaggagccccctgcctgacaaggagccagttctgtgacagaccttcccagcacagcctggatatggctgtctgcccagggagcccaggaaggcttcagggaagaaggggcactgaagctgggtgctgaaggttgggtaggaaggggaaggacagcatgtgcctggggccctgcctgagactcctgcttcctgggatggaggggcccagcaggcaggccgctgcgagagtgggcctggtcaggtggagcagggaggtagatgccagccagtggctcagagtgccaagttctggggctggcattgaatcccgtgtggtctcaagaggggatcccttcacccccacaactcaaagggctgggaaatacctccccgtgaaggcgctgtcttcacagcactttcagcatgtgccggctgccagtgttttctgggtgaagcaagccaccttcctcctttttcagatgaggaaatggacccaagaggtttgggtgtcgcagcaacactagatcaaagatgggatgctggggcacatctcttgccctccctggcaggcctcagtttctcccctgtaaagcggggtgaggtcagcatctgcctcttgggctcgtggagattctgtgaggtgacttgtgtggtggttcatgtgacgcatggcccaaggtaagcccggcctggggacgccagctccaccctggtgggaggcaggcagtgtggagtccacgccctggtttgagacctgcttctgtaggtagtagaggtgccacatcctggcagggttgttgtaagaagtagctcagacctgggccgtggaagtgatttgcaggggtggaatccccatgtgaaggccttttgccctccttggtgccacctcgcctaggggaccaaagctctagtctccaaggaccacaagaggtcagaggggaaagctgtcatgagactgagctaggcacagggtcgggaggatgccgtgggccatgcaattgggccaccttctcttccaccccagccttgggcagcagagagggacttgacccagggctgggggacggcagaagccctgaatacaggggcatcagcccccagataccacaccacatagggtagctgtgggcatggctcctggactgacctggttcccatcccagcagggggccttgggcggctcaagtaactgctcctccctgagcctgtcatacctttctgtaaaatgggtagatgaatactcctggcagggctgtgtgctgttgaaatatgaaaaaagggatgtgcaagtgaccagctgggcgctcaccttgtgctgactagaggtgggtgcctacaggcatcccttcctgggagtggaatgggagtgaggtagagaccagtgcctgcttccctcctttcacctgagcgtcccgggtagggaagctgagcctatccctgcccctttggagcctgggcagtctttggtacccatcttctgccctgcctctaatgcgctgcttccctaggctggcaaggcagaggctggaggtgaaaaaggaagtggcccaacaatgccagcatgggatgaagccagggtaggggagaagcctgccttgggtgactgatggagcaagcagtccctgctgtgaagtggccagggactgctgcaagcacaggacagggctggcttcccagagaggtggttcttgggccttgaattggtcctgctgggttcaggaagtgaccaaatgaccatttttccttccttagccccctcatcttatcagctaccaccatgggcacaccctggcagggtcacagcagaccagctccctctgggcccagatgagggagggaccgaggacactgtgtttcagggcctgtagactccaggctggtcaggaaggaaacgcataggaacgtgagtgagagagtacgggtccactggccctgcctccaccacccacccgcttgctgtactatccaggaaggagtagcctgggagagcttgcgggaaccacttggggcctccctgggcctgccctgcccctattcctcttcctcccagagagcttgggctgcagggatggatgcagcctctgctttacatcccaccccgtggagaagctcccagggaagcggggagggtcatggctgcccaggtaggccgggccagtccaaggtgtcttaagggccttgagcttccctacagccctctcttctgccaggatcctttccaggtcagccagagcatgcttgtgggacatggtggggaaggaaggggagggctctgcaaccacagactccaggatctggctgttttggggtctggcctgggcctgctgggctcctggggttgcaggaccagggtctccttgggtttccctgggcaggcccagcctgctgaagcatgcctcgcctctcctctccacagccagctcattcatgcgccccaggcaggaggcggcctcagctcaccagctccccgctctgtacttcctgggtccctaccccaccctccctggctcccagcatccttacctggcagagattttccaagctaggccagaaagcagcccaatcccagccagtgtgacttccctactatcaggcagggcgtctcttccactgaggtatgaagccccatgtgggagggaggcctggagtccaccctgggaggtgggcggctcaggtggaatctcagcccagggagggcaggcccacccacggcactggtcattgccgtgatggggaggaggccaggccgctcgagcaaggccttgagggattatcaggagaagaggcctgttccaacacagcggtgtggcggtgtgatgtggtggtgtggcggtgtggcgtggcaggtaggccagtgcccctttgtgaactggacctcccagggagagtgcctcagaggagcagaggcacatgctgggcttgtccatgggcttaggccacaacgggaagccccaggtgggagtccttgtgggagttggggagggttcccccctgtcttgaacttgtctcacagttttcctctggctctgcccattccctctgctttcagaggccagcttcgtgctgggtgtggagaggcagagggagccggttgactggggctcctgggctggcctctgtggggtatctaagggttgggattccctcagctctgactccttacggcatctagcatgggactccatgttggggagggctcttatgctcagagggctgttgccatggagatgtggagcttggggtgggagggtggctactgtcagcctgagtccctctgagcagggctcttcctgctcacctctggattcttgagcacccatggagtgggcctcagcccgctgacccggggcagtcgcagaaatgagtgtacagggtatgcatcctacagggaagtgtctggtggctctgccaagctgcgagcccctcaaggtcagggaccaagcctcagcatagcccaaggtaggggtcttggtttggcgaggcagggagagaatgatggactgagcacttggaccattggaaccaggagccaaagggcatagggcgttgggggtaggaggtccatgtgggctaagcctggagtaggtttttcaccaaccccagggtttgagccctggacacaagcagggctcagcttctgcaccagagatggtcttagcaggcccagcctgtcctcacgcttttcctctgtcccaccgtgggggctgggggctctaagaggacactgctctgtgctgctgactttggagagactttacctaaccctagagcaggtgtcatctgcggtgctttccctgtgatgcactgaggaaacaggctcagaggagaacgatttccccagggccacacagcaggggagcagcgggcccaggtctggtctgcgtttgggtgccgggtggcatcagccctgtgctctttgtgcctgtgtcggagccactgacctgggccctgagtcccagcatggggaccccgatggagtgtgtgtcttgggtactgtgcagagactgctgcatcccttctgcttcgagactcgcctcgcctcgctgtcctcatctgtaagatgggagcagcagggtccctgtggctttccctcgtgtgggtctgctggtgtgggacagtgtatgaggaagggctgttggcagtggtatgctggataaatgttggggcagagtgactgctcagtcttggacaaggaccagtgcaaaagagaggggaaatgggaaagcgcccagaactgcagacagctgcctgggtcaggcgggctttccttgggtctctgagacttctcaggagccaagctggcccaggccccgcaggctcacttgcaaatattaaccccggagtggcgcctaatcctcaccttcttgctctctgagaggctgagcccccagccagactcttgcagtcgggaggaggttcccaccagtctctgtgacagccctgcccccagatctgtcttaagacagaaaggagagagagtggagaggagtggctgcctgctggaaggggcacggccagggcagatgggtgggacatggcaaccagcttgacccgggctgtgggggcccacctgacacacctactgccaccccaggtcccatctgatgccgaggctgaaggagtctcgctcccacgagtccctgctcagccccagcagtgcggtggaggcgctggacctcagcatggaggaagaggtggtcatcaagcccgtgcacagcagcatccttggccaggactactgcttcgaggtgggtcccatcacaggggttggggtggacaccccatcctctcctggcctggctggtctcctccagacatcctcctggagtccagtctgctgtggcctcagcaggggccagggtcttggggacagtggctagtagttaccgatagctttcagctcctaagagacctggtggagctggggtggaggctgtccttcctactctctaggttctctggaaatgggccagcacctgttctccatgctagcctgaagctgctggggcccccagtggatgacagtgagtaggggaaaagcctgaatttcttaagcaccagagcccatgtcttagagcctgctcacctcccaaatgcagtgtggatagcagagagtctccccttgtctgggcctgtttcccactgtgaacaatgagagcccaaatctgtcctgccctggcattctgcgacctgaggtttgaatgcagagagccagtgacccacctggggatgacctgtccagtccctcataggaaatgggggatctgaggcccagagaaggcacaaagacatcagaggtcacacagcaaggctgagaccaagccgggagcagggttactattgttgcaggtgttcctgggagttactaattgcttctgcagttattcatattgcttcctaccagtttctgggaagattcctacccccaataatcatgcataactaggagagctctcttgtagaggaatgagcctggtaatgaaaagcagccacttggggactagtgtgacaatctcctggcacccccagccctggggaaaaaacagaatggtgcctggcacctgccccataccctgtgcccactggggaccatttctggttcaggactcctggccaagccaggcttgatctgggttctgacttccttgccagggatagggtgaagatggccctgtctgctggttcacagcagggggttctgtggagggtgcaggccctcgaatgccgtgtgaggagtgtgcttcccctgcagagacccgggtctgctgctggggacagtggaaacacacagcaggaattgcccggactggctcccttacctggcaggagatgtctaagctggaccagaggttgagtgagagtcagacagagagggaaggagaagggtcagggactggggaccctagggcctggcacatccagacagtccgagtctcatttctccagtctggcataaaaaatatcaggcttatattaccattgttgtcactgctgcttgacggaagagaaccctcagagttgtcagctgaggactgaggggattctggtacctacctttagttgtctccttggttcttgtggttccgcctttagggaaagtacgctcgggttaagcattgccctctgacctgggcaaggtcttcgttcattccctcttcccatctcagggagagggaggttagagttaggaagatgctttcctattggacagagggcactgagggacgagtgaggagcctgctcgtgcaggatggggccactctccggctgctgacttgccctgggacagtggctctcaagtgtaccacctgcaaaacatgaagtagaggcgtcatatgagccttgtcctggctccttcctgaagctgtgatgcagacctgatggccagagtcccctgagcctccaaggtcttcttccatcactgcctgcccttgctgtggtcccttccctcataacactgtcttgcctgctccccacaggtgacgacgtcatcaggaagcaagtgcttttcctgccggtctgcagctgagcgggataagtggatggagaacctccggcgagcggtgcatcccaacaaggtaagcctgcgcccctctcaccaaagcatgggggattgaaggtaggctcagataggaggaaacaagagagactatctctgtggtgtgggctgggattgggggtggtcagcctgcatggaggcagggcccgagtggacaatattggtggactctgaaagagacgtttgagttgaccaggttgagacaggtgctgtgtgcctctgttttctaagctacacattgaggctgggcttggggaaatgagtgctggaccctggggtccttctgctgggaccccttgtccctactccccagcccctggctgagttctgctcatcttccccttccaccttagatgtctgcccctcctccaggtgaggacccctgtcccaggctggtgccctctgtgttcccactgcccctgggctcccccattaggtcctgggagcccccactgtaatccctgcttctgtatctgtctccctagccgacttgagggcttgaccaagtcctggtcaccatagccatctcttaagttacagtacagaccagcatattaaggaagagttaataatggcatagcctgtgacgtgtcaggcgttgtgctggcctctctcagtctcgccctctatgagatgggggttttaccttagtgccgtttcatagacaagcaacccaaggctccagttaagttgcttgcccaaggtgagtgagcttctgtgaggtcgaccagagatccagcccttgtccatcatgccctgcctcatcctgacttagggcctaggcgcccgctgccgcctccaccttcagagctcctcctgggtctgaggactctctcaggctctgggctggttgggggttgcacgtggcacccccagctgaccaccctggacccccgtgcacatacaggacaacagccggcgtgtggagcacatcctgaagctgtgggtgatcgaggccaaggacctgccagccaagaagaagtacctgtgcgagctgtgcctggacgatgtgctctatgcccgcaccacgggcaagctcaagacggacaatgttttctggggcgagcacttcgagttccacaacttgccgcctctgcgcacggtcactgtccacctgtaccgggagaccgacaagaagaagaagaaggagcgcaacagttacctgggcctggtgagcctacctgctgcctcggtggccgggcggcagttcgtggagaagtggtacccggtggtgacgcccaaccccaagggcggcaagggccctggacccatgatccgcatcaaggcgcgctaccaaaccatcaccatcctgcccatggagatgtacaaagagttcgctgagcacatcaccaaccactacctggggctgtgtgcagccctcgagcccatcctcagtgccaagaccaaggaggagatggcatctgccctggtgcacatcctgcagagcacgggcaaggtgaaggtgcgtgcaggcccctcggctcctgacacaggctgggcggcagcactgggttacctgcccttcctcacatccgtacatttcaggcctaacagaggccttggaggcaccggtcactaccagaagggctccctaaacccaaaagttctatcgtgggctgggggttttgtactcctgctctgtggctggagctgatcactgaggcctgtgtggagccagtggatgggattgcagctggtagtgagggagtgggcttgggttgaggtgccttccaccactgctgcagaggaccgaccccctgaggcgccaggggaacaggctgggtggccacggctctcccagcacacaggtcccacaacgccaccagccgcagtgagccaaacacacgtcccctgtggggtatggagttcggcagacctccccagcacgatgcacagatgagcctccctcacagctctacctcaccccacactctcacccagacacacagattgtcacacaggtagacacagtcaaaattgtactattcgagggttagccagccccaccccagagcctcacagaagcgggaatcgtctgagacccacccaggcaagtcctagttcagggccagaggtgctcaatgtccatctccatgacccctttcaccttccgctcccgaagatgggcccagcagcccaccatgcaagccgtgcctcagccccacctacccggtttggggacaaatgggctcctggaccagggtgcccctaggaaggcagtagagcatggtctgtgggcctcgaaggcgaccttctctctttacatttgccacctgccattcaggaagctggccaaagagggtgggaaaaaggggctggacttgaggcctctgcagcgtggatggaccctggtgctgggctaaggactgggcctctgccctctggacagtggcgtgttgtgagccaagtggcaggtggctgaggggcaccctgtgtcaaggtcctaggcccttagctctgggtcggggaggcacagttgggagccataccccagggcagagtccagggcacaagactcgtggaggtccctcaccctctcacctgttcctagaggccctggaaggggaggccatggctggaagcctcagcagcctctgcagcccccctccctcttgcacttgctgtatgctgcaagtgcagggctggggcggggacctcctccccatggacccgcgatggggagcagttttcctctgtagtgctcagctacctcctccctcaccttctcccccagccttcagacttggctggctaggctgcacgttgggccagctctggctgccccgtccttaacatgctggtcaacactggggacgtatgctgggaaacggaatgaatcaaggacccatgggcaccagagagggagtgatgggggctgcagaggctgcattattttctgcagttgtgtctgatgtttcagtacctggttcccagggctgggctggggctggcctgggaagcggattcctccctgaagcagcctgaaatgataggtatgtccaggtgctcgtggagggaggtgaagtcagggctgcagccaaccccaaaggccctcagtgggattggggagcagtagatagaagcatagaaagtaacttgtgctgctggggtgacaggtacctaagcccccacccctggaatacttgggaactagcccctcttccgtctccacggctagaggagtaacggagtctgggaagcaagggacttggaccagatctggccccaggtggctgtgtggccttggacaagtcattttcctgctgtgtgtgcattggtttcccccttattgggtcctggctctcaggaagttctcatcccagcactggggcctggctctcattgcgggagttcaggaaggctgcagtcctgagcgggagccctggaggagccccgggggagatgcacctctgacccccgctttagtgtattcagagaatgagaccctggaggtcgcctgctggtcaggaaggggtcctcaggccacatgatccccaggaagccaatgacagcttcccctttgcccctgctgtccctctgtgcctctgctgtgcaccctgggttcctgtgtctagatctcagttctgttttaaaggaccccaaggtcgtgcatgtcggagtgaggaatttcttgagcacagatgcctgggtccacccctcctgggcaccttgcaggctctgtgctaggtggccccctgccctgactgtcaccctcccttgaaactatgacagtttttcctattttcttcccctcccccaagccacaggttagttgtgagcacaaggaggtgggggcttctgagggagggtgttagtatctgcatggttgctagagtagggggaaggtgtgggttcgggctcctgtgctggggttttcccacaacactgtgtgtgggacctgatgggcctggggctgctaccctggattgccaggtgggcagtggcgcctccaccttccctctccagccagttgcacatcacttcctgctctcacctgcctgagcatggtggctcacgacctccccgggcagtggggctgcacagaaggcatctgtgtctggtgtgggagcccccaccagagtcataggtggatactgatggccattcttaccatgagacagggcagcctcatttgtcctctttggcactgatggtgcggggagaggcgagtcctgctgtggtcaccaggccaggcctgatcagggctgtacatggaaatgagtccattctctgtggtggtgggggcttgtggctccacgtggcatgctctcattcaggctgcctccatccatagacccggctctactgtcaccagttctaggctcctaccctggctgggggcccctgccctgcccacactccccagcagcccccaaaggtgggcacactgttcctctccgggacccccgcagcttggtgatggaacagcctcaaaatgccaggacttctctggctaggtctggaatcctagggccctccatgccaggccagctcaggtcctgctctctccacctcctgcctccccaggacttcctgacagacctgatgatgtcagaggtggaccgctgcggggacaacgagcacctcatcttccgggagaacacactggccaccaaggccattgaggagtacctcaagctagtgggccagaagtacctgcaggacgccctaggtagggagtgggccagcagcagggcagagggtggggcagggcccgccaggtcctcactccccactccctgcccacttgtccataggtgagttcatcaaagcgctgtatgagtcagatgagaactgcgaagtggatcccagcaagtgctcggccgctgacctcccagagcaccagggcaacctcaagatgtgctgcgagctggccttctgcaagatcatcaactcctactggtcagtgcggtgcccaggtctccccaccctgtcgccttccccatcctgtccttcagtgtctggcacccgcagtgtgcctgatgctgcctggcccctgagttgtactgacttgccagtcccctggcctagtcccttttgagctctcaggtggggcagcgttcagcatgttgctgtggttttgtgatggaaagaacctggacacgccagtctgccgtctctggtgatgagggagcgcccttcatgtgccgggggctattgtgggtgcttgggctgcagcgggagtgagactggcaggccctgtgtgggcccccacttggggtgggcggatggcttcacctgaggctcctcacctgtccgtgggagctaaggtgctcatgtcacagccttgtgatggggccaagcaggggcacgttgggggcctgagcaccaggcaggcctcttgctgggactagagaataaacagaaaggactagactttgaagtagaacggggtctgcagactctgccagccccagaaagcagcagggcatgcagcagtgggctgcttagacaggcccctcagcaggaccggaatcagtcccggagaaacttgcggtaaggccgacttcacggccaccagcttgctcctgggatatatgtgtgtgatggccagccagcctggtgccgagtatagcctcgttctgtggtggcacacaggactgtgcgggagggccttgctgtcagcccaagcagtgggttcatattcaccccagaggagctgcccaggtttaacctgtgtccccctccagctcagggcttacagcccccacccacccaagcctccgtccacagcctgttctgacaccactctctccccggccttacctcactccttgttaggttcatctctttcactcacctgcaccttcccctgcatacactcctgcccttcctgctccgaggccacacctggtaccctctgtcgcagccctgatcccatcaggatagggttgtgcctgtgcctaaaacatttcctgtgaatgctggggcaccctgggggcaggtgagcccaccacctcaggactgggcacacaggaaggccagagaagtgtttgctgctccccaaggacaagaaaaggcagggggaatgggcaggccaggagggttggcacccagggccttagcccctgggctatacaaggtgcttgcctgggccaaatgggcacctcaagatgggccacaaatgtgcagctttccacacccctgggccggtggaggagagcgactgtagggccttgaactctgggaacacacttcccattcccagctgggctgtgctttccccctccccctcttccaggggggctgggcatgtgactcagggaaaacatatttgtggacagtgattttccatttcctctttctggcatttatcagaggcacctctccattctggacaaggccattgatagatgtcaccactcaacacctgccccctgtccagttctgtgccaggcactgtgagagccacggctaaaggtggctcaccttcattccccgctaggtgtgcccttgatgggtcagccagcatgcattgcaggagagcctgctgagcaggctgctgggcctgtgggggaagaaatttcaagttggtcaagcctgttgtagccttggggttttagccttacgatggctctgtgagcttggcagggcaggccttgctctcagtttaggggagagaaaacccaagccttccaggagggctagggccttggtcagatcaccctgagctcatggcagagccaagtgtagactgagttcacggaccactggggcctggcctgccccaggctgggagatgcatcttttagggaaaaaagataggaaacccacttaagggttggccaggtgggcctgaccatggcaggccaggatgcccagtggaaccaggagccccattgtctagggccagctctgccggcttgctccatcaccctggggcagtcactacctccctttccctccccatgtagagaatggagagctgtgttgtcccaccgtgttcaggggtagtcccatcttcttgatctttctgagcttttaggaaatcctggattcctgtgacattattcaagcaaaggaaattagtctcaaagccagtgatgggaacccaaggaatagtggtctattcctgttttcctcacttccccctagacccagatgcctgctgtttgggttgaaaaatgaagtagacactggcagagaggtggggagggcccagaccagaagctggagaggtggttcagcactggcccttggcagttaattccggttaggacggagagccagctcctcatgcctcctcccatcccacctgcccggcccttcactgagaacccactgcccgatgggagcctgggtctccctgctcctcctcctgcctgggcacttgctccagccaccctgtattgactgctctccccagatggctgtgtcctcagagctcagacagcggggctgacctcacgcagctggcggggtagagccaaggttggaatgcaggttcctgctctgtgcactcctgtcctgggcccctgcctgacagccaagcccacctttgtctgtccctacacagtgtcttcccacgggagttgaaagaggtgtttgcctcgtggaggcaggagtgcagcagtcgcggccgcccggacatcagtgagcggctcatcagcgcctccctcttcctgcgcttcctctgcccagccatcatgtcgccctcactcttcaacctgctgcaggagtaccctgatgaccgcactgcccgcaccctcaccctcatcgccaaggtcacccagaacctggccaactttgccaagtgagtgcctcctccctcaccaggcagagttgggcagggctggtgtccacagggcaggccctgggggtgtttctgcccccaagctgagcagagaccataaacaggccctggttttgtccctgtcatcctcagtccttctccttcccgctttttaaaaaataaaatctccacaccctgtccttctactcaaggtatatgtcattttggtatgtttcttaatttttaaaggtgacgacatgagacatttttttccttctgcttttttgaattaatgtattattataaggattctcacatatcccttaacattcattaagccctgttttgaaataaatgactaatattcctccaagggggactggcccatatttccttaatccattccctgtgcttgggcacttgggttgggcaccaccatcctggtgtcaggctatcaggatgtctttgctgataaagcactattggtgtttttggctgcatccttagagcaagtgggcagaagtagaagggctgggtcgtctcactgttgttcattctcaaaacatagattgagccccatcctggggccatctgtgtgctgggctctgacggcaccaagatgaatcagtcctggtggcgctcagcacttcagccagggagacgtgtggaatgagcaggagagcagtgatagacacacacgagcctcttaggagggctctcagcttgttgggagaggagacaggaaagcctccagggtgacatgatcccccaactgcatgtcagggtgaggcgttcattgtctcaagaggagcagaggctgggcatcccagggagggccatgcactgtgccaggtcaggagaagcgggcgatgagacctaagaggacagcagggacctgaaggccagacagggctgtgggagccaccagagggttttaaacaagggagaggatggccttcctctgttctggatcctgaaaagctcaccctgacagcagtgggcagatgggttggagggagcaggatggtagccaggagacgtgaaaggagagcatagctgtggttccagcaacaatagcagaaaattcgcagggaggggagcgggtacaggaggcagtggctgcaagggacaaggttaggggtgattagaaggcaaaatcagtgggccgtgccatttgggaatgaggaagagggaggagttgacagctgccagagattctgtctcaggtgtatctgtatgggtagtggggtctccacttagggtagggagctcaggaggagggcatgggtttgggtgttgatgatgacttcaggtgtggcaggctgagtaggagggactcccaggggtggtgcctgcagatatattaatacatgcctgaaagctcattgggagacctgggttgagcagggattgagcatcatctgcataccagggcagtgaaacttggaggaaaagccgaaggacactgttaacaggcagtgtatgggggacacagaacattccaggtcctgagataaaaggttcagaaaaggatcgctggacttaccatgagcaaggagggccctggtgacctgggtcagagcatattcagctgacttggggagtgaatggagtgggagcctgccatagtggggaaagcgggtggtggtgtcccagtggagggagttcctgggcagggcctgcctgggcccagtagtgctcacccaactgccctctctccagatttggcagcaaggaggaatacatgtccttcatgaaccagttcctagagcatgagtggaccaacatgcagcgcttcctgctggagatctccaaccccgagaccctctccaatacagccggcttcgagggctacatcgacctgggccgcgagctctccagcctgcactcactgctctgggaggccgtcagccagctggagcaggtgcctgttgccgtggggcggaggtggggccaaaagctgccatcaggcttttagtgttcccccttccagagtaaccatggagggcagagagtttgcccaagtggcatgatcaggccaggtcctgtcagaacacactggggatctgtgggccccattttctctgtgggcaaatgctatgttcactcagcagtatctgccaaggctgccccactctgggtactagagctggggtgttccgcatgcactcagcctttagtggacaagcgccactgtgctgcctgccagagcatgtgagaaatagaattggatcgtgaatccgcctgtatgaagaagatgactcaagaccctgtacctccacttgtccagcaggaagtcgaaaacctttctaggattgcccttgaccatcagttgacaaggttactccctagacacctctgacactgctgcagtcacctgaagtgagccctccctagcccgagacttcactgacccccagcctcagcccacacagtgagcaactagttcttggacttaagggctgggtctaccaggaactacttcccgaatatctgttgctttctagggctccaagggaccaccttacttttgtaaggtgctgaaactggcctggaaggcccttcatgcctcctggtcccattccctagaggtgaccgctcagagcactggtatgcagccttctggacacgatctgtgcatgtgtaagcgcacacacacatgcaggcgcacacacatagagctcttttccttcttcagtttgttttaaagcaagaacatactgtgtatgctgctgtgtgcatttcttaccactgtgttgtgggcctctttgcttgtcagtgcaatctccaccacccccagggactttttaatgactgcattgtatgaatgctatttatttcaccagtcccctattgatggacacttaggttagtcctgacttttcactagaaataggtcctgttgcaatcaaaggccatcatttttgctcatttgtatccacttgcctttggctgtgagagacacaggagggagaaatggaaatgagggctgagaccctacattccacctgttccagtccctgcactgcagccaacactagtcactgtcactgccaccacttacctttcccctgtgctgtccacgtatctgcacaaccaggcaggaagaatggaaggtgatcagtattgtcacatcggtgatagggtgcaacagggatttgaaactcaactgtttgcctctcaattgcgtgctctattgcctgcatgagttttcacactttgttttctcacagagacctctgtggaagcttgtgcataaacaggtgaaggcagtgtccccaaagcctagaatcctctgccccttaagttctctaaagcgtgccagcaaggttcagatgggttcaggcactgccttctgcctgaccagcacctgagggtgcctgcagtgtgcttggaccatctccactggggctcaggtgccaaggtgggtcaggccccagcccatcccgtggagtaagtgatgtgagaggggctgtcacagaagcctctggatggagaggtggaggtgtggaaatgctgggattccatgtgtgctttcctctctgcggaggcaccagggcagggcaaactgaaggagaggcttgcactaggtcagcgtctcccactgtgggcctcctactcctgccctagaaatgtccgggagctggttaaaaatgtagatttaccgattcctgggctcacccccctcccagacccagtggctctgactggcagcaggtggggatctgcacttctgacaggctccgcagtggttttgagccatagtggctgcagcacatacagcctacccatgtggtcccaggaggtcacacctgcctcttgctgtgcctttacagagcatagtatccaaactgggacccctgcctcggatcctgagggacgtccacacagcactgagcaccccaggtagcgggcagctcccagggaccaatgacctggcctccacaccgggctctggcagcagcagcatctcagctgggctgcagaagatggtgattgagaacgatctttccgggtaagagctgccagccatgttgggtgtggtgggtgcgtgtgcagactaggcacagcccatctgtaatctcagatggggaaagaggatgcctacatagtgtttataaaacaagcctggcaagacttgagttgtacaggtcctaagtggtgaacctccatttgggaaaaatcagggaagccttcctagaggaggtgatgctataggtttgttttgttttgggaaaagtagcatttccattggtggaaaaggcattctagacagagggacaagcacaagcaaagacatgatgtgtcagagaataattgctggtcccaaatacccccagcatttccagatcccctgatatttgttaaaaatacacatgttcctggtatttcctgagcctgagtcagaatctccagaagtgtttagttgggggtgttttcaataggaattcggtggctctgccaggctttgaggctgggaacagcagaaaacataaagtgatgctgagacccagtcctggggtctgctctgcctaaataagacacacacggcagagtggaaggcaaaatgttcttgtttaagtcaaaatagagacatttctatcagttcatgttgaagcatttctgctctacccctactctcccctctcccgccagtgatccttcttaccccagcatgtgaggccgcagctgtagcagcagagttgggagtgtggtctcccccaaggtggtggcagggcaggcttttaagcaggggagggtgctgagatcaagaacctggggttaggggagcccaggaggggccagagatgcaggtccactgagtcttgcattgggtctgttcagtgagtgtgccaagtgaagacaagcagagtcacatgccaagagtttggagtggggggtgcagtagacagcccttgagaggctgagaggcagccgggcccgtgagttctgaaaagactgacctggtgtgtggcctgggcagccaggcccccactgctctccgtctttcctggctcatctgctgctctagccagttctcccaggcccgtgagcactgcagcccatctcagggagtggcacttcctctccgtctgaggctaagccaacccattccccattccaagccatatcaagccccccaagtccttgcagccttcagttccccccacccacattcttctctccaaagcccccctggaccccgccacagttgtgctttcttccaaggagctagcttctggggaggggccagggagaggccagagaaaagcgtagaatgaggaggaggccagggcaagtgcagccctcccaccaagtcatgctctccacagagcctgctctcattccttgtttttgccaggaactccagcccccgcctgccagtcaaacaagggagcggcagcaggaggctgggcaagaggaggtttcaccgggcccccacttcagttaccagtctgattaggaacaagagggaagaggcagagggaacccagtgactctgaagttggggttctcaatgcaggatccgtggatagcagagagccactgagttgtggcttagggcttagctaaggaggagttttccagagcaagccaggccccagtacccattgtcccaagatgcagctgaacagggaaggggtcttccaggcagcgcggcctgaaatgtgcagtgctggcccctaaagaagaggttctgtgcaggagcagccgcctcagcctctggtccccggattctcccactcctgccaccccagcgcatccatctccccagcgctggctcaggctgccaggccccggcaggttggcgggtgctgtcggtttggacccgccttggctgcactcacagttcttcttttccccttctttccctgtgtgtgcttgtctccctgcagtctgatagatttcacccggttaccgtctccaacccccgaaaacaaggacttgttttttgtcacaaggtcctccggggtccagccctcacctgcccgcagctcgagttactcggaagccaacgagcctgatcttcagatggccaacggtggcaagagcctctccatggtggacctccaggacgcccgcacgctggatggggaggcaggctccccggcgggccccgacgtcctccccacagatgggcaggccgctgcagctcagctggtggccgggtggccggcccgggcaaccccagtgaacctggcagggctggccacggtgcggcgggcaggccagacaccaaccacaccaggcacctccgagggcgcgccaggccggccccagctgttggcaccgctctccttccagaaccctgtgtaccagatggcggctggcctgccgctgtcaccccgtggccttggcgactcaggctctgagggccacagctccctgagctcacacagcaacagcgaggagttggcggctgctgccaagctgggaagtttcagcactgccgcggaggagctggctcggcggcccggtgagctggcacggcgacagatgtcactgactgaaaaaggcgggcagcccacggtgccacggcagaacagtgctggcccccagaggaggatcgaccagcctccgcccccacccccgccgccacctcctgccccccgcggccggacgccccccaacctgctgagcaccctgcagtacccaagaccctcaagcggaaccctggcgtcggcctcacctgattgggtgggccccagtacccgcctgaggcagcagtcctcttcctccaagggggacagcccagaactgaagccacgggcagtgcacaagcaggtcagtgctgctagtcagagggcagggctgggcacttgggcccagctggggctgtcataccccataccatgctcctcctctcggtcatttcacctccaccctcacccagctgccatcccatcccaccagcctgccacatgcgccaccaccccctccccctggcttcttcctgaatcctgtgaaccagggacactgtagccttggggaactccaggctcctctgtcagtgcccctaggggcaggctggggtcagagagaaagaggaggagagtgcattcatcttcggttccaagcctgtcgaagcgcctacccagctctgcccccacacgcccctcccaaaatgttttcacaggctggacaggccttcaggcacaaccacctggagcatggatgaccctgtcacccaaaggctgcaggcagtgtctggagtggaggtgccttgggctgacagcccagcctggccctgtcccccactcagtgcagcctgccccggtgcccccagtggcagggtcactcactgtcctcttggcagcagagtgtggtgctcaggaggccacctggcacctgtcagctctgcctttggctgccgtctgagagacagttcccgggtggggactgcctcggtaggcgctcagtcagctggaggtcccctcttcccaccgtgtcccagagttgcttgtccttgtggctcacctgggccactcccgcccctcctgcttgccctccacctccctgcagcccctcacagctgtgtttcattgtagggcccttcacctgtgagccccaatgccctggaccgcacagccgcttggctcttgaccatgaacgcgcagttgttagaagacgagggcctgggcccagaccccccccacagggataggctaaggagtaaggacgagctcagccaagcagaaaaggtaaaactggaccctggcggctcgggacagggcggggctgcctcccggcagcagctggtaggagtctctcccccaggtcccccagcaacgggtgctgctgtccttgtgaagggcccgtcacctctgagcccctgttccctgtgagaatagcagtcagtggggtctggaagaaaagcaacaagagggatggattagcagcttagacctgaggcttcccatctgcagattggaatcaccagggaattgtcttggatacagactcctgggacctctgggaaggctccttagcccaggcaactgaggcagttgagcttcctgaggacctgggggttgagggctgagggtgcccaagtgacatatagaagcccccctgagggaacttggtacctgaggaggcagaggcatgggtccccaggatggctgggagagccaccccagcctggcccccaaggcttgtgcctgcccacggcctggctcttcacccctctggtctccaccagggcctgggaaagaaacagcagttaccagcttggggggtggggtcaggctgccattgagatgttttcttccccacccccgggaaaagaatctactctaaaaatgaaactctcactctgccacacactctgccatctgctggggcaaggggatgcttcgttggtctcccaagccttccagctgtggcagctgctctggatctgggggtagtttttgtctcctactgccagctgcagtccatgtagacggaggaaccagcgcaggccccagaacggcaggcgcttctccactcccctctggatgctctcgccccgctgggccccaggaaagcctgtggcaacctctcgagcaagggtattggggtcagaatggcagaactccttctccccggcctcaggcgaggcccgtctccatgctgcatcctgccaccgccaccatccccggtccgctacatccacctgctttcaccatagttacatgaaggggaccgggggacagggaacacagtgctcccagagccagagtttggctggggagtgaggaggactggcctcactccaggctttttgcatccctgtgtcctcatggcgtctggcccctctcgatcccggcgttggcctttcctcgctcagcgcagagcacctgactcctctctgcagccacgccgcttcccagcctcgtccacatccctgctcctccctgatggttggggtctgtgctggactgaggcagatccagagcctggaccacctgcctttcagttctctctctctccatttcctcatgccactgccaccccctggctttagattcaaacagaggctgggaagctgggatcttaccctgctagtcagtcgctcttcatgtgacatggtcaccttgtctgggcctcagtttcccctcctgcagagctcccacctctcagggtgctgtcacatgtccttcatgtatccaagggttttttaacctttgtcatataaaagttcaaagccctagttacaccctcagtcctgggacttgggtctaagtcttcatccccgctgtagccatacaggtcaggctgggagtttggagtggaggccccacggtggggcacaggcacgcgtctggctgcagcccccaccagctgggctccttgggcatctccttgctatgtgaagtgggcgggtcacagccactggggcctttcaagtggggctccctcctacccttcctcccactcgggctgacgaagctgtgctctctgtgtcctgggtgctgtgcccgtggacgctgccctcctggtaggacctggcggtgctgcaggacaagctgcgaatctccaccaagaagctggaggagtatgagaccctgttcaagtgccaggaggagacgacgcagaagctggtgctggagtaccaggcacggctggaggagggcgaggagcggctgcggcggcagcaggaggacaaggacatccagatgaagggcatcatcagcaggtggggcccacacctgcctggcctggccacaggcacaggcagggcagccatcgctgccttcgaggaggcccctggtcggggagcctcctcaaaggataagctgaatgtggagagaggagggaagagagtgtctgggcagtgggagcagcgtgagcacaggcctggaggcaggaggtggcctggagggtgggcagcccatgcagaatacaaagctggggatgaggctggaccaatgacagctggctcccgacgggcctgagcctctacaaggagccataccatcttagtaagcactctcaggggcgctgagaagctggattggggggtgccaggaaagacagggaggaccccaatacagggtaagaaaagtgggaatgagtctcagttacgtatagtagatgaaggtggaagacacagcgtagcccccagattcctaccaagagtgtctgggtgtgggcgtatcagggtaccagttactgagctgggaactgttaagaggagtggtttgagtggggagggagagggggatggtgccagtctgatatcctgagttttaaggggcctgggttatctgggaaagggcttcagaggaacagcgggttttaatgctgactctcatctttttgaaggcttatgtcaggccccatgttggtgcctccatctctgtctctggctctgcctatgggtagggcatccctaccttggtgtcaggcagggagtacaatcaaccccagggtcccagtcgtggagtttacttccttctcagtaataccaggcacgggaggagagacagtgtgtcttgtttgaattggcctggtctaagaccccatcagctggacagaccaagcaggtgtgcaagagccaggaaggcctctgctccatgttttgtctatgacataagcccttcccagattcctcctatttagaccacctgtttctctgttcctgactgttgtttgctccatttacttgtagtttggttcattatgaaatagttaacatgagtgaaaccagggtggctagaaacctgctgttcacttgttctccagctctgctcttggctcaccttgtgtgtgtttccaagaatggaaatgcttttcaatttaactgccttctctacattgtgtgtattctctgatatttgcatgttctgaattcagagacttgcttaacacgttcgtttctactaaccaatcctggaatatttcctccttaatgtaaatgtcagttaggtagatagtgttcaagtattccatatccttactggcttttctatttctcccttcattccaactggtttttgctttatgtacactgaaactattcttaggtgcatatacatttaggctgtttatgtactattgttgaattaattccaactggtttttgctttatgtacactgaaactattcttaggtgcatatacatttaggctgtttatgtactattgttgaattaacctctttgtcattataaaatcactttctttatcccttgaaatattctttgctctgaaatctgccttgtctgctattaatgtagccaccccaacttccttttgattcgtgttggtatggtatagctttttttatcctcctgcttttaactcattgtcttggtccattcaggctgctataacaaggtaccttagactgggtaatttataaacaacagaatatgtattgccctcagttctgaagtctaacatcaaaatgccagcagattcagggtatagtgactctctgcttcatattatagtgcaccgttgctgtgttctcacattgtagggggtgtgagcaagctcccttgggcttcttgtataatataaaagcactaattccatttttgaaggcaaagcccataggatgtaatcacctctcaaaacccctacctattaagataatcaatcaccttgggggttaggtgtcaacatatgaatttagaaggtgacacaaacattcagagcatagcacccatctatatatatgaagtgggtttattttacgggcaccatactattgggtcttgctttcgtctaaatggttctgcctttttattggagtgttttgaccatttacatttaatgtaattattgatatatttaaatctgttgccttgtttcctatttgtaccatctgttctttttttcctgccttcttttggactgagtatttttttatgattccattttctctcctattgacttattagctttatctctttgttgctctagggcagggattggcaaactttctacaaaggagcagatcaaaagtattttaggctttgtaggccatatggtctctattgcaactgttcagctctgctgttacagcagaactatttgtgtgagatggctatttacaaaaacaggcaatggtccagatttggccctcaccctgaggctgtaatgacagggagtctgtcattgtctttgttcctctgtactttatgtatctgttttccctggctatttataagatactttttttttaaatcactggttgtcagtagttggattgtgatgttcattggtgtggttttcttctaatttcttgggtcttggatttgtatgtctgcagtcccacctccccccatttctttctctgggattcctagcacacgtgcattaggctgactcattttgtcccgtatctcactgatgctctgttatcttctttcttcattttttttctgtttcttctctttgatagtttctatgactatgtcttcaagtttgctaattatttcttcttctgtgtgtaacctgctattaatctgatccagtattttttcacagcagataattatatttttcacctcttagaatttcattttgctttaaattccatcagttttaattctcattgtgcttttacttctgttttctgaaacatgtagaatatatttataataccttgttgttttcatgtccttgtctaattctatcatctgtgacatctgagtctgtttttactgatttattttccgcctgcttatgagttttcctacttctctctgtatacttggtaatttttggttggatgccaggcattgtgaatctcacagtgaggtgctgaatgtttttgtgttcctttaaatcctttctgggggctttattctgggagacagtgaggttacttggaatctgttcaatcctctcagggtttccttttaagttttgttaggctgcgtcctgcagagcctttagtcttggcctaacgtggccctgctctgagggggtttccttccccgggtcctctgtgattcccagtgttggtgcgtcactgcactctcactggtacaacatgaactgcttctgcgattgtttcgtgttctcctttctgacggttcttgcctagcctggtaattttctcatctgcatgcggatattattcagtcagagacacaaggggaacccccactcgggagctatgtggagtttctctctgcctcttgctcctctctggcttctgccctgcaaatcccacacctcttgaccttcctgacctgcctgtctcctcaactcagtgaggctgctgactccgccttccctctgcttccaggccgttcactgggctctccttgttggtttctgttctcctagaaattattgtactgcattgcctgtattgtgtccatttttctggtttgtttgtttggttggtttttaataaagagatggggtctcgccatgttacccaggctggtcttgaactcctagtctcaagtgatcctccctccctggcctcccaaagtgctgagattataggcgtgagccaatgtgcccggccctatttgtttttaagacaagagagtaaatacaatctccttccaatctaattttccttaataaaacaaataccctcctgccaccccacccccagcacaagctttcctcagagtgataccttcctgtactggggaacctgccccggagggtcccccccgccaccaccgctcctcccagttagtgctccctgaactgctgccctgctgcccccattacagtcccgtgcagaaccggccccggcacagtggctccctgtgtgtcttctgtgagtgggctaagtgcttgcccagtgtgcggtggctgctctaggctggaggaatcaagagggcagggatggagagaagccttgggagtggagggctcatctaagagtgtgtggagcaaggagaagggaggctgaggccaaagccctgtggacccccatgtccagaggcagacaggacaaggcatctaggagacaggcagacccagagagtgtggggtctcaaagccaaaggagagtgggaaggtgggagtgcccagcagtgagagtgtctcaggaaccagccaggtggggccaggagggctcccaggcagggagcagcaggacggagccggcctcctgcccactgagcttccgcgggtggtatgtcccccagctactgctcattgttctgcctgcacacctgtccttcagatgtctcctactgatgtgcgacctcccagcccaccctccagggaacgtcactgcttcctgctctttgttccagggacctgagctttccactagcgcagctgctccgtgcagggtgtagttagttactcgtgcctcctgccttgtgaactccttgagggaaaggactagagttcattcatcttggcacctcgcgtacaactttgtgaagatggcgggggcagggtggaaaaagttctagagcctttcagggccttcgtctttccaccacctgcctagctctaggggtttgaagatctaatgcccatttccacccatcttggctcctggaagaacatcgggaaaggggcagcccgggggcctctggggctttaggagcagcgagtgtgggatgtggaggtgaggaaggaggcccagcagtgtcagttgctgggagtcggctggagggcctctgccccaggcaagtatgggaggcaagtctctgacccaaggaggggctctcctagtgtgtccctgctgtgtgcgggggtgatgggcttgttctcacaccctccccacctctgctgcctccagggccagtctgactgtctctgtctctggctataggttgatgtccgtggaggaagaactgaagaaggaccacgcagagatgcaagcggctgtggactccaaacagaagatcattgatgcccaggtgggggctccggccctttggtcagccacaagagttaaagggcctgggattaggaggggtgactagcctctccatcctcagtcatacctcactgcagacactgaggggaataagaaaccagaatctgccctgagaagtcagacctgtggtcttagtgggccacaagctcactaggacaggctgtgaaaggagagaggcagctcctcccctgccagggctcttggcgggcattgtctttcaccaggactgctgaccaaagagtggaagccaccaggagggcagtgggggtaggagtgaaggcaggctggtcagagggagcagtggggctctcgttcacaactatggcatccgggctgcattgaggggagacgtgaaaggctctgtggccccagcctcctttactcagggctgcaccgctttcctttcactcacccaggagtaggctgggccttgctcaggctgtaaactgcacagaccaggagctgtgacctctggtgtgtcatgcacacacatgtgagcaagggtgcctgccctaggggccgcaggcagcccatagacagcactagagctgctgcatttgggctgataagcaggcagcgaggctgtgtccatgatgctgcagaggcctctgcctaccttctcttgccagctgctcacagcccggagcctgcctgccaccctcatctccaggccacccccttccccgatgcttgtcgtaggtatacacagccctaaggagcctgtcccatgacccccgctcacatccccattgtccacaggagaagcgcattgcctcgttggatgccgccaatgcccgcctcatgagtgccctgacccagctgaaagagaggtacagcatgcaagcccgtaacggcatctcccccaccaaccccaccaaattgcagattactgagaacggcgagttcagaaacagcagcaattgttaacctgcctgaggagggaggaagctacccaaggagagggggactatggtggccaagggcagggtctcggcctggggaggcacccacggttgcagccccagcgcgggtgtcaggaggccgagcctcccctccctgccgctgtccaggaggcggccgcagagggagccaccagagactgaagcagcgtgaggcgaggtcaccagccgctccctgtggggtgcgggcagaagagactgcacgctggggagtggggacagcctgatggggcagggggcctgccaaaaatatgtctgttggttcctgaatgtggtgtgtccttgtcctcctggatctggccgagtgcatgtgtccccccacacctgtgccagggagggggcttcctggaggggggattcaagggctaggggcctacacctgtggcttcccctcgcctccttggggggcccgggactccctggcagccaggccctgtcatgtgggacctggcacttggcagatcagttggcaggcaggaagataggaggacacagagcaggaggtcagtgtcccctgcctgtctccatccgaagcacctgccactgcatgcagcctgttgggaccttcctggctgtgaggaactgaggattcctacccacccaccccctctgaacctgtccccagagcaccacctgctaccttcttccctgccttagttgtattgccagatagacccagtgagggccatggctttttcttgtgagctcttgtccctgtggggaggacccacagcttcccacacctcccacacaggcccaggctgatgctctagggctcccagaagccagagatctgggcggatctggccagatggctctgagcactgtatctgccttctcctggggcccagcacacccagggcacagtggtcctgtagggagtgccacctggtgctcaccctgaaagaaaaggtgatccttcctctgagtgatggtttaaaaaaagattctaacgcctgcaggccctgagaaggtggataactgtgattttttttcctttcacagtatgcattagaaacaaaagcccgcttgctcgcttgctggaacacaggggccttttaagttgagcgtgcgcactgcatgggaaatagcggccctggaggatgttagacttgctccctctccaagacagcagcagcctgcacctgccccgtgtgtgtggccggcctcctcctcacccttcccggcccccggccaaggacccaggcgctgcatacaggggaggggcgcaccccacagctggggccggttttcctcagctctaggctgttctgtagcttatctgcccctcccccactttcaagacagatgagcaggagcttgggtctctctcggcccctgtctgttcccagcccctgcagattctgagcaaaggccctgggtaagaagggtgggagtggggcctttgccagcagagccagggcagggcgagctgcaggaatcacccctctgcccctgcagctggaatgtgccacagaggccccacctgaagggtggatgtgctggaggggtggcccagagccatactgcgtccaccctgagctcggggacaggtgacagtggctgctctgggaaggggcttttagatgtaacctacaattcagttaggctagagacagatgctggtggaggaagggctgggccaccagggatcacagaccacaggaagatgggaggtggaagcagaggccctgcccccaccccttcctgtctcactcttctgtcttgtccccacccatgcgccttcgtgcctgagaccagggtggccacacaggcagggcctggctccagtctcatcctcccattgcccagtgagccctgctcttctctccccagccccctcccaccgctgcctcgtagagtgacctcggacagagcccccctagcaatacagggaggctcccggggcctggacaggcgggctcggaggctacccgctgtggccggtgccagctgcccttgcagggtgggtgagctctcaggccgagagccttatttacctagtgcaaaaactgtaaaagtgtacagactcttcacagatttttatcttaattgcaagtctgccgattttgtaaatgttcttggtgtttgactgtaatgtaactatctcacctaatggttgtacatatcctttggtcctggtgctgccgagggctggccgggactgctgctctcccaagggttttattttatttctgaatctagagaacagtattgggcaggaggaaaaggcttggtgtctgcggggggtgtcttccctgcctgtggcatttgtgtgttggctttgcagctgctgtctgagtagtggccactggggtgccttcactgggccagtcaacggggggctcctgcccaggccacagagaacctgagttcccgggagctgggccctgcctgcagccagggctggggttgccagaggccctggagggaaggacagtccctgctggggaagaacagccccggggccccctggtcaccgagactcagcctctgctggagaaagccacgccctccctgctagcacagaggcctgactgacttttttgcttaacttccatgttctgggtgatggaaactgccaaacctcctgtcagtgaggactctttccgactgcccagaaagtgggggtggaggaccgaggctacagctccacacgccccggtcccccagagcatctgccccaggtacacctccccctgcgccccgcacgactgcgggagccagactgtccagggaaacagcctctctcttttctacacactcagccacaaagccccccagctcccacaccgcgtcccagctcccctcttttgtaagtatgtgaaaaggaaaaaatgcaaacgttggagtttgggctggagctcctccctccagctgcgacttttaactatgtaataatgtacagaggaagctgttggtgttctaagactctgtgtggctgtgcaatttctgtacatttgcaattagaaatattaaagatttatttagctatttt

SEQ ID NO: 15534 - DNA, 39869 bp, Homo sapiens
tgttcctcttctttcgtgttgtgtcagaagccatgatttccagtcttctcatctggaagatgaaggaaaagatagacccgaccccacagggttctgaggctcaaactgaaagcctggtggtggggcacctgtgacaggtgagactcctcatcttgcccccttctttcttcatcatgaagaagagacactggaggatgtggagcagttggggcctgtggtccaggtgggatggagcagtcagggcctcgtggagggagcaggtgggaggaatactctggctgggatggacctcacggggtgtggcccagctttgcagctgacttgcatgaagtcctggcgagctggggagcccttgcaccctcagcttcctcatctgaaagatggggcaatggtaatgcctgtctgtggagtggtgaggaacaaatgagactgggccacaaagtacccagtgctgtgcccagcacatagtgcccaaagagggctgctatctcatctcttattcctgagatttagcttccttgttttgtttttgagctctttgggaccttcgtggactttgaatttttactattgttcattgtgtctaaaatcttcctcagaagccgagggcctctaacctgatcatgaattttggagtttcgttttttgttttttttttctttcctgtttcctgtataggaaaaagggacctgtacctttaagaccccagcaggcccaagtaggacactggccctttaaaagcacattacagagagttggaacatagcctttgttgaactagccatgattagtcccagcggacagggctggagtggcatgtctgggatcagggcggggctaggctggccggggccagccaggagcagcggacagcaggaaggctcgcccggccactcggcttcccgagcctggtggctatgctgagggatggtgagtggcctgagcggagcttagaataagagaggctgggaaagccaggagggaggcagccccagagcccagggagacctgaatgagctgggcggcagcagacaccctcagtgagtgactgtcacaggagctggtcccaggagggactccggagcaccctgcccctctacgcagacatccactgccggcccagaatgtagaaacggttaggagggacctgtgaaaaagcgggacaccaagaagagcactgttgctgtttttagtttttaaaataagaggaagcccagtgtgagttgctctgtcccccaggcgcggtgtcccctgtggtgtgctccgttgagaactgggaaatgccagggactgctgacaagttttctgagctgaggagcttggcctttgctctgagtggccgaacctttggctggctgggtggggctgcactggggtttgggggccatggtatctctgccccagctcctcagcagaactttgttttttcttctcccttcctgcttccactccctagtccatggggcccaggcccactgggtggggtggaggcgggtgggagactgggaagactgtgtctgggccaggagcgtgttttggctctgcttgaatatttgaaacagttgtcagaagccagatcactttggtgtggtagcgtctttactgggcaagtacccatttctgaaaaaaagtcagaggaaggattgggcttgttacagccaagtctcagtgcaggttggtcctaaccgccttcattgccacggctgggggcggatgagactgcctgccagtaggtgtcctcactgttttacagacagccacccaggaggtgacaaaggcagggctcagtacatttctggtgacccaggcttcctgtagttacttaaaagttggtgcatttggtcataggatttttgtaggtttggtgaaaacctgaggcattgacgggcagtgaagagagtttgaagttagagccgaagtgccaggtgtcctgttccacccttgtgcctgtgaatcgtgacctcaggcaagctgtttgacctctctgagcctctgcttcagagcagagggcgtgtgcataggcgcaaaccctggagggagttgtcagttctgggggaggctttgtggaggtggtggcctttgagccaggcgtagacggataggctgctggagtgcaaccccttgagcagaggcgtgcagtttagcatgatgagccagatagggccaagcagggctggcatggctgggttgggacctggaaacgtagcttgggaagctggattttaagtatgttgctttctcagttggaatcctgtgggccaggtggcagatgacagggctagcttagcctggagtcagccagtgtggaatgtgggggaaaagggcagacggtgaagtctgacacactggccttgggaagcccctggaggtgtcagagcctcattctttgctgcagttagctgtgtgagggtcagaggtgcagagacagccctacgtgcccttcccaggtatgtgggctcactgtggtgtggtgggtgagcaggtacttgagagccacaggtggctttggtgcatggtcactggcagcaggaggaactcagcagccacactcctggttttctttgacatggtgtctgagtttctgcccgtgccagtggcctggaaccctgtggcttactgagagccactttcctgctgtcttgctgctgctgaacactcctggttgtctcctgctagttacagcctgagaagcagctgctctggtgccccacgcagacttccagacctcaggctttgggaggaatgggcagctgacatccctaggcccatagccccacatgctcctgcagacatagtggaggcgctcagtggctgtgctggtggctggatcaactctgcccaggattggggcggggcgggggtggggggtggggtgccttagcatgatacatcttcagcaaattgtgccaggaggcaagggcaacccacttgacggggtaggatgctgaggtgcaggagaggcccatccgaggtccacactcctttggcccagtgctccttcccttcacatcttcacctcttctgtctctctgagctcaagctgccaacaaggagggagcctctgtcccaaatggtggctggaattgaagagatagctgagctggagtgaccactggggctggagtctagggtgccagcatttgttcgtagatttgtccatctcttcttaaatgggggtctttcagattcctgcttaaaacggcctgtactctggagcctgctcttgaggtaagggggtagagcaggtgaggtggtctggggtcagttggcagaggggctttttgagagctcagctgtggggggagagtcaggaaggatctgctgggcagagtgagagacagatcttggaaatgtcctgggcccaggaagaagccaggagcatccagagaagtgctggcaggaagggcgtgcgggaagggacagaatgccccgggaaggcagtctcagcccagcctggatggtaatgggggcagccagggctggttactgaggctgtgtatggagagctcgctgcaggtcagttgagccctacagccaaaggtggtggtgtccctgttttccagatgagaaaactgaggcacacaggttaattaatttgaccaaagtcacagagttttgtgtgtgtgtttttaaggaaccatgcctgcttaccaccttcaaccagcatagtgccaggagctggggctctgcggacaaatggctggtccttggttgaggcaggaaacctggccctcaaggatgagggaaggaggccatccctagatcaccccaacatgaatggcccacctggtcccaggaagtaacgtggcatggcgcccaggtcttgggtggaggagatgagatggaagaagatgctgcctctgcccccgcattctagggggggcccagcatgagctaaggagggcttcctggatgtggagagctgggaggaattagataagccagaggggaagcacttcctggagaatggaaatactcgcttttcagctaatttattcttttgtttcattatcatttcccacttgggtctcgcatccccagggccctgaggtggctgttggaggtatttatggtcccgggtggggtgcagggaccagttagaaaccagtcccactcaggccatgatgcatgggtgtgttcacatgtgaggaggagccaggcacagactgagctcaaggagagggaacgcatgggtcagggccttgaaacattctcaggagtggtgctgagtggagagatgggggagggcagtgggctagcatgtttgtggtgggctctagagcttgggagcttcagagttgctgcagttgtggctggggttggagccccaggtgctgtgcagggaggttgggctcttttcctggggctgggggtagggggactgtcactctccctaaactttctgagcagccaggctaagcctgatagtttttcctacaggccagggagggctgcagggttgtccctgctcagaagcaagaggggcaggggcagctagcccacagctcacttctgatttgcccaccactcaccctcgtcaatgagtgttccttagatgctttttttttttttttttcccctgagacagagtctcgctctgtcgcccaggctggagtgcagtggcactatcttggctcactgcaagctccacctctcaggttcacaccattctcctgcctcagcctcccgagtagctgggactacaggcgcccgccatcacgcccagctaattttttgtatttttggtagagatggggtttcaccgtgttagccaggatggtctcgatctcctgacctcatgatccacctgcctcggcctcccaaagtgctgggattacaggcgtgagccaccgcgcccggcctagatgctcttcttttaaaattcagggcacttcgctgttctgctgaggtttatgaatgtttaaaaactgctttgcggtccccaaagtaatttgacaagtctgacagctattgattaaaaacccgaaattattcaggctgcaggatgacttgggggattagatggaaagttttttgtttcttctctctctctctgcacccctcctcccccgcaaaaaaaaaaaaaagaaagaaagaaataagatgtggaaaggtaaatgtgttcctgaatgttttttgaaaactccattaggcttgcacagtttatacggggagaggatgttgaaggctgcctctcattcaggagccagtaccagcgccctctcgaatccctggtctctccggagctttggcccaagtcaccccaggcagcagtgagatgttgctattacattattacaggtgatggtagtggtgttggtagcagttatgatagtttatggtcccttatgttctagggagttgacgtagggtttttgtggctttctctgaagtagctcagcgtgtgaggaaatggcacctagaagggggaggaaactcgttcagggtctgtgatagaccttagatacagctgggatagagaccaaagactccttcagggagaggaacgggccgttgctggggtgctgggctgattggatgcctggcctccaggcctgactcactgtgaggtaggtgccaagagtgtcccacagagggtgaccaggccgttagaaccccagctttcacttctggaccatgtgacctagccaagccactccctgtctctaagcctcagtttcctctttagagaacgtcctaaagcttccattgagccttttggattaactggctcatgtattgccccatgagccagggcttgtgggacctgagcttgaatacccactctccctttcttctggggcagtgctgccttttgtgcagagttgttgggagaaggccatgagatgatgtttgtactttggtgagaacacctgcaactggcacatggtaggtgcttagtaagtggctgttaggtccaggctgccacagtgtcattcatttagtcagcctatattgggcaccacgggacaccaggcctcacagcaagcatgagctgtcccatcctcctgttttggttgcagggtgtggaccctcctctgccagctcagccctgtgatgtggggggaagcacaggctcccaggggtgagggcagaaggccacgtgtctccctgtctcacagcccagggcgttctgtgtgtatgggggcgtcacaactgggtcttggtgactgctaggacctaccccttaccttggcctgagggaaccctgggttgagagggaccacgcctctgggccctgtcatccctggaagacttcccaggcagggcagccaacctttctgcctttttaggacaggctctgtctccccagggccctgggagccaccaggcggctgcattcctctcctctcccctgggatcccagctgggccaggagtgagcactggccttctgagcagccggttcccaggccagcggggcaaggctgggcttggggagagagctctgctggacatactaggcagggcgctgccctgtttatgtcctgccgtttgattcccagcaggtcagtgcattcattgtgaccatgtccagactctctttttttccagtgtgggcagacgcttctagcacagcctctggacctgcctggctatgacaggcagaagcatgattggcatgttctgacctgatgaggcctagagagtctgctgaagtcctgactgcagaaccatcaggtcctgccagcctttgggtgggcaccaactctgtggagacaaaccttgtccaggatttctcttccttccagacctggttggggtagtggacagtggcttgggaccacacaggctggtgggctggagactggggctggagatggctgtgcttgggagtcccaggcagaggggctaaaggggcctcctcacgggggtctactgcccactgctaggcacaccttcttctcctttcatttcgcctcaggaaatgaagggctttttaaagaaatttgaggcatcccagagcatttgggcagatatgattgatccccattttgcagatggggaaaactgaggcatggagaacgtaaagcgtttgagtcgtcacgggacaggaacaggaaacagcctgggaagtccatatcttgtcactccaaattgtcaaaagtgtgacctatcccagaaatgtcagccttgatagcagcgtgtgcatcgttcaccagtgttgttcatagctgtgtctccagctcctgacatcgtggctggcaatgaggtgggcgaatggaacagaccaaagaggcatgaacagttatgagcaatggatgggagtcactgacacccctgccctcctgagcctcccgcctgcatggtctcatttgatccttagagcaacccatgaggaaggtgtgtcgttatcctcactacggatggggaaactgagtcctagagagtcgaatgacttaaagtatccaaggttgtatatttcataaggaatagagactcggtttgctctgcagccaggcacccttgacactaggccctctgtcctcctgcccgctcgcagctgcaggtgcatttctgtagcattcacttgtgtgcgcgcgcgcgtgtgtgtgtgtgtttaatcccagggcccactgcactgcctgcctttgtgtactgcccagcccattaccctggcagccctagccatgcagcatgtcttaaaggggccccccggctcctgcttgcacactttcagagacagggagcccactctctctaaaaccagacgagcctggcccattcaaggacagctgtgactgagctggaagtggcctctcctggtcccagccttgccctttggggccacacagggcagctccctctgagctttcgagatttggagggtgaccctgagccccttattttccgaccaaacaatcccactctcaattccccccacccaatagttgggaacacccttgctgtgtcaagtagggatttttaattactgtaagtttcggtttggggtcctttccctccttggaataatgagtttgctgagcttttgtgtcaccgaccttttaagagaaaaaaggatcagagttgaaaaacagcttgtgggttggctggaacgctatcagataaggctaggccccaggagccaggacagtgtccccattgttctgccaccagccctcacaatgagctgctgttgggccctggcgctgtctctcatagcagctccccgtgccttgtgcccacgtttcctgggccctgggcaggggctgccccatccctgtatcccccggtccttccttccccacctggagtgagtgggtcacagctagtgggttagctggctgtggacctttccctgctgcccggctgctgtggacctttccccctgcccggctgctgtggacctttccctgctgcccggctgctgtggacctttccccctgcccggctgctatggacctttccctgctgcccagctgctgtgggccacccctggacgatggaaaggccaagccaaggctggtgcagttagtcttgaactccgctgaactgggttcacatctgactcggccacttgctatgcatgtgatcttgggcaggtcacctcaactttctgggtgcacctttttagtcctgacaggattgtcacgagaattaagtggaacaggtgggagattgtggccctgagccgggcttaggtagcgtagtgtgagctgtctgtctggagagaccagggaccactttgtggtggtgacattgggctggcccttgaaaactgaggaaggactttgtttggcaaagaagtggagggagaggcagaatggacaggctcaggagactgcttggacatggacccctggaggataagagtttgcagctttgtcaggaagtagctggggaggagagtccaggtcacttgtgcgaggggcctttcaggagggctcggacaccagcttgaggcatctgggacttgattatcttacaggccatgaggcgagagaggagggacaggagtgaggccatgccaggcggagtggcttgttcagtggagggtgctgctttggtctagacaggagaaggccagtggaactcccattcccctctgccctcccatgccctggccaagctcctctgtagcagcggagtccagggcaggtcaccctagccatggccttggctgtcccgtgtgtgacctggatgtcatggtgccacctccttcctgggagcagtaaggattccatgccatggaggacaggtaaagggtctctagtccctggagcgctgtcatggggctagtgatctgccatgtttagaagggtctcggctggggccgtggggagcagtgtgcagccacagagggtaggatgagcctcctaaccttgagagggatgggggaagcggcccatacttggacagagcaagggcaggggcatttcccggagactctggaatgaacattggaatgctgctcttgggacttggccttgaacaggcagctgccctgacgacccaccctcaggccttcttcgtccctcctccaagggaacaaccacgtcaccagggtttgcaggctgagggagggctatccctatccccactgacctcccgttccctctgagcttagctgaccttggctgctggtgtgttggggttttggtccaggaactctaaggctctggaccttggagccagccagacccaactttacccacaaggagccccctgcctgacaaggagccagttctgtgacagaccttcccagcacagcctggatatggctgtctgcccagggagcccaggaaggcttcagggaagaaggggcactgaagctgggtgctgaaggttgggtaggaaggggaaggacagcatgtgcctggggccctgcctgagactcctgcttcctgggatggaggggcccagcaggcaggccgctgcgagagtgggcctggtcaggtggagcagggaggtagatgccagccagtggctcagagtgccaagttctggggctggcattgaatcccgtgtggtctcaagaggggatcccttcacccccacaactcaaagggctgggaaatacctccccgtgaaggcgctgtcttcacagcactttcagcatgtgccggctgccagtgttttctgggtgaagcaagccaccttcctcctttttcagatgaggaaatggacccaagaggtttgggtgtcgcagcaacactagatcaaagatgggatgctggggcacatctcttgccctccctggcaggcctcagtttctcccctgtaaagcggggtgaggtcagcatctgcctcttgggctcgtggagattctgtgaggtgacttgtgtggtggttcatgtgacgcatggcccaaggtaagcccggcctggggacgccagctccaccctggtgggaggcaggcagtgtggagtccacgccctggtttgagacctgcttctgtaggtagtagaggtgccacatcctggcagggttgttgtaagaagtagctcagacctgggccgtggaagtgatttgcaggggtggaatccccatgtgaaggccttttgccctccttggtgccacctcgcctaggggaccaaagctctagtctccaaggaccacaagaggtcagaggggaaagctgtcatgagactgagctaggcacagggtcgggaggatgccgtgggccatgcaattgggccaccttctcttccaccccagccttgggcagcagagagggacttgacccagggctgggggacggcagaagccctgaatacaggggcatcagcccccagataccacaccacatagggtagctgtgggcatggctcctggactgacctggttcccatcccagcagggggccttgggcggctcaagtaactgctcctccctgagcctgtcatacctttctgtaaaatgggtagatgaatactcctggcagggctgtgtgctgttgaaatatgaaaaaagggatgtgcaagtgaccagctgggcgctcaccttgtgctgactagaggtgggtgcctacaggcatcccttcctgggagtggaatgggagtgaggtagagaccagtgcctgcttccctcctttcacctgagcgtcccgggtagggaagctgagcctatccctgcccctttggagcctgggcagtctttggtacccatcttctgccctgcctctaatgcgctgcttccctaggctggcaaggcagaggctggaggtgaaaaaggaagtggcccaacaatgccagcatgggatgaagccagggtaggggagaagcctgccttgggtgactgatggagcaagcagtccctgctgtgaagtggccagggactgctgcaagcacaggacagggctggcttcccagagaggtggttcttgggccttgaattggtcctgctgggttcaggaagtgaccaaatgaccatttttccttccttagccccctcatcttatcagctaccaccatgggcacaccctggcagggtcacagcagaccagctccctctgggcccagatgagggagggaccgaggacactgtgtttcagggcctgtagactccaggctggtcaggaaggaaacgcataggaacgtgagtgagagagtacgggtccactggccctgcctccaccacccacccgcttgctgtactatccaggaaggagtagcctgggagagcttgcgggaaccacttggggcctccctgggcctgccctgcccctattcctcttcctcccagagagcttgggctgcagggatggatgcagcctctgctttacatcccaccccgtggagaagctcccagggaagcggggagggtcatggctgcccaggtaggccgggccagtccaaggtgtcttaagggccttgagcttccctacagccctctcttctgccaggatcctttccaggtcagccagagcatgcttgtgggacatggtggggaaggaaggggagggctctgcaaccacagactccaggatctggctgttttggggtctggcctgggcctgctgggctcctggggttgcaggaccagggtctccttgggtttccctgggcaggcccagcctgctgaagcatgcctcgcctctcctctccacagccagctcattcatgcgccccaggcaggaggcggcctcagctcaccagctccccgctctgtacttcctgggtccctaccccaccctccctggctcccagcatccttacctggcagagattttccaagctaggccagaaagcagcccaatcccagccagtgtgacttccctactatcaggcagggcgtctcttccactgaggtatgaagccccatgtgggagggaggcctggagtccaccctgggaggtgggcggctcaggtggaatctcagcccagggagggcaggcccacccacggcactggtcattgccgtgatggggaggaggccaggccgctcgagcaaggccttgagggattatcaggagaagaggcctgttccaacacagcggtgtggcggtgtgatgtggtggtgtggcggtgtggcgtggcaggtaggccagtgcccctttgtgaactggacctcccagggagagtgcctcagaggagcagaggcacatgctgggcttgtccatgggcttaggccacaacgggaagccccaggtgggagtccttgtgggagttggggagggttcccccctgtcttgaacttgtctcacagttttcctctggctctgcccattccctctgctttcagaggccagcttcgtgctgggtgtggagaggcagagggagccggttgactggggctcctgggctggcctctgtggggtatctaagggttgggattccctcagctctgactccttacggcatctagcatgggactccatgttggggagggctcttatgctcagagggctgttgccatggagatgtggagcttggggtgggagggtggctactgtcagcctgagtccctctgagcagggctcttcctgctcacctctggattcttgagcacccatggagtgggcctcagcccgctgacccggggcagtcgcagaaatgagtgtacagggtatgcatcctacagggaagtgtctggtggctctgccaagctgcgagcccctcaaggtcagggaccaagcctcagcatagcccaaggtaggggtcttggtttggcgaggcagggagagaatgatggactgagcacttggaccattggaaccaggagccaaagggcatagggcgttgggggtaggaggtccatgtgggctaagcctggagtaggtttttcaccaaccccagggtttgagccctggacacaagcagggctcagcttctgcaccagagatggtcttagcaggcccagcctgtcctcacgcttttcctctgtcccaccgtgggggctgggggctctaagaggacactgctctgtgctgctgactttggagagactttacctaaccctagagcaggtgtcatctgcggtgctttccctgtgatgcactgaggaaacaggctcagaggagaacgatttccccagggccacacagcaggggagcagcgggcccaggtctggtctgcgtttgggtgccgggtggcatcagccctgtgctctttgtgcctgtgtcggagccactgacctgggccctgagtcccagcatggggaccccgatggagtgtgtgtcttgggtactgtgcagagactgctgcatcccttctgcttcgagactcgcctcgcctcgctgtcctcatctgtaagatgggagcagcagggtccctgtggctttccctcgtgtgggtctgctggtgtgggacagtgtatgaggaagggctgttggcagtggtatgctggataaatgttggggcagagtgactgctcagtcttggacaaggaccagtgcaaaagagaggggaaatgggaaagcgcccagaactgcagacagctgcctgggtcaggcgggctttccttgggtctctgagacttctcaggagccaagctggcccaggccccgcaggctcacttgcaaatattaaccccggagtggcgcctaatcctcaccttcttgctctctgagaggctgagcccccagccagactcttgcagtcgggaggaggttcccaccagtctctgtgacagccctgcccccagatctgtcttaagacagaaaggagagagagtggagaggagtggctgcctgctggaaggggcacggccagggcagatgggtgggacatggcaaccagcttgacccgggctgtgggggcccacctgacacacctactgccaccccaggtcccatctgatgccgaggctgaaggagtctcgctcccacgagtccctgctcagccccagcagtgcggtggaggcgctggacctcagcatggaggaagaggtggtcatcaagcccgtgcacagcagcatccttggccaggactactgcttcgaggtgggtcccatcacaggggttggggtggacaccccatcctctcctggcctggctggtctcctccagacatcctcctggagtccagtctgctgtggcctcagcaggggccagggtcttggggacagtggctagtagttaccgatagctttcagctcctaagagacctggtggagctggggtggaggctgtccttcctactctctaggttctctggaaatgggccagcacctgttctccatgctagcctgaagctgctggggcccccagtggatgacagtgagtaggggaaaagcctgaatttcttaagcaccagagcccatgtcttagagcctgctcacctcccaaatgcagtgtggatagcagagagtctccccttgtctgggcctgtttcccactgtgaacaatgagagcccaaatctgtcctgccctggcattctgcgacctgaggtttgaatgcagagagccagtgacccacctggggatgacctgtccagtccctcataggaaatgggggatctgaggcccagagaaggcacaaagacatcagaggtcacacagcaaggctgagaccaagccgggagcagggttactattgttgcaggtgttcctgggagttactaattgcttctgcagttattcatattgcttcctaccagtttctgggaagattcctacccccaataatcatgcataactaggagagctctcttgtagaggaatgagcctggtaatgaaaagcagccacttggggactagtgtgacaatctcctggcacccccagccctggggaaaaaacagaatggtgcctggcacctgccccataccctgtgcccactggggaccatttctggttcaggactcctggccaagccaggcttgatctgggttctgacttccttgccagggatagggtgaagatggccctgtctgctggttcacagcagggggttctgtggagggtgcaggccctcgaatgccgtgtgaggagtgtgcttcccctgcagagacccgggtctgctgctggggacagtggaaacacacagcaggaattgcccggactggctcccttacctggcaggagatgtctaagctggaccagaggttgagtgagagtcagacagagagggaaggagaagggtcagggactggggaccctagggcctggcacatccagacagtccgagtctcatttctccagtctggcataaaaaatatcaggcttatattaccattgttgtcactgctgcttgacggaagagaaccctcagagttgtcagctgaggactgaggggattctggtacctacctttagttgtctccttggttcttgtggttccgcctttagggaaagtacgctcgggttaagcattgccctctgacctgggcaaggtcttcgttcattccctcttcccatctcagggagagggaggttagagttaggaagatgctttcctattggacagagggcactgagggacgagtgaggagcctgctcgtgcaggatggggccactctccggctgctgacttgccctgggacagtggctctcaagtgtaccacctgcaaaacatgaagtagaggcgtcatatgagccttgtcctggctccttcctgaagctgtgatgcagacctgatggccagagtcccctgagcctccaaggtcttcttccatcactgcctgcccttgctgtggtcccttccctcataacactgtcttgcctgctccccacaggtgacgacgtcatcaggaagcaagtgcttttcctgccggtctgcagctgagcgggataagtggatggagaacctccggcgagcggtgcatcccaacaaggtaagcctgcgcccctctcaccaaagcatgggggattgaaggtaggctcagataggaggaaacaagagagactatctctgtggtgtgggctgggattgggggtggtcagcctgcatggaggcagggcccgagtggacaatattggtggactctgaaagagacgtttgagttgaccaggttgagacaggtgctgtgtgcctctgttttctaagctacacattgaggctgggcttggggaaatgagtgctggaccctggggtccttctgctgggaccccttgtccctactccccagcccctggctgagttctgctcatcttccccttccaccttagatgtctgcccctcctccaggtgaggacccctgtcccaggctggtgccctctgtgttcccactgcccctgggctcccccattaggtcctgggagcccccactgtaatccctgcttctgtatctgtctccctagccgacttgagggcttgaccaagtcctggtcaccatagccatctcttaagttacagtacagaccagcatattaaggaagagttaataatggcatagcctgtgacgtgtcaggcgttgtgctggcctctctcagtctcgccctctatgagatgggggttttaccttagtgccgtttcatagacaagcaacccaaggctccagttaagttgcttgcccaaggtgagtgagcttctgtgaggtcgaccagagatccagcccttgtccatcatgccctgcctcatcctgacttagggcctaggcgcccgctgccgcctccaccttcagagctcctcctgggtctgaggactctctcaggctctgggctggttgggggttgcacgtggcacccccagctgaccaccctggacccccgtgcacatacaggacaacagccggcgtgtggagcacatcctgaagctgtgggtgatcgaggccaaggacctgccagccaagaagaagtacctgtgcgagctgtgcctggacgatgtgctctatgcccgcaccacgggcaagctcaagacggacaatgttttctggggcgagcacttcgagttccacaacttgccgcctctgcgcacggtcactgtccacctgtaccgggagaccgacaagaagaagaagaaggagcgcaacagttacctgggcctggtgagcctacctgctgcctcggtggccgggcggcagttcgtggagaagtggtacccggtggtgacgcccaaccccaagggcggcaagggccctggacccatgatccgcatcaaggcgcgctaccaaaccatcaccatcctgcccatggagatgtacaaagagttcgctgagcacatcaccaaccactacctggggctgtgtgcagccctcgagcccatcctcagtgccaagaccaaggaggagatggcatctgccctggtgcacatcctgcagagcacgggcaaggtgaaggtgcgtgcaggcccctcggctcctgacacaggctgggcggcagcactgggttacctgcccttcctcacatccgtacatttcaggcctaacagaggccttggaggcaccggtcactaccagaagggctccctaaacccaaaagttctatcgtgggctgggggttttgtactcctgctctgtggctggagctgatcactgaggcctgtgtggagccagtggatgggattgcagctggtagtgagggagtgggcttgggttgaggtgccttccaccactgctgcagaggaccgaccccctgaggcgccaggggaacaggctgggtggccacggctctcccagcacacaggtcccacaacgccaccagccgcagtgagccaaacacacgtcccctgtggggtatggagttcggcagacctccccagcacgatgcacagatgagcctccctcacagctctacctcaccccacactctcacccagacacacagattgtcacacaggtagacacagtcaaaattgtactattcgagggttagccagccccaccccagagcctcacagaagcgggaatcgtctgagacccacccaggcaagtcctagttcagggccagaggtgctcaatgtccatctccatgacccctttcaccttccgctcccgaagatgggcccagcagcccaccatgcaagccgtgcctcagccccacctacccggtttggggacaaatgggctcctggaccagggtgcccctaggaaggcagtagagcatggtctgtgggcctcgaaggcgaccttctctctttacatttgccacctgccattcaggaagctggccaaagagggtgggaaaaaggggctggacttgaggcctctgcagcgtggatggaccctggtgctgggctaaggactgggcctctgccctctggacagtggcgtgttgtgagccaagtggcaggtggctgaggggcaccctgtgtcaaggtcctaggcccttagctctgggtcggggaggcacagttgggagccataccccagggcagagtccagggcacaagactcgtggaggtccctcaccctctcacctgttcctagaggccctggaaggggaggccatggctggaagcctcagcagcctctgcagcccccctccctcttgcacttgctgtatgctgcaagtgcagggctggggcggggacctcctccccatggacccgcgatggggagcagttttcctctgtagtgctcagctacctcctccctcaccttctcccccagccttcagacttggctggctaggctgcacgttgggccagctctggctgccccgtccttaacatgctggtcaacactggggacgtatgctgggaaacggaatgaatcaaggacccatgggcaccagagagggagtgatgggggctgcagaggctgcattattttctgcagttgtgtctgatgtttcagtacctggttcccagggctgggctggggctggcctgggaagcggattcctccctgaagcagcctgaaatgataggtatgtccaggtgctcgtggagggaggtgaagtcagggctgcagccaaccccaaaggccctcagtgggattggggagcagtagatagaagcatagaaagtaacttgtgctgctggggtgacaggtacctaagcccccacccctggaatacttgggaactagcccctcttccgtctccacggctagaggagtaacggagtctgggaagcaagggacttggaccagatctggccccaggtggctgtgtggccttggacaagtcattttcctgctgtgtgtgcattggtttcccccttattgggtcctggctctcaggaagttctcatcccagcactggggcctggctctcattgcgggagttcaggaaggctgcagtcctgagcgggagccctggaggagccccgggggagatgcacctctgacccccgctttagtgtattcagagaatgagaccctggaggtcgcctgctggtcaggaaggggtcctcaggccacatgatccccaggaagccaatgacagcttcccctttgcccctgctgtccctctgtgcctctgctgtgcaccctgggttcctgtgtctagatctcagttctgttttaaaggaccccaaggtcgtgcatgtcggagtgaggaatttcttgagcacagatgcctgggtccacccctcctgggcaccttgcaggctctgtgctaggtggccccctgccctgactgtcaccctcccttgaaactatgacagtttttcctattttcttcccctcccccaagccacaggttagttgtgagcacaaggaggtgggggcttctgagggagggtgttagtatctgcatggttgctagagtagggggaaggtgtgggttcgggctcctgtgctggggttttcccacaacactgtgtgtgggacctgatgggcctggggctgctaccctggattgccaggtgggcagtggcgcctccaccttccctctccagccagttgcacatcacttcctgctctcacctgcctgagcatggtggctcacgacctccccgggcagtggggctgcacagaaggcatctgtgtctggtgtgggagcccccaccagagtcataggtggatactgatggccattcttaccatgagacagggcagcctcatttgtcctctttggcactgatggtgcggggagaggcgagtcctgctgtggtcaccaggccaggcctgatcagggctgtacatggaaatgagtccattctctgtggtggtgggggcttgtggctccacgtggcatgctctcattcaggctgcctccatccatagacccggctctactgtcaccagttctaggctcctaccctggctgggggcccctgccctgcccacactccccagcagcccccaaaggtgggcacactgttcctctccgggacccccgcagcttggtgatggaacagcctcaaaatgccaggacttctctggctaggtctggaatcctagggccctccatgccaggccagctcaggtcctgctctctccacctcctgcctccccaggacttcctgacagacctgatgatgtcagaggtggaccgctgcggggacaacgagcacctcatcttccgggagaacacactggccaccaaggccattgaggagtacctcaagctagtgggccagaagtacctgcaggacgccctaggtagggagtgggccagcagcagggcagagggtggggcagggcccgccaggtcctcactccccactccctgcccacttgtccataggtgagttcatcaaagcgctgtatgagtcagatgagaactgcgaagtggatcccagcaagtgctcggccgctgacctcccagagcaccagggcaacctcaagatgtgctgcgagctggccttctgcaagatcatcaactcctactggtcagtgcggtgcccaggtctccccaccctgtcgccttccccatcctgtccttcagtgtctggcacccgcagtgtgcctgatgctgcctggcccctgagttgtactgacttgccagtcccctggcctagtcccttttgagctctcaggtggggcagcgttcagcatgttgctgtggttttgtgatggaaagaacctggacacgccagtctgccgtctctggtgatgagggagcgcccttcatgtgccgggggctattgtgggtgcttgggctgcagcgggagtgagactggcaggccctgtgtgggcccccacttggggtgggcggatggcttcacctgaggctcctcacctgtccgtgggagctaaggtgctcatgtcacagccttgtgatggggccaagcaggggcacgttgggggcctgagcaccaggcaggcctcttgctgggactagagaataaacagaaaggactagactttgaagtagaacggggtctgcagactctgccagccccagaaagcagcagggcatgcagcagtgggctgcttagacaggcccctcagcaggaccggaatcagtcccggagaaacttgcggtaaggccgacttcacggccaccagcttgctcctgggatatatgtgtgtgatggccagccagcctggtgccgagtatagcctcgttctgtggtggcacacaggactgtgcgggagggccttgctgtcagcccaagcagtgggttcatattcaccccagaggagctgcccaggtttaacctgtgtccccctccagctcagggcttacagcccccacccacccaagcctccgtccacagcctgttctgacaccactctctccccggccttacctcactccttgttaggttcatctctttcactcacctgcaccttcccctgcatacactcctgcccttcctgctccgaggccacacctggtaccctctgtcgcagccctgatcccatcaggatagggttgtgcctgtgcctaaaacatttcctgtgaatgctggggcaccctgggggcaggtgagcccaccacctcaggactgggcacacaggaaggccagagaagtgtttgctgctccccaaggacaagaaaaggcagggggaatgggcaggccaggagggttggcacccagggccttagcccctgggctatacaaggtgcttgcctgggccaaatgggcacctcaagatgggccacaaatgtgcagctttccacacccctgggccggtggaggagagcgactgtagggccttgaactctgggaacacacttcccattcccagctgggctgtgctttccccctccccctcttccaggggggctgggcatgtgactcagggaaaacatatttgtggacagtgattttccatttcctctttctggcatttatcagaggcacctctccattctggacaaggccattgatagatgtcaccactcaacacctgccccctgtccagttctgtgccaggcactgtgagagccacggctaaaggtggctcaccttcattccccgctaggtgtgcccttgatgggtcagccagcatgcattgcaggagagcctgctgagcaggctgctgggcctgtgggggaagaaatttcaagttggtcaagcctgttgtagccttggggttttagccttacgatggctctgtgagcttggcagggcaggccttgctctcagtttaggggagagaaaacccaagccttccaggagggctagggccttggtcagatcaccctgagctcatggcagagccaagtgtagactgagttcacggaccactggggcctggcctgccccaggctgggagatgcatcttttagggaaaaaagataggaaacccacttaagggttggccaggtgggcctgaccatggcaggccaggatgcccagtggaaccaggagccccattgtctagggccagctctgccggcttgctccatcaccctggggcagtcactacctccctttccctccccatgtagagaatggagagctgtgttgtcccaccgtgttcaggggtagtcccatcttcttgatctttctgagcttttaggaaatcctggattcctgtgacattattcaagcaaaggaaattagtctcaaagccagtgatgggaacccaaggaatagtggtctattcctgttttcctcacttccccctagacccagatgcctgctgtttgggttgaaaaatgaagtagacactggcagagaggtggggagggcccagaccagaagctggagaggtggttcagcactggcccttggcagttaattccggttaggacggagagccagctcctcatgcctcctcccatcccacctgcccggcccttcactgagaacccactgcccgatgggagcctgggtctccctgctcctcctcctgcctgggcacttgctccagccaccctgtattgactgctctccccagatggctgtgtcctcagagctcagacagcggggctgacctcacgcagctggcggggtagagccaaggttggaatgcaggttcctgctctgtgcactcctgtcctgggcccctgcctgacagccaagcccacctttgtctgtccctacacagtgtcttcccacgggagttgaaagaggtgtttgcctcgtggaggcaggagtgcagcagtcgcggccgcccggacatcagtgagcggctcatcagcgcctccctcttcctgcgcttcctctgcccagccatcatgtcgccctcactcttcaacctgctgcaggagtaccctgatgaccgcactgcccgcaccctcaccctcatcgccaaggtcacccagaacctggccaactttgccaagtgagtgcctcctccctcaccaggcagagttgggcagggctggtgtccacagggcaggccctgggggtgtttctgcccccaagctgagcagagaccataaacaggccctggttttgtccctgtcatcctcagtccttctccttcccgctttttaaaaaataaaatctccacaccctgtccttctactcaaggtatatgtcattttggtatgtttcttaatttttaaaggtgacgacatgagacatttttttccttctgcttttttgaattaatgtattattataaggattctcacatatcccttaacattcattaagccctgttttgaaataaatgactaatattcctccaagggggactggcccatatttccttaatccattccctgtgcttgggcacttgggttgggcaccaccatcctggtgtcaggctatcaggatgtctttgctgataaagcactattggtgtttttggctgcatccttagagcaagtgggcagaagtagaagggctgggtcgtctcactgttgttcattctcaaaacatagattgagccccatcctggggccatctgtgtgctgggctctgacggcaccaagatgaatcagtcctggtggcgctcagcacttcagccagggagacgtgtggaatgagcaggagagcagtgatagacacacacgagcctcttaggagggctctcagcttgttgggagaggagacaggaaagcctccagggtgacatgatcccccaactgcatgtcagggtgaggcgttcattgtctcaagaggagcagaggctgggcatcccagggagggccatgcactgtgccaggtcaggagaagcgggcgatgagacctaagaggacagcagggacctgaaggccagacagggctgtgggagccaccagagggttttaaacaagggagaggatggccttcctctgttctggatcctgaaaagctcaccctgacagcagtgggcagatgggttggagggagcaggatggtagccaggagacgtgaaaggagagcatagctgtggttccagcaacaatagcagaaaattcgcagggaggggagcgggtacaggaggcagtggctgcaagggacaaggttaggggtgattagaaggcaaaatcagtgggccgtgccatttgggaatgaggaagagggaggagttgacagctgccagagattctgtctcaggtgtatctgtatgggtagtggggtctccacttagggtagggagctcaggaggagggcatgggtttgggtgttgatgatgacttcaggtgtggcaggctgagtaggagggactcccaggggtggtgcctgcagatatattaatacatgcctgaaagctcattgggagacctgggttgagcagggattgagcatcatctgcataccagggcagtgaaacttggaggaaaagccgaaggacactgttaacaggcagtgtatgggggacacagaacattccaggtcctgagataaaaggttcagaaaaggatcgctggacttaccatgagcaaggagggccctggtgacctgggtcagagcatattcagctgacttggggagtgaatggagtgggagcctgccatagtggggaaagcgggtggtggtgtcccagtggagggagttcctgggcagggcctgcctgggcccagtagtgctcacccaactgccctctctccagatttggcagcaaggaggaatacatgtccttcatgaaccagttcctagagcatgagtggaccaacatgcagcgcttcctgctggagatctccaaccccgagaccctctccaatacagccggcttcgagggctacatcgacctgggccgcgagctctccagcctgcactcactgctctgggaggccgtcagccagctggagcaggtgcctgttgccgtggggcggaggtggggccaaaagctgccatcaggcttttagtgttcccccttccagagtaaccatggagggcagagagtttgcccaagtggcatgatcaggccaggtcctgtcagaacacactggggatctgtgggccccattttctctgtgggcaaatgctatgttcactcagcagtatctgccaaggctgccccactctgggtactagagctggggtgttccgcatgcactcagcctttagtggacaagcgccactgtgctgcctgccagagcatgtgagaaatagaattggatcgtgaatccgcctgtatgaagaagatgactcaagaccctgtacctccacttgtccagcaggaagtcgaaaacctttctaggattgcccttgaccatcagttgacaaggttactccctagacacctctgacactgctgcagtcacctgaagtgagccctccctagcccgagacttcactgacccccagcctcagcccacacagtgagcaactagttcttggacttaagggctgggtctaccaggaactacttcccgaatatctgttgctttctagggctccaagggaccaccttacttttgtaaggtgctgaaactggcctggaaggcccttcatgcctcctggtcccattccctagaggtgaccgctcagagcactggtatgcagccttctggacacgatctgtgcatgtgtaagcgcacacacacatgcaggcgcacacacatagagctcttttccttcttcagtttgttttaaagcaagaacatactgtgtatgctgctgtgtgcatttcttaccactgtgttgtgggcctctttgcttgtcagtgcaatctccaccacccccagggactttttaatgactgcattgtatgaatgctatttatttcaccagtcccctattgatggacacttaggttagtcctgacttttcactagaaataggtcctgttgcaatcaaaggccatcatttttgctcatttgtatccacttgcctttggctgtgagagacacaggagggagaaatggaaatgagggctgagaccctacattccacctgttccagtccctgcactgcagccaacactagtcactgtcactgccaccacttacctttcccctgtgctgtccacgtatctgcacaaccaggcaggaagaatggaaggtgatcagtattgtcacatcggtgatagggtgcaacagggatttgaaactcaactgtttgcctctcaattgcgtgctctattgcctgcatgagttttcacactttgttttctcacagagacctctgtggaagcttgtgcataaacaggtgaaggcagtgtccccaaagcctagaatcctctgccccttaagttctctaaagcgtgccagcaaggttcagatgggttcaggcactgccttctgcctgaccagcacctgagggtgcctgcagtgtgcttggaccatctccactggggctcaggtgccaaggtgggtcaggccccagcccatcccgtggagtaagtgatgtgagaggggctgtcacagaagcctctggatggagaggtggaggtgtggaaatgctgggattccatgtgtgctttcctctctgcggaggcaccagggcagggcaaactgaaggagaggcttgcactaggtcagcgtctcccactgtgggcctcctactcctgccctagaaatgtccgggagctggttaaaaatgtagatttaccgattcctgggctcacccccctcccagacccagtggctctgactggcagcaggtggggatctgcacttctgacaggctccgcagtggttttgagccatagtggctgcagcacatacagcctacccatgtggtcccaggaggtcacacctgcctcttgctgtgcctttacagagcatagtatccaaactgggacccctgcctcggatcctgagggacgtccacacagcactgagcaccccaggtagcgggcagctcccagggaccaatgacctggcctccacaccgggctctggcagcagcagcatctcagctgggctgcagaagatggtgattgagaacgatctttccgggtaagagctgccagccatgttgggtgtggtgggtgcgtgtgcagactaggcacagcccatctgtaatctcagatggggaaagaggatgcctacatagtgtttataaaacaagcctggcaagacttgagttgtacaggtcctaagtggtgaacctccatttgggaaaaatcagggaagccttcctagaggaggtgatgctataggtttgttttgttttgggaaaagtagcatttccattggtggaaaaggcattctagacagagggacaagcacaagcaaagacatgatgtgtcagagaataattgctggtcccaaatacccccagcatttccagatcccctgatatttgttaaaaatacacatgttcctggtatttcctgagcctgagtcagaatctccagaagtgtttagttgggggtgttttcaataggaattcggtggctctgccaggctttgaggctgggaacagcagaaaacataaagtgatgctgagacccagtcctggggtctgctctgcctaaataagacacacacggcagagtggaaggcaaaatgttcttgtttaagtcaaaatagagacatttctatcagttcatgttgaagcatttctgctctacccctactctcccctctcccgccagtgatccttcttaccccagcatgtgaggccgcagctgtagcagcagagttgggagtgtggtctcccccaaggtggtggcagggcaggcttttaagcaggggagggtgctgagatcaagaacctggggttaggggagcccaggaggggccagagatgcaggtccactgagtcttgcattgggtctgttcagtgagtgtgccaagtgaagacaagcagagtcacatgccaagagtttggagtggggggtgcagtagacagcccttgagaggctgagaggcagccgggcccgtgagttctgaaaagactgacctggtgtgtggcctgggcagccaggcccccactgctctccgtctttcctggctcatctgctgctctagccagttctcccaggcccgtgagcactgcagcccatctcagggagtggcacttcctctccgtctgaggctaagccaacccattccccattccaagccatatcaagccccccaagtccttgcagccttcagttccccccacccacattcttctctccaaagcccccctggaccccgccacagttgtgctttcttccaaggagctagcttctggggaggggccagggagaggccagagaaaagcgtagaatgaggaggaggccagggcaagtgcagccctcccaccaagtcatgctctccacagagcctgctctcattccttgtttttgccaggaactccagcccccgcctgccagtcaaacaagggagcggcagcaggaggctgggcaagaggaggtttcaccgggcccccacttcagttaccagtctgattaggaacaagagggaagaggcagagggaacccagtgactctgaagttggggttctcaatgcaggatccgtggatagcagagagccactgagttgtggcttagggcttagctaaggaggagttttccagagcaagccaggccccagtacccattgtcccaagatgcagctgaacagggaaggggtcttccaggcagcgcggcctgaaatgtgcagtgctggcccctaaagaagaggttctgtgcaggagcagccgcctcagcctctggtccccggattctcccactcctgccaccccagcgcatccatctccccagcgctggctcaggctgccaggccccggcaggttggcgggtgctgtcggtttggacccgccttggctgcactcacagttcttcttttccccttctttccctgtgtgtgcttgtctccctgcagtctgatagatttcacccggttaccgtctccaacccccgaaaacaaggacttgttttttgtcacaaggtcctccggggtccagccctcacctgcccgcagctcgagttactcggaagccaacgagcctgatcttcagatggccaacggtggcaagagcctctccatggtggacctccaggacgcccgcacgctggatggggaggcaggctccccggcgggccccgacgtcctccccacagatgggcaggccgctgcagctcagctggtggccgggtggccggcccgggcaaccccagtgaacctggcagggctggccacggtgcggcgggcaggccagacaccaaccacaccaggcacctccgagggcgcgccaggccggccccagctgttggcaccgctctccttccagaaccctgtgtaccagatggcggctggcctgccgctgtcaccccgtggccttggcgactcaggctctgagggccacagctccctgagctcacacagcaacagcgaggagttggcggctgctgccaagctgggaagtttcagcactgccgcggaggagctggctcggcggcccggtgagctggcacggcgacagatgtcactgactgaaaaaggcgggcagcccacggtgccacggcagaacagtgctggcccccagaggaggatcgaccagcctccgcccccacccccgccgccacctcctgccccccgcggccggacgccccccaacctgctgagcaccctgcagtacccaagaccctcaagcggaaccctggcgtcggcctcacctgattgggtgggccccagtacccgcctgaggcagcagtcctcttcctccaagggggacagcccagaactgaagccacgggcagtgcacaagcaggtcagtgctgctagtcagagggcagggctgggcacttgggcccagctggggctgtcataccccataccatgctcctcctctcggtcatttcacctccaccctcacccagctgccatcccatcccaccagcctgccacatgcgccaccaccccctccccctggcttcttcctgaatcctgtgaaccagggacactgtagccttggggaactccaggctcctctgtcagtgcccctaggggcaggctggggtcagagagaaagaggaggagagtgcattcatcttcggttccaagcctgtcgaagcgcctacccagctctgcccccacacgcccctcccaaaatgttttcacaggctggacaggccttcaggcacaaccacctggagcatggatgaccctgtcacccaaaggctgcaggcagtgtctggagtggaggtgccttgggctgacagcccagcctggccctgtcccccactcagtgcagcctgccccggtgcccccagtggcagggtcactcactgtcctcttggcagcagagtgtggtgctcaggaggccacctggcacctgtcagctctgcctttggctgccgtctgagagacagttcccgggtggggactgcctcggtaggcgctcagtcagctggaggtcccctcttcccaccgtgtcccagagttgcttgtccttgtggctcacctgggccactcccgcccctcctgcttgccctccacctccctgcagcccctcacagctgtgtttcattgtagggcccttcacctgtgagccccaatgccctggaccgcacagccgcttggctcttgaccatgaacgcgcagttgttagaagacgagggcctgggcccagaccccccccacagggataggctaaggagtaaggacgagctcagccaagcagaaaaggtaaaactggaccctggcggctcgggacagggcggggctgcctcccggcagcagctggtaggagtctctcccccaggtcccccagcaacgggtgctgctgtccttgtgaagggcccgtcacctctgagcccctgttccctgtgagaatagcagtcagtggggtctggaagaaaagcaacaagagggatggattagcagcttagacctgaggcttcccatctgcagattggaatcaccagggaattgtcttggatacagactcctgggacctctgggaaggctccttagcccaggcaactgaggcagttgagcttcctgaggacctgggggttgagggctgagggtgcccaagtgacatatagaagcccccctgagggaacttggtacctgaggaggcagaggcatgggtccccaggatggctgggagagccaccccagcctggcccccaaggcttgtgcctgcccacggcctggctcttcacccctctggtctccaccagggcctgggaaagaaacagcagttaccagcttggggggtggggtcaggctgccattgagatgttttcttccccacccccgggaaaagaatctactctaaaaatgaaactctcactctgccacacactctgccatctgctggggcaaggggatgcttcgttggtctcccaagccttccagctgtggcagctgctctggatctgggggtagtttttgtctcctactgccagctgcagtccatgtagacggaggaaccagcgcaggccccagaacggcaggcgcttctccactcccctctggatgctctcgccccgctgggccccaggaaagcctgtggcaacctctcgagcaagggtattggggtcagaatggcagaactccttctccccggcctcaggcgaggcccgtctccatgctgcatcctgccaccgccaccatccccggtccgctacatccacctgctttcaccatagttacatgaaggggaccgggggacagggaacacagtgctcccagagccagagtttggctggggagtgaggaggactggcctcactccaggctttttgcatccctgtgtcctcatggcgtctggcccctctcgatcccggcgttggcctttcctcgctcagcgcagagcacctgactcctctctgcagccacgccgcttcccagcctcgtccacatccctgctcctccctgatggttggggtctgtgctggactgaggcagatccagagcctggaccacctgcctttcagttctctctctctccatttcctcatgccactgccaccccctggctttagattcaaacagaggctgggaagctgggatcttaccctgctagtcagtcgctcttcatgtgacatggtcaccttgtctgggcctcagtttcccctcctgcagagctcccacctctcagggtgctgtcacatgtccttcatgtatccaagggttttttaacctttgtcatataaaagttcaaagccctagttacaccctcagtcctgggacttgggtctaagtcttcatccccgctgtagccatacaggtcaggctgggagtttggagtggaggccccacggtggggcacaggcacgcgtctggctgcagcccccaccagctgggctccttgggcatctccttgctatgtgaagtgggcgggtcacagccactggggcctttcaagtggggctccctcctacccttcctcccactcgggctgacgaagctgtgctctctgtgtcctgggtgctgtgcccgtggacgctgccctcctggtaggacctggcggtgctgcaggacaagctgcgaatctccaccaagaagctggaggagtatgagaccctgttcaagtgccaggaggagacgacgcagaagctggtgctggagtaccaggcacggctggaggagggcgaggagcggctgcggcggcagcaggaggacaaggacatccagatgaagggcatcatcagcaggtggggcccacacctgcctggcctggccacaggcacaggcagggcagccatcgctgccttcgaggaggcccctggtcggggagcctcctcaaaggataagctgaatgtggagagaggagggaagagagtgtctgggcagtgggagcagcgtgagcacaggcctggaggcaggaggtggcctggagggtgggcagcccatgcagaatacaaagctggggatgaggctggaccaatgacagctggctcccgacgggcctgagcctctacaaggagccataccatcttagtaagcactctcaggggcgctgagaagctggattggggggtgccaggaaagacagggaggaccccaatacagggtaagaaaagtgggaatgagtctcagttacgtatagtagatgaaggtggaagacacagcgtagcccccagattcctaccaagagtgtctgggtgtgggcgtatcagggtaccagttactgagctgggaactgttaagaggagtggtttgagtggggagggagagggggatggtgccagtctgatatcctgagttttaaggggcctgggttatctgggaaagggcttcagaggaacagcgggttttaatgctgactctcatctttttgaaggcttatgtcaggccccatgttggtgcctccatctctgtctctggctctgcctatgggtagggcatccctaccttggtgtcaggcagggagtacaatcaaccccagggtcccagtcgtggagtttacttccttctcagtaataccaggcacgggaggagagacagtgtgtcttgtttgaattggcctggtctaagaccccatcagctggacagaccaagcaggtgtgcaagagccaggaaggcctctgctccatgttttgtctatgacataagcccttcccagattcctcctatttagaccacctgtttctctgttcctgactgttgtttgctccatttacttgtagtttggttcattatgaaatagttaacatgagtgaaaccagggtggctagaaacctgctgttcacttgttctccagctctgctcttggctcaccttgtgtgtgtttccaagaatggaaatgcttttcaatttaactgccttctctacattgtgtgtattctctgatatttgcatgttctgaattcagagacttgcttaacacgttcgtttctactaaccaatcctggaatatttcctccttaatgtaaatgtcagttaggtagatagtgttcaagtattccatatccttactggcttttctatttctcccttcattccaactggtttttgctttatgtacactgaaactattcttaggtgcatatacatttaggctgtttatgtactattgttgaattaattccaactggtttttgctttatgtacactgaaactattcttaggtgcatatacatttaggctgtttatgtactattgttgaattaacctctttgtcattataaaatcactttctttatcccttgaaatattctttgctctgaaatctgccttgtctgctattaatgtagccaccccaacttccttttgattcgtgttggtatggtatagctttttttatcctcctgcttttaactcattgtcttggtccattcaggctgctataacaaggtaccttagactgggtaatttataaacaacagaatatgtattgccctcagttctgaagtctaacatcaaaatgccagcagattcagggtatagtgactctctgcttcatattatagtgcaccgttgctgtgttctcacattgtagggggtgtgagcaagctcccttgggcttcttgtataatataaaagcactaattccatttttgaaggcaaagcccataggatgtaatcacctctcaaaacccctacctattaagataatcaatcaccttgggggttaggtgtcaacatatgaatttagaaggtgacacaaacattcagagcatagcacccatctatatatatgaagtgggtttattttacgggcaccatactattgggtcttgctttcgtctaaatggttctgcctttttattggagtgttttgaccatttacatttaatgtaattattgatatatttaaatctgttgccttgtttcctatttgtaccatctgttctttttttcctgccttcttttggactgagtatttttttatgattccattttctctcctattgacttattagctttatctctttgttgctctagggcagggattggcaaactttctacaaaggagcagatcaaaagtattttaggctttgtaggccatatggtctctattgcaactgttcagctctgctgttacagcagaactatttgtgtgagatggctatttacaaaaacaggcaatggtccagatttggccctcaccctgaggctgtaatgacagggagtctgtcattgtctttgttcctctgtactttatgtatctgttttccctggctatttataagatactttttttttaaatcactggttgtcagtagttggattgtgatgttcattggtgtggttttcttctaatttcttgggtcttggatttgtatgtctgcagtcccacctccccccatttctttctctgggattcctagcacacgtgcattaggctgactcattttgtcccgtatctcactgatgctctgttatcttctttcttcattttttttctgtttcttctctttgatagtttctatgactatgtcttcaagtttgctaattatttcttcttctgtgtgtaacctgctattaatctgatccagtattttttcacagcagataattatatttttcacctcttagaatttcattttgctttaaattccatcagttttaattctcattgtgcttttacttctgttttctgaaacatgtagaatatatttataataccttgttgttttcatgtccttgtctaattctatcatctgtgacatctgagtctgtttttactgatttattttccgcctgcttatgagttttcctacttctctctgtatacttggtaatttttggttggatgccaggcattgtgaatctcacagtgaggtgctgaatgtttttgtgttcctttaaatcctttctgggggctttattctgggagacagtgaggttacttggaatctgttcaatcctctcagggtttccttttaagttttgttaggctgcgtcctgcagagcctttagtcttggcctaacgtggccctgctctgagggggtttccttccccgggtcctctgtgattcccagtgttggtgcgtcactgcactctcactggtacaacatgaactgcttctgcgattgtttcgtgttctcctttctgacggttcttgcctagcctggtaattttctcatctgcatgcggatattattcagtcagagacacaaggggaacccccactcgggagctatgtggagtttctctctgcctcttgctcctctctggcttctgccctgcaaatcccacacctcttgaccttcctgacctgcctgtctcctcaactcagtgaggctgctgactccgccttccctctgcttccaggccgttcactgggctctccttgttggtttctgttctcctagaaattattgtactgcattgcctgtattgtgtccatttttctggtttgtttgtttggttggtttttaataaagagatggggtctcgccatgttacccaggctggtcttgaactcctagtctcaagtgatcctccctccctggcctcccaaagtgctgagattataggcgtgagccaatgtgcccggccctatttgtttttaagacaagagagtaaatacaatctccttccaatctaattttccttaataaaacaaataccctcctgccaccccacccccagcacaagctttcctcagagtgataccttcctgtactggggaacctgccccggagggtcccccccgccaccaccgctcctcccagttagtgctccctgaactgctgccctgctgcccccattacagtcccgtgcagaaccggccccggcacagtggctccctgtgtgtcttctgtgagtgggctaagtgcttgcccagtgtgcggtggctgctctaggctggaggaatcaagagggcagggatggagagaagccttgggagtggagggctcatctaagagtgtgtggagcaaggagaagggaggctgaggccaaagccctgtggacccccatgtccagaggcagacaggacaaggcatctaggagacaggcagacccagagagtgtggggtctcaaagccaaaggagagtgggaaggtgggagtgcccagcagtgagagtgtctcaggaaccagccaggtggggccaggagggctcccaggcagggagcagcaggacggagccggcctcctgcccactgagcttccgcgggtggtatgtcccccagctactgctcattgttctgcctgcacacctgtccttcagatgtctcctactgatgtgcgacctcccagcccaccctccagggaacgtcactgcttcctgctctttgttccagggacctgagctttccactagcgcagctgctccgtgcagggtgtagttagttactcgtgcctcctgccttgtgaactccttgagggaaaggactagagttcattcatcttggcacctcgcgtacaactttgtgaagatggcgggggcagggtggaaaaagttctagagcctttcagggccttcgtctttccaccacctgcctagctctaggggtttgaagatctaatgcccatttccacccatcttggctcctggaagaacatcgggaaaggggcagcccgggggcctctggggctttaggagcagcgagtgtgggatgtggaggtgaggaaggaggcccagcagtgtcagttgctgggagtcggctggagggcctctgccccaggcaagtatgggaggcaagtctctgacccaaggaggggctctcctagtgtgtccctgctgtgtgcgggggtgatgggcttgttctcacaccctccccacctctgctgcctccagggccagtctgactgtctctgtctctggctataggttgatgtccgtggaggaagaactgaagaaggaccacgcagagatgcaagcggctgtggactccaaacagaagatcattgatgcccaggtgggggctccggccctttggtcagccacaagagttaaagggcctgggattaggaggggtgactagcctctccatcctcagtcatacctcactgcagacactgaggggaataagaaaccagaatctgccctgagaagtcagacctgtggtcttagtgggccacaagctcactaggacaggctgtgaaaggagagaggcagctcctcccctgccagggctcttggcgggcattgtctttcaccaggactgctgaccaaagagtggaagccaccaggagggcagtgggggtaggagtgaaggcaggctggtcagagggagcagtggggctctcgttcacaactatggcatccgggctgcattgaggggagacgtgaaaggctctgtggccccagcctcctttactcagggctgcaccgctttcctttcactcacccaggagtaggctgggccttgctcaggctgtaaactgcacagaccaggagctgtgacctctggtgtgtcatgcacacacatgtgagcaagggtgcctgccctaggggccgcaggcagcccatagacagcactagagctgctgcatttgggctgataagcaggcagcgaggctgtgtccatgatgctgcagaggcctctgcctaccttctcttgccagctgctcacagcccggagcctgcctgccaccctcatctccaggccacccccttccccgatgcttgtcgtaggtatacacagccctaaggagcctgtcccatgacccccgctcacatccccattgtccacaggagaagcgcattgcctcgttggatgccgccaatgcccgcctcatgagtgccctgacccagctgaaagagaggtacagcatgcaagcccgtaacggcatctcccccaccaaccccaccaaattgcagattactgagaacggcgagttcagaaacagcagcaattgttaacctgcctgaggagggaggaagctacccaaggagagggggactatggtggccaagggcagggtctcggcctggggaggcacccacggttgcagccccagcgcgggtgtcaggaggccgagcctcccctccctgccgctgtccaggaggcggccgca

SEQ ID NO: 15535 - DNA, 86159 bp, Homo sapiens
agccagcccaagctggaccgcaaccacagcttccgccacatcctgccggggttccggagcgccgccgccgccgccgcggacaatgagaggtgagcccgccgccgccgcccggtcccccgcgccgccgccccgggctgcgcccctgaggacgcggggacaaagcgcgagcccggcccggggcgagccacacggcggtggggggaccccacgccgcccgccgggaacttatggggccacctcggccggactagggggcccgaggggaggaccctgtgcctccctccggggttaggtgagtagaagagaggagagcagagggtgcccgcggcggcccgggcgaggccgggcgcgaagtcccctcgcagggaagtcctgcctcgcctgtccgaggtgggcattgtttcccgggccgtgcggtgcccgaaccggggacggaagtggggcctctgccgccaggacccatccccctgccttgggagcccctgggtatcagatacaaaaggcattttcggccgggtttggccgagaccgggcgctgcccgtggtgaggggaagggtgaacatctggaggggaggagcagggggctgggccacttagggggcacatctgctctaagtagggcgcgtgctccactgggggctggcgctagcagagcgggcagtgcccaggccctgagctgggggcacagcctgaggctggggagccagggccatctcctctccagcctaggcagctgcttctctccttccctcacctctccactctcaggggtgtctcctgctttctgtttccttctcctgggccagccgggagcaggtgtggaaattccgcggggaggtggctggtggggcagaaggggagagggaggaggaggtggttcaacctgccgggagacgctggccagggagcaggcttcagctcgcaagggcaagccatcctgtcctccagggggcactgggcggacacagcctctcagggcccaggtcctcctcgagtggtgccagccacaggcacctttccacttaggcacaggcatggtgatggattccagtgccagttagaacatgtccctgcccagcctgtggaggtgaaagtacgggcaggcaccgaggagccttttcagcattcagcccgaacgtctcagaccactggcatctgccttcgtagggctgtgtccgtgttggcactccctgtaggggaggcgtaggtagcatgaaaatgtctctcccctcccccttggttctagcgggcagaggagtacaagttacagcccaactcctgcccaaggttgagtgactgtttaactgacccctagcatcttcctggagagtaacacttccacctcccagtagaatggctagacgtttaatttccatcgtcccagagccgcgctctccagtgcatcctcaccactgcctgcagctggtttcctgccccagctgccaagcccagcctgaggcgggaccctcagcctttctctgatggccctggtgccccaggggaccaggcgtgccctggcaggaagatgcagccaggccagagctcagcgctgggtgcagtcactgcgtctttgaaaatctcgcttcccatctttgttattgtctgggcggcaggccacccggtttgctgccttcctccctccaccgggcccctgccttcggctgtcttccccaggaacatgcccttctccgcgctttccttggcgggggtcaggaccctctgcacccgcatgcgggggcttgtgtacgtaccccgttttgtgtgcatgtggtggttgtccggggagcaggagagacaacaggcagtccggcttctgagtgtgtctgctctcccgggagcaggcggcatgcatgtcatgtttacctccttacagcgggaagcctgtacctagaagccggcaagtgctggctggccaccctagccagaggtcggggcatggccaagacgacctcgtgcgggtcctgccccacttggcctcaggtcagccttgccacatgctgaaggggcgcagagtgggggttgggagtgaaactacaagcctgtttctggaaacagtaggaaacggtagcggttggagcagaatgtcactggcagcggtgtggaattgtcttattaattttctataaacaaaatatggcttggtggcctctctggcacaggaagggagcctagatttcccatggacaggcagaaagactgggtttgaaatctctctacccagccttggagctgaaataggctttcccaggactggggtctcctgatttgctgctttgcttaggaacagattcgtcggctgctgctgggatggatgggcagaaatttctctggggctgtccctggagtcatcctatttggagttcagtgagtaaaaacaactatggtgaccccgcccgccccccagctcatggccaaacctggatgagtggagcagtgcctctccctgctctgatgtggtgtggttgtgatgttgaaggctgggagggcaggatgggctgtctttggcttggtttagcagcaaggaagggttgtgtcctggctccatgggacccccactggctgccatgcctctggctggggagagggtaagtgccaagacgctagcctcagtgagtgggtgggacacgagtgggaaggacggtgggggcttctagggtgtcgagcgggagtcctggtccccatggccttcccgtgtagatgagcggcacagggcactctggggcggccacttgagttctgactttggatgaatctatctggtttatatggctgctgaagaggctttgttgaatgctgtctgcgtgctccgcaagctgctgtgttggggaggtggtttttttgcgctggaattctctcatctggaggttggaaaccagttggttctgtgctgggatttttttggctccctggaaaaggagtcggtttcaggggtggggatgccgaacctggctggttgggattgagggttgctatctggttgtgaggctggggtcaggccaggcagtgcttggttggcacagctgggctctgggggctgggggctgtaggacaggcttgagccttcggacttattcttctgaaacggcctcaggggaggttgccagctggtctccacagtctctgggtccctcagacactcatttcttcttcagaagctttggcagtaagcaccaaggacaggtgatcatttctcctgggtaacaaacacatgctgcttggagcgctttccaggtgaaaggtgtgccggcaaaagcattttcattttgcacactggaaatgctgctgcttcatttacagggctgttttaatgttggtaaaagtgatatagaggatgtggttctgtcagcccagaggataatttccaagtcattcatttatttattaatgttactgaggagctaggagggtcagttggcaatattatgctttcctcattccttctctctcctgatgctgtttctgggtgactctagccctccacacctgctgggaatatgcttcctttggcatgctacctgtctaaacttaccacagtagttactctaaagtgtctgtacccccatcaagctcttcccagtcatcctggtgcggagcttagctcataaatgcaggcagctctggggcaggtaggcaaggctgctatgtgtggagttagggatcgattcccccttccagagtatgtgtgtgctggctggcgttcccacacctgaaagttactaatggtggaattccaagtgataagggactagggaaggagatacagtacttggatgttggggatggcagcttccagggaccctcacctggacctgggtaggcaggaatcaattctgccccttgtggtgagacagtccctggaggagggagagtgaggaaggttgatgaggaacaggggaaatggaagttagggtctattttcctgctttagttgctgacagtaagtgcaggcaggactgggcacccaagtctggtgtttcttgcccttgttccctcccctactatagacagggagggcctggtcctttttttggggactagtctgtctagtgtggtgatgtcaagatgatagtgcagtttagacaattgccaggagtcatgggatgtatgtgatctttggatttgaagccaagcattcctggggcaagtcacgtaaccttttgcagcctcagtttgctcatctgcagaatgggcatcatgataatcatgttgttgaagacattaacattaatacatttagcacacttttcatagaaattttctggttcagtgctgttttcttagcatttaacactgggtcttgcacatttcttaaatgtttctaaaatttaattaaataatgtgtgaaagaggttagattaatatgtcataggttttcagttaatattggtagggttaagtcacctcgtcttggtaagcctcagttttctcatccacagtgtgggaataataagcaatcatgtggcctcatcctgaggttcaagagataatagatgttgctgtgcctggtaaggtgattcgagcttaagatgggtcattattgccttaaacttaagaaacagccattattacctagagcacaggatgttttcctagggattcctgcttacacctgggaaagcaaagctctcatgtgtgttttaataatcagttttaaaagttcattgttccatcttccgtttgggtcatacttgtttttaatcatttaggcatttaggttatgtctaggttttctttattaaaaatgacactgggatttaaatccttgaatatttatctttgcctacatttctgatttttcccaaaggataaagtcttagaaacagaattactaggtctaaaaatatgaagagtttgagatttttcttagaaaaatgtcacccaccaaaatcctgtaataattcatacccctccccagtgatttttgagagtgcttacctgtttcctcacacccttcaaaacattggatgtcatcattaaagcagtctttatcgtttggataggcagaaaaagggcatttttttgttatttgcattcatttgcttgttggtgatcgaatagtgctttcctgagtttcatggccagtggcagtgcttcttttgagacttgtctattcctgtcctttgcctgagtgttctgacaagcctcttgcaggattcttggttgccctgtttggtcttcctcagctctgagaggtcccatgtaggtggatcctacacgttaaatgagcctctgccttccaagaggtatgacaaggaattcattaattacctgtaaggaaggctcacctggctgtcctctcctcctccccctcccttcttctttccaccttcctcccgtcctctcctctccataaggaaatcaggtttaattcctaatcctatcattcataaggatgccctgtatttacacagcactttaagaggtcttctgccctgtagggtaggtaggcagtgaaagggctgctctatggccaggaaaactgaggcacacagtcaaaggcatggagctggggcctatgcagaagccaggcattggaaccagatcccctctcaactgcagcattgtacttgagccccatgggcacctttgggggcagggctgaccggcccaggagcacatgattctgagtctcatctctagagaggaaggggagagccacagaatacgacctggacgtatagaagaatcaatttattttttgctttctcatttttattactctcctttagatctggagctcccttgtgtaccttcccaagatctgagctgggcaatgtttttaggaacggtggaaattagctagtgagaatgggatcagcaaggctggggtttcaaaggctggagaagcctttctttgcacaagcatatgtttgtctgtgtacgtcttttgtatgtgttgcaagtgtgcacctgtcctcatgaagatgtgtgtacattatatgttaatgtccttatacatgtctgtgcatttaattgagttaatacaggtgaagtatttggaacagtgcctggtacatcatatggggtgagactgtataaagttgctgttttgggaggccaaatacaggcaattgcatatgattcaatctatgtgttcaggttaagtgttggctactattgttattatcgtgtgttttcttcttgggtatgcatctgccagttgtttgtacatgtctgtgtacgtataccctgttgtgcccatgtgtatagtgtgttctgtgagcactcacgtgcatacttgtgtgcatgtgtgcactttctgtctgggtgcatggacactgagctggccggtgtgtgaataagctccccaccttcttggggagaacttcccagagagcaactctttgcctcccctctcaccttcggttaccaggcagagcccaggcccaggtgccaggcctgacaggtgccatgggactgctttcattctcctccaggtagccctgcctatttccaggccccatattagaatatgcaaatcgactctttaatggaattcctttgcaaaatattacttgaaccagtaagttaattaccaggctctaattaatggctattttagaaggccacagaacaaaactggaggagatcataagagaccaaaaaggcaagagggaaaagcatccagctcccccagtcggcttggtgactccttccagggtggcagggtgtgcttagcttctctctgctctgagctgccagtccgctcccttgtgatgattggctgtaggtgagtgaatgctccccttgcacgaagaacctctggtggttctagtctcttggccatcagtgcatccatctgcgaggtgtgtccagggcagcatctgcctggggatggggtgagaatgtgtggatagcaagcctgggctgaggtggggctgcaccaacctcagagcagccgggtgacatgcccaaggcttgggctgtgggagggacagtcactggccactctgttttcccacccctccaggggcctgtgggctatcgctgcagggaagccaccccccagtcagagcctgggagcctgaggcagcttctcacagccaactctccaccaagggcccaactccctcccctccacttctctctgagttcgcggtggagtcacctgtggcccatgtgtgatgtgagagcttgcttgcacaccccttccttgggctcttggtcaggccctgcctctgtgtgactatgggcaagccgtggttcctctctgcccctccttccactcatccatcaagaggagtgattgtacctgcccacctacctcaaagggctggctggaaactcgcaggagattttagtgatggaaatgataggggagtttcccctcccagctggggcatgcctgtgttaccatcccctcctgagatagaggtcgtctctgtcctctgtgagcatgtggctgtcctcccttgtgtatacaggccatgccacctaccacctgggcatgcacacatgcacgtccttgtggaagccaccagcgtgcagcagatatcccctctgggccacaggggcgatggggtgaaaacctacgggagggagagggaaacagggtccatccccacccacaaaggttcctggcaccctgcctgagaattgggggaggggtaagaagtgatcccaaggctggaggtcaggccccatcttgagggttgcccaaggagtaagacctcccttcctcccctccctgtgttggcttaggaggcctgcgttctgcagacccctagggttatccccttgtagacctcagctgatgacagtgccttggcggtgggctgcttggaggcactaacagagcactttgcgccctgtgccagaggcatttagagttggcctgtgaataactgagtgtgcttaaattttttaagagggatggactgactggtgggcagcctgagactgtactttttagaggttgcgcaaaaggcagcctgagaaggtttttgccacctccacccttctgccgcccccctcagttttcccatctctcaggtggggctagtggtacattactgcatcagatgctctgccgagtgagttactccttagcacaatgagatcccacctccacttttcagtgggcagcccccacgggggaccagagcagcccttctccctactgtcccagttaaccatcacctcctgcctgtcgccctaacttttctggaacaagcagggcccttgttttcaggctgggcctgattgtaaaagagtgcactggggagagatagagatggcaccagggtagcatgggccctaatttgatgcgacgttgtcatgggaagttttcataccaagggcagtgaattagtgtagtgtctccctgtgcccaatgactaaggggaagttaatttcatgctctgcctttttgacattcataatcagaacgttgtattgcagctgcagattgttagcaggtgaaggatgtgtgagcctcaacaattactgtttctggcttgggaggagattgattaatagattgttcccagccccaccccctctgcttcttactcccgtttgtgctttctttccctctttccaacttcaccacatttcgtcaggaaactaagtggctatgactaaatccctactcttgtactagaaacccagggcagaggaggacctgtatgaggaggaattgcctaggacacctgataaaatgcagattcttggactccaccccagaccttctgaattataccctctgggtggggtggtcttgcttccccaaagtttgctccttttgcagaggggcaggcattgtgccccagctgtgtgctagtgacttgcctaagcacttcctgtgctgtattcttactgatttctcatagcaagagggctttttgtttcccatttcacaggtgtagaaactgaaacccgatgtgtgagtggcccaaagtcacacactggaggaaacccagtaaccaggcaagtccattccctggttgatgtcaagatcccaccagtagcatgtcatgtcctttctcattaaggctgtgatgccttttgaaataaaccctctccctcctcagagaagtagcagtagcccccttctgtgcttgcactaggctcccattgtgaaaagctcctgcacaccagtgccctgggtctcctgagggtgcttggaacagtcagggcattcatgactgatctgcattttgcagctgtggtgggtgacgctcagagaggtgaaggggcagaggcaaggggagctggaacttgtctcctaactccaggtccagtgctcagcccacctgtgccaccaaggcctgctcttctcactgacttcctggttgcaggtggggaaactgaggttcagggaagtgtacccatttacttaggattgagcgagcagcagtaatgcaattcaaggtccgccaagtcaaattccacaggacaggactagtcagcattttaggagtggatcttgtacccttggctcccgcctgagaatggaagtcttccagaccccttggaaggtctcggctcagggaagagaatgactgtctttggagagactaggccaggtggggtgggctgcactcccaactaaggaggccaggcacctgctagggtagtgggaggtgatgggggatctgcgcctgtgaggtgggcagctggaatctgaacctagggctgccttactctaaaaccccgtcccccacaccgccagttgccatggaggttaatagcaggcgttcctgagtcagtctcccagagctggtccaaggcccagctccaccaactgcttccctctgagcttgagattctctatttcagtaaagcaaaaacaaaaacagaaactagtgtctcggggcccaggattcctggcacagggctggcccagtctttcctgggctttggtttactgcattcaggtcatgaagcccctggagctgctggagaatggagccatcgtagcggggcgggggacggagatgcctttcatcctgctctgttcatggcaagctgcttctgatgctgtgatagccccacccactgccccacccactgcccgtgagtggccactcaggatgggccaggctctgtgcctggtgctttctcgtgcatttgctcagctcattcttactatagccctttgaaggatacgtgctattactgtccccattttacagagaagaaaattgagtcacagagagactgagcagcttgttgaagtcctacagctcataagtggcagagctgggtttcaaacccaggcggttggctttattatgtaaggccccctgtcaagcaccgttctacatagcctgtgctcatgtgctctgtttcacattacatgttctgtcagtgatcacactgataaaccacctggtcacttaagaagcacccgtgtggcaggcattatgcatggtatgtgcatcatctctgattttcttgactaccctcattttatccttcccccattttacaggtgaggaaactggccttagagtataaaatcacatagccaggattagcctcaggttacctttagaatctagatctctttgtatccacagccagggccctctctagtatattagctgacatggctgggcacatcctatgcgccaggccctgctctctacacttcactgagctgaactcacttcaccctcacagcagcccgtgagatatatactgttgcagtccctggttcacagccaaggaagcgtgagttgcatggccagaaatggcagagctgggattaaacccaagccgtctggctcccacatcagtgtttttaaccaccccacagtactgccctctccctatcttacaggtgaggaatttgaggttccaagaggtaaaagtcacttgccctgagtcggacagcaggtgagtggcatagacaggatttgcatccaggtctttctagaatgtttttctgtctcccaggtgagagaatgtggctgctgccaggcggtttggaagtatgtcccaagggcacccggggctctgctgggggctgctgtgggtgcccaagtcctgaggtggtaggggtggcagtggaggcaggccttaagaaagagtcatcaggatgtgagggcaggctcggctcagtgactgcccctcctatttgcaacttatcacttattctcaagcgtctttttctgtggctcccccagggttctgggctcccacacctcttttcacctgggcagagctgatgagctgtggctgcgtttggatctgttgacttataatgctgggtgaggtggggcaggtacaagaaggggtcgtggctaggctaagtggccttccatagcacttcccttcctccaaggtcagaagaacatagaggtgacttccatcactacccaggagggtgaaggcaaacagggtgatgatgatggtggccagggactcccccaccagcctctgctcaggatctgtgggaagatgggtgaagctggcgctgaaatccccagccaccccaggcagtactacagcagactcaccaagggagttgcctattgtgctgcaggccacactgccctggtgtcaccaccttctgtggactggatgtgacgtagggaagtggtagtgccagggccagatgttctgcccggagcccatccagcctgcctgaggtggtcttgctcagttgccctaggatcataaagtccacgaatttgatggttgtttatgaggatagtgaaaacctattccagagagtttcagaattaaggaaaaatggagctggcagagaacttagtcttagagtctgtacaagccaggggtgcacttgaaaggccttgttgtctttcgtacctctgctgcttattgttcagagcacccataggagtgttttcccgaactgggttccatggaacacattcttaaagatgttaatgggcgtttgcgatgagagaattccatagtccaaacaggactggggagcagtctgtccagagtttctcaaactcagtgtcagaggttcttggaggtgagacttgatgttttactccagtggggtgattgtgtgctcaaatacattttacatcctcaaattttgcttcctcattcttgggaaatcatttgtgacccaggagatgaaaggccctgagaggtcctgcaatgaagaagtcagttttgctttgtttaatccagggtttcctgtcccccaaccccaggagcagctgttaacatctgtggagcagttgtattttgcagaacattatttggtaaacattcttttgaggtgttatgtctcctcagaagcatgttttggaggaaactctggaagtgttccctgcccttagtacctgcaggagtaagccttgaatgatggcattgctggctcagcaacaggtagtgggtcatatgtatttgaaaaaagtcatcctaggtcctcaatatcattcctcaaagcagctaccagctctcctgtgtgtgggatggggcctggctctggtcagagagccctctgtggggaggtggtttgtctgggaccagcctaggcctagggtgtaggggtttattcccctttttgcaggctgggtggcgtccatgtacctggcagcttgggctctgggcctccccatccccctctagactccctctgcagaaggcagtggtcaggcagaggctgcccacagatttgcataattgcaccgtctcctgaataattaataaagctctgtccttgctgggagcaaagtctgcaccgttatggatgggtttgccatggataggtttgccggagctcttccaggggagccgatggttcctggactcctctgcttttcctggcatggagcccccagagagaggagagggcactgggttgggggctggctctggtgtgtccacatggctcccatagcatgataaagggcaggtgaggggtagtgtgtgctttcttccaggatccacacatgggttttctagcacacagatggtttaggattcttattcttcttgctttctgtggtcccactaaccctttttctctgaagtgtgatcagctgttgtggggcttagccctcttttctggcagcccaaagggagcaatgcttatgcagcaggtaagagcaatgagggccagttttcagacaagtaggggagggggaggtgtttctgcttggggcccttcttcaatccctcccagtttctgggcttgttaaagttggaggtagcctgggagtgattcctatttgagatttctaaatcccttttgatggtgtttcattgacgtgaattttccctctgacgcatggccttgtctccctttcatgctagaaaggagagtaaggggtgggcctgcccccaacatgtggttgacattggggaaagtcctagagtctcgccacgccatgagtactcttgaaaggccttgctccaaaccttctgtaggagtatttcttaaatgggttctactgaacatattcttacagatgttaatgggtacttgggatgagggaattccacagtccaaacaggtccagtgaaccaagtcagtcagtttctttaatgcatggctccttagaggctttaatgtgccagcgtgtgtctgagcccctgggagggcgtacaggatgctctgcttcccatccacaccggcactccagagtgttggcacatctccagcaatggggagctctttccacctggagcggcccctgcccttggaggacagtgccaactcttgtaaacttccccctttgtggagcttccccaggcagcatttatgtggcaccttgtcattccccacatggccctcacaccagctaggaaggtggcagggcagggattattccattttatagataaggtaactgaggcccagagcgggtaattgtctcacccaggggcacatagagttgatatttaaacccacgtctgccagctgggccttcagctctttcctcttggccaccaagaaaccatttgctccctggatagatgtcagtatgttggctggggtggggccttaggacctgttgctctgacagtgcccttcccagcttgcttggagtgtctagagggtggaggcaggagtgagtgaaagccttccttcagggtttccaagctgtggggcctggctttggagccatttgtagacaggggcctaaaaccgccagatgcctgcttatcacaccattcccgactctcacccttttccttctcctgccctcttgttgtagggtgggaatgtttgaggtgccccagaaactgggtatgcactcaactttggccagtagtggtggtgcaggggtgaaggagcagggcagggggttccagctggcttgtctttctccaggccttcctgagagttactggacaagcttggtggatggccaggggagcctggggtgaatttgttcacagcagctgggcttagaggctgcaccggggctgagatgtgacttcaggactcaggccaactgttttatatctcaaaaatcttgggttataccatacaccatgaaaggtactgcattgccacacctgacacttccattctggtcccaaagcaagccacacgggggctctctgatgaacagaatcctgctctgctgacacatggacccagatccagatccgacgccctgacttcctccatgatctgggacaagtcacctaatctctgaacctctgtctcctcatttttaaatgggcaccatgattgtggtgcctacctcccagggttttgaggtctacatgggatcatgttacatggtaatttgatcatattctgtcatcacacacatgtactcacattctcacacaccatgcttttgcttttttgtttgagatcccacaacctgccagcacatccaacccagtcttcccagggtccacctcatcatatatatagcaagagatggcccaagacacatgaagtgatgtttgtgctgacatttctcccacttagaaaatcaatattctgtggtctgcctaattgctctgttgctgctaaatgagtcattatggagggaaaatagcaaatgcattgtgagattaatgggagaaaatggttggcaaatgactttggtttgcttcggaaactctgagaaggtgttactacgtgaaatctgcagagccatgcaaggccgagtcctgagcagcagggagacaggcaggcagctattggcgctgtgagcctcccttttagggcggggcaccgattcaaatattatagaggctggactcaggagttactgagtgatgaagtcaggagccaacaatgggacaggtgctctgacaacctggtctcaaagaagaggatactcttcagttagagccagttacatgccaggcatggtgctaagctgagggatgtaatggtgagcaaaaccagccccagctcctcccctagtggaggacacaggctgaagtgcaattgtcctacaggtgactgtgtaattgcaattaaggcatgtgtcctgaaggcagtgagagcccagatctgaagggtttcatctggtgggggtggtggggagggcctccccgatgacaaaaggagtaagctgagctctcagggaagaaccttctgggcagtgggagaactcgtgcagtcctgttgggtcttataggaggggctgccacgggacttgtatggccttaaccctccagccatcctaagaagtggatatttctcgtttcacaagcgaggaaaccaggactgaaggtggttaagagacttgccagaggtcatagaacccttaaatggcagagtccagatttgaacatggggaacccatgccaaggggcatgccccgttgctccagggagctggccttggcacttgctgccctgagggtgtctctttagctagggttaaggaccttgctcctgcagggcagggggcttcatggtggttgcctgagagtctttagagagagggttataggactctagaaagggggaaccctcaacagccacagccaggcctctttgctttcttgggtctttgcttccttttaatgacagcgtgacttgggtagttttctttttctttttctttctttcttttttttttttttgagacagagtctttctcggtagcccaggctggagtggagtgcagtggcaggatctcggctcactgcaagctccgcctcccaggttcacaccattcttctgcctcagcctcccgagtagctgggactacaggcacctaccaccacacccggctaatttttttgtatttttagtacagacagggtttcactgtgttagccaggatggtgtcgatctcctgacctcgtgatctgcctgcctcggcctcccaaagtgctgggattacaggcctgagccactgcacccggccatgacttgggtagttttctgatgatcaaaatgccaggtcaactagtgactcctctttcaaaaggctctgtaaataacacacttctctccccatgaaatgggttggtttattccctgcctctaatcccagctggactgtcatcaggtagggcctatcagttgtctgcagaggtgggtggaggtatggtcacctgaaggtgcttctaaggaaggtgcttgtgagttcttgtaaacttcccaaggtttcaggagtggcagcagcagataaggagagtccaggcatttcctgtgggcattatgaaggagcaccagaggcatcccactttgtcttggtgcctggttgtagctgagcatcatagtgccatgagaacctggtaaaaagattctggagccccaccctgggagggtcagggtcacaggtctaaggggggctctggaatctgtattcctgacaagccccaggtgattctgagacccactcaagtgttgagatccccagttagcagctctggattcttccgtctctgagagggtcacaggcctccaagggatggtggtagtggagtatacttttatcttcctgggctggatgtaacactgcctgctgccagctcaggaagccaggccacactgtgcccatagggccacatgtaaggcagagcctggtgctcagctgaaccccaggtgaggcaggaacttggcctgggatgctttgctactgctattgtccggaaactgagtttcatcccaaacttaggtctgactggctgtgccctgtcccttgcgaaatataaactgcagcccttcctggcgagaggctaagtgtttatgtgggctggttgcagagcccagctctttgtcctgctcaggttccatttccaaaataattctgcttagttcttcacataaacagcagggcccttagagactggccctgagagtatagaggggatccatccccgtcccagcaccccagtgtgctgccaggagacaccagtgggcatcctggggttggtacccagtgttctgctttctgctcttgctcctgcctccttggaggccaggagccacatgcctgaggcccaggaatgtgatggggaaacaagtttcccagattggccaaagaccaagatgggagccattgcaccaaggtaggcgtggtaattcagtgccacacgtttcccatggtcaaccctgcagtcactcttcccgctaagtcaaagtgtccactttgctgttgtcaggttatttggtgaatttctgtagcctctaatgatgagtagtgagtgggaactctgtctcctttgctcctagcatctaccaggaagactgtttcagcgaaggcaagtctcatacggagctgggccttgtgcacgcatgtgtcatagcaagcactcatgaagatgggccggggtctcttgtgagcctggggcagccccgggggaatcttgccctcagagaagcacttttcaccatagattcacccctaggtgatgctatgcagtcctcatggtaggaattaccaacttccacatcggctcaggggccaggatcttctaagtggtgggacttcgggtcaagcagaattctggactctgagtggcttcctaagagttggcctgctgcttagcctgaatctcagggcaggtacagacaggatggcggtgcccacaagccctttttatccagctagctaaaagccactcattgtactagcagaagcacgtttctacacatgagaggaaacactgcatccttttcggtgcagttttacagaaaactatttaacgcgcttgctgtagctacccctggcatgtggatcctgagaatccgcccctgggcagattcactcgggtcacacacttgtttatcacacggtgtgtaattgaccttagtatgtgtgcatatggacagcataccacgtagcagtgccctgggcattctgacctgcccctcctggcgtgtttactcctctctacccatagttctggctgccgtgcctcaccctgccatgtggcaaccacatgccgggcactgagaggaggcccgggtgagagtctggtcagggtcctgccttcctgggagcattctcctttgagcaccacctccctcttctttctctcttcccctccccctccagtcctggacttcctgctgttcctggtccagggggagggcaggtaccacacagtgatgggtgtcctgcaagctgagcctgggttgttgaaactcctggcccagaagcctctagcccccagccaaggtccctgtttgggccgcgttatgacagtcttgtttccggcatgtcaggtgtgaccatgccttctgtctcgatggctttccttgctggtggtctccctgtggggctgctgtccttatgtgtcgaggtttcagaatggccaggctcttggtggggaggccctggatggacatgctggtggcccaggagagagcgacccatcctcagtccctctgcctgtgaaggcagactctcctgcctgccctggcaacagctctgcgccagcctgtctgtgtggctgccggcagccgcggctcctgactggctgccttctcccagctccctcacgccctccaaggctcactcactcactcactggctgctcgcagcagctcaggcagcgttcaggcagatggtgcaagggaggcgtgggcgggggtcctcggactctgcttgcacacccccatgtgtgggtgaggtcacgcccaagggatgtcatcaacatacgctgggatgggcttggtgccattcaagatctatctgcagggacaacaaaacccgacttcgaggtcttaacaagtccctcgggagtctccagactcgagtccttacactgcatcacccactcccctgagccaccaggccctggtctcctctcttgacccacaggacactgcaggcaaatgctgggttgaaattccagctctgccgcttgtcagctgtgactttagagaacttagctaactctgcaaaatgggggatagtatcagttcatggcattgtcaagaggaatgaatgggatttgcagctaaatgcttagcagcacctggcgaagagcaagcgcaggagatgagttaaccgggattgtgtcatggagttccccggctcgtgttgtgtcctctctctggaatgctgccttctctttcccctgtgattcctactttgatcatacctgtctttcagatcctagctccttctgcttaaagctggctctgctccccctcccccagtcctaggcggacttcaaggccttcactttgctcctcattttttgtgcctgatttctgtgcttcacttttgggtccactccacctggtagcaagggggtgcttcatgagggcactggatgggatctcttgacatatacatgtcctgccctcactggtagaacaaagcaagaatctagctccttcatagctcctcagaacctccgggcaaacctggctatggtccccttactccctgcaaagtggagcacatgaccaagcccattcgcaaggccttaggatgagaagtcatagtgatccctttacagatgggcagctgaggccaggaatgaggaggggatgtacccaaggacacgtaagaagttggagaccctggcctgctgcttctgtgcctctctgctgggggttggggaaggagtcgggccatctctcaaggaatccgggaggacttcacagaagaagtgacaggagttaaggcttgaaagaggatgggttcatcacataaccaaggcagggaagggcatttaggcagagggaaccccatgagcctagtgctcagaggatgaaaaccttactctcttcctgggacagtcattgagactgcagtgagaggtgggaaagggcctggagcatcgggagagtgagaaatcattgggaagggcaggagccagcattaaggagaggcagagatagagaaggtgagctggttagaggcttggcccagacccgtgtatgtgccagattagactgggggagggagggcccaaggataagcatccctttgtgccaggtgcttcatctcttagtgcttacagtgacctgagaggtgtgcttgttttagagatggggaaaccagatgcagagaggtttggtggcttgaccaaggtctcatgggctagtaagaggcagagccaaaatgtgaaccaccagcaacatgactctcaagtcctctggtggccaccacctgtttgggatggggtggcagctcctctcagggcaggggccctgtagtctactccccaagcaggtgtgggggccactaagagagtgtatggcccacaaggttcattgttaggtcctaggcatgtgtccaggtgcacatagacaccttcagtgaaccagattgttcaccaagcctggcaactctcttcaactaggccctattggaaaatgggtaggatgccaggcagcctacagctgggcagctccaactctggcctctgttgcccagcagccaaaaggtggggctcttgtaagacctgagcccctcaccccgtgtctgggtcctgtagcatttcggtccttacttccttgcagttctcagggtgtggcagttgtctgtgtgcctcattgagtggcagatctcctgtggaccgggcccaggcctcctctctgggcctctggcacctagcatacagcctggcccagcacaggtgcccagtaaatgtttgtaccatgaacgatacattgagcacctactgcgtgccgggtgctgtgccaggccctggaataattaacttcggcatggcactttatgattcacagagctcctcccagtccccttaggagtctgattgtctcagatcaggtatttatttccctgttttccaaacaaggaaactgaagcttaggaagaggagggctgtagcctcaggtcacatctgtcagccagggaggggcagaaccagccccagccactgcccactccctgctccctgggcagtgagcacaccctggaggctgacagctgtttctttccaacccctgcaagcaagagatagagcaccctggctggcagggaagccaggccaacagagaatccgtatcccaggaagcagggctcctgggggctgcagtaggcacctggctcatcctcagggctccacccagcaggagcaggggcctcctcttccactaccaaggacctggttgctggggacaattgtctgtgtctggggtaagtcagaggcaggagaacaaagagaacccttcctgccaatgccactctgaccttgaaaaccctgtggggtttcatttactcgaaagaaaaagggaagagttggttaccagcttcaaagaggggcagacctcctgcaggcgagcattgaggaaaccttggctttgtgagttattgctgccaaatttctccttttcagtttaacagaagtcctggggatcactgtccatgggctggggaggaatccggccaccttttttagaaggcaggaaggtgccaggatcactgctcttactttggttgggctctaggtggcacagcttctgatgtaaagatcaaataacaatagggagatctggatgcagcctgaaggctcaccccagtgtcttgctgcaggtgtgcccagctgtgggaccaggaccccaggaaggaagggcattgttctgtccctgctgtgggagtctctcagggaagcagcatagcactcaggaaatcctgggcaccgtgaagggctgtgtatttattccttattccacaaacaataagcaagtccctgctgtgtgccaggcactgagtgggatcctgggagaaggattgatgtgttgtgggtcctgccatgtcctgcctgttgtgacagtccaccactgtagtggcatctgtgtccatctggagagtacatgttctgctaaggggggcagcagcccctgcaccatggcactgggcatttggtggcaggcctttggatttataagagaagccaaaaatctagaggtttttttgtgacattttaaaatttcacatctttaaatgttggcatttgattcaaaacttaaaaatgtcaacactgtgtgggctaaacaaaacatgaatgttgaccaaatacagctcatactctttagttaaagacctttatcttaaaggttggataaaacccagatgggcagagggcaataggcaaggtcttcctggggagggggcacctggacagaggggtggtggtgggaatctgcctgagcattttcagggcagctgggaactgggaagtgaggggcggaactgatggggccccgcccagtcatggaatccttgcatgccctggacgtgcagatgtgctgcaggcctgacccaggctgccctgagagcctccagctgtgtccatccctccagtcagcagcgtttacccaacaccgtcacataaatgaggctttggccaggcaggagctcaaggaagaagggtcatgagtatttaagagaaacctccaggacacacgatcctcatctccaggaaagctatggaatgggggctgtcgatctctccgttgtccatgcatgcatgtgacctcccctgccatttgcatttgctctcctgcagctccttcaggttctgggctgggccaggagggctttcgcaagaacacctaaaaacccttggaaaggggctcttcccttctcctcttcctgttcctcccctgcaggagtcctgcattgttcagagggtttgaacggctctggccaaagcctgtttgggtgtcttcctgttcggggcctgcagttatgactcctccctttttctcagtttctccccgtctgccactccccccatgatccatatttgagtttcttctaaatgatcacctgcagaaatggtccttcagattgtcccagagatttgcccaggaaactttcattgagcccctgctgtatgcagggccttgggccagagaggggactgaaacccagggctcccactgactggtagagtagacagccacacagacagccagtgggtttgaagaagaaactcaagtgtggatcatagggggagtgacagacagggggaagaaacagaaaaagggaagttatgactgcaggcctacctgggaggctgaggcaggagtatcctttgagcccaggagtttgagtctagcctgggcaatataatgagactatgtttcaaaacaagataagttaaaaaaattgcaagtatagagtaccaaattccaggcactataaagcaaaaagtaacaaaacttctatgccactcccaccatagaatctcttactccaccaaaagccacggtggactgttggtcggggactttttctgcagacttttttctgtggccaatgaaatgatcttatccacgtccctgtgcctggaacaggccacccagcatgctcctgcttccttggcctgcagaaggactgagggagcctagctgccatggcccagagccctctctcccagcacccacagcctttagtcccatagctatggtgctgggtggccctccatggacggagtctgtggctctggaaggaagagggcatggtcttttcccagcagtgccacacagactcaggccgtgggctgcctcagccagcagagagggaggcaacaagcaggctggctggctgaggacttcgagagcacacagggctcccccaagggatcctcgggattgagttatttctgtttttgctcacctgtgcctggccctggggacagagacaggaatcagctgcagtccctgcctccctggaggagctcccagtcaggtgggagaggtgcctgccacccctgatgaaactgtctctacctcaggttctccctgctgctcagaacaagggacagccaggaaccaggtccagggaggagtgtggtctgggctcaggggagccctggaggaagtggattgtaagctaagattgggaggaactctccccaccctggtttcacctgatgggtcttgcagcacctcctgctcagtaagcaaagaactggatgggaaagaactgacatctgtgcaatgcagacacttggagctgttgtttcatttagagtacagtgttttcccctagaggccctgtgtggatgaagacacagagctggttgaggattgggcccagggggtagggcggagaggagggtgcatggtgaagatttgtctacttaggctggtgagcccactcggggtggagcactggcttaaggcaccttggccctgcccactgctgctgggggaccttgatcaaggtacttcatcatcagtcaaatggggcagagagccctgcccacctcccagggcttctctgagagtctgcctgacagtctttctgccttgggagcagcagagcctgggcccatgttggggatgatgaggatgttgatggtaacgaggatagtgacagggacaacatgggggattgtttactgaggattccctcatgctggcgcttgaggtgacacaccctcactgtgtgctgtgtgccctgccgtcatggctccccactggaccctgcaccgagccctagacttgctcccctttcagtcagttctctgcccaggactcacttgttatgactcaggttccttcctgtggaccctgaatggggagcacctgactacctttccagttgcacttcccccacccctccccgttccctgccccacgagtgctccagcatacatctttgtccttgttccctcttcttctcttcctggaacattctttgttcagatacctgtgtggcttgctgccccacttcattcaagtgtgaatccaaccacccggtcaaacacagccccctcccatcctctagccaggacctggctctgcatttgtctctagctgttgagttcacctgatgttgttacatacttcgtgtacttttcccacactctagactgtacgccacatgcaagtagaacatttatgtcttgtaccctgatgtgtctctggcacctagaatcgggcctgacagaaagttggtgaatgaacaaacaaacatttaattgtaccccataatgtggacacattgctgtctacattttacagatggggaaactagactcaaagaagaggtggattgactagcccaatgtcatacagctgcagcgggacagaaccaggattttagcccagtgtctgtggcctctgagccctgtctcagccagtagacactcccacctccccagaatctaggatggacaggaatgggagggggcccaaaaaggtgggtaggattttaccctggggattgaggggtgaggccaaggagggggtgaaccatgagggtctgagagggccaggggcaggtcggggacttcagtgagggtcaggacagggaacccttgcaagacagtctctgaggagagcacccccggcaccagccactcccaaagaccagccgcctccaggcttcttgtgctggctttggttcctggcacgatttctgtttcccagaggagctcaggcctggcccggcttcccagggtggagaaacacatggtgagtgagtgtgtgtgcgcgcgtgtgtatgtgtgtgtgtgtccagccttgctgtttgcgttgtcgtcacgtcttcttaatcagcctatttctgggagcgatgacttcatctcctgtgattctcgacacagccattgtcaggcgtccatggaaagattgggcctggcagtgtccatattcccctaacgagccaggttgggagagccaattggcgggccctggtctgacctggctcgggggcttatggtcaggtctatctccaagagactccactgcccagggtcacccttagatttggcctctttgaccctggggtacccagtgcagcaaattccagccattgtttcctgtgtgcttcctctgtgtacgctctgctgtgggcagggggtaggggacagtcacgccaatctctgccctcaagggctcctgctgtctgacaatgcagatgagtcaacagacctcaccttagagggtctgtgcgtgaacagagaagggagtgaggactctaccagcgctcaaggaaggctccactgagttggtggttgggccacagggtgaaggtgaaggttcccttgagggagggaaagggcttttgggcatgccaggtagttgggtatcactgggcacggggcggctatgtgttgggcctggagagtgcaaggaatagaggggaaggtagcaggaaggcagcagggtatggacttgatcctgaaagtagctgggaaggattttaagaagagatgggacctagatagatcagcgattttagaagcaagtccttggctgtgtgtaagggtaggtgtggaaaggtgtgacactgggaaatatatacagtatttggtttcttggcacacgactcctgaaatccttagattctttaaagtgatgtctacttatttgctaatgagttgactgatggctggcagcccctaggtggcttcagaaaggggtcacagaaaagaccaaggcaggattagagggttagaactttcagcccaccccacagcccctggggcagggagagaggctgaaggttaagttagtcgccaatggctagtgctttaatcaatcatgcctatgaaatgaagcttttataaaaacccaaaaggacaaagcttggggagctttcagatagctgaatgcttggaggttcctggagggttcctagggagggcatggaagctccacgcccctgcccacatacctctccctatgcatcttttcattggtatccctttataataaactggcaaacagaagtaaatatttccctgagttctgtgagctgttgcagcaaattaatcaaacccaaagaggggtttatgggaaacccagttgatagccagtcggtgggaagcactggtaaaccaacacggggcttgcaattggcatctgaaggatggggggatagtcttggggactgagccctcaacctgtggatctgatgctatctccaggtagataatgtcaaaatggaacaaaattagaagacatctgggctggtgtctgctgcccaactaatcgcctgcttggtgtgtggggacaacccctcccgcccccaccacatctggtgttggaagtattctgctttgtgagagtataaaaggaaaggggagaaactgagttgggttttttctacagaaggtgtctgggacagggaggaagaagctggcgactgagggctcagccctgtattcccctttatcttcaaggggaagggtctctttccccaccctactccctcatactgtacttcaggaactggtgccaaggccagctgagctcagccaactgccaggagctcagttccccaccctggaatgctggtgggctggggatgggaggtggagaggagtagggatgtggggtggtctctcaaaaatattgtgctggacttactgcaggcttatgtatagctttgcctggaggcagggggacagttgaatgagtgccagcaggataaagcactctgaggggtgataccttgtgtcctgctcttggcctggacactcgttaccccctcacctccattccccatctggagatccctcaagccccaccttgaagcagagacactgatgtaacagttcaggctcctgagctgcactgcccgcggtgaagctgcttcccagcgttgtggcctctagcaggtgacttgctctgtagtgagttttagtttccctctctgtcaaatggggacaaaaagtgtaaccatttcctaagatacttgtgaggattaacatatgttttaagagggaggcttagcagagtgcctacacatagaggcgccagcgtgccttagcatggcagtgggggtgtggcaagggtgagggcaactgtcttcaccataattgccaaggctcccttaggattcaaaaagccagggatcagaggagtgaggaggtgtgatgggaaggcccaacaggagagcctgtttggcggagcaagaaagagactgggccctcctctccaccactctgtgacctcatctctctgagcctcaatttcttggcccaaagaaatggtgagaaaaggaatgttgggggcccccactgcaggggcaggtgaggagctaatgtatctgttaacacttgtgtatttccttttccctcaaagccgagaatcagctgcttgcctctctcttgggcaggcatccagcagggaaatgctttgaaggaagccttcccaagctgagggtagccaggctctcccacctccatctccttctcccacacagggctgtctgccttctcccttgtccctgagccaccacccatcatcctttgcatgccttcattgttccagctgctcagtgttgtctttttttgtaagaaaacagtccagttcagcaaacatttcataagcacctgttgtctgcctgggtcttttttgggctcagggcatacaggggatggttaaagtaccaacccagctattataggggagaatattatggaattgttttgaaagatctgaatgcaaaagcagcgatcccagggcaggaggccctgggttctaggcccttgttctcctttcttcccttgggaccttgggcaactcatggtacttctctgaatctcagtttcttcaactcaaaacccaggtcagtctgttgatgcccctggttctaagaggcatcctgtgatcagttttggagtaacaccctgtgggctcatcagttagagaggtctgtgggaactgcagtttcaggccatagtgagaacagcagaccccagagggaggagtctgatccaagtttgagtcccgttccactgcagcttttgctagttgcgtgaatttgggcccgttccttaactcaaagactgggttttctcagatgtaaggtaggcattgtgatatgcctgccaatagggaactcacgggtcttattaatgctactgagatcctgttctcagatacagggcctgctccatgccaagaatacatacccaaccctccagagctccttgtatcagagaggggcattagtgcccaacttaagaggagccagtgagggtggggaggcctgcagctggcccaggagctctagaatgactgcaggtgggctgggcaggggcttcttgatttcaacatgcactagtgtggaattctatctagctttatgaagaaaatgtttgctaatgttattaatagtgtaaatgagatttggggagggggggacagccaggggaaggggttatttaaacacacttcaaagaacacccttctccagtatttaagcagcatcatttgcatatgtaataattgtgctaattataggtggcctcatctgttaacgacaagtttgcctggttgagttacattattgtaatcacccaatcataattctctggcatgcttttcactaaagataacaacaacaatagtaataatgcctgtcattttttagtcttttgctctgtgccaggcttcctcccaggtacttgacagtcatcagctcatttaatcttcacaacacctctgtgtcccaaagattcttatctcctgtgtacagaggatgaaactgaagtgcagagaggttaggtaacctccctgggctcacacagccaagagccaagggggaaatgccagctcacaggctctttccactggctagcactacttctctggggacacttgacatgtgttctcaccctttatctctaagccttctctttctcatttgctcctctcagaaacccccattttaccgaagaggaagctgagaccctaggagagaatttggggctgggcaggaggtgagcccaggtccccttaactttatgacaaaaccagccccagcatacccacctgccttcctgcagtaagggatggagggcagcagctcctccatgttctcctctgaagtcttgaaggagtccagccttgaggaggagggtgctccttacctctgctatcaagcggggtaggcctggcctctccatcaaagaaattataagtaaacaggtgggaggactctagcacaccattaattgctttacataggttgtcattaaatcagagatagtatatggatggctggtggccagatgtagcccacaaacaggtctcatttggcccgatggggtggaaagtttttgttttgtttgtttgtttaaaatcattcaccaacactagaacatttaccttaaacattcacctgaaaatctaggtttctggcttctattttaagacagatgtggcttcagtgggcctatattcctatagggcaaataattggtttcttcagttcacctcagactccttttctccctggaaggctcctcccagcaaccttgggaggtgtgtgggtgtgtgtggggttatagtgttcccattctgcagataaggagcctggggcccagaggggaccagctgggccactccacaaagctgttggtaaggtcaggacttgaacctccatcctcatctccacgctttgtggttctcactccacctcgctgcctcccagccatgtccaacccccactggccgccaaggaaagaaagaaacttttcacaggcctaatgactcaaaaataagcaacagtaagcctgaagaactgttcctatctccctcctctccctttccacccttcccgaggccagaagggacatgggaaacctattcatttaaactcaattattttctcgaagacagaacagaactgaattgggtcaacggctatatttgctgtgctcagctgttttcctgcaacagcatcacccgccgggtctgttgctgggccctgcactgccaggctcaccaattatagctccatattggtagccattccttgggaagcttggctcaggaagagaggagtcagtgaatagaacctatcaccctctcctttttcgcccagcaggctgcaggggcagggtccctgggccagtgtgggtccaggctccgtaactgtgtggtcagcacctccagggacctaggcttcaggtattagacatttaatgtccaacacctatctgtaggggaggtgcatctgcagcagagtttctgcagatgaggaaactaaggcttagagaaatgaagtgcttgtgggagaagcagaccttagagtcaggcacagctggcactttctagctgtgtgactgggagcaaagaacctgactgccttgctcctctgatcccacctgtaaaggaggcataatttgacatacctcacagggctgggctgtcctgttgtagatgggttgcagtgtacatgccagcagcctgcccagggttaaccctcctggcaatgagaagtgtgcaccatgtgccaggcacagaagttggtgggggcacagaagttgttggggacacagatctctgaagaaggatatgcttggacatcgttctctccagatacctttcctgattccctgctcccaaactggaaatgctcctgcagtctctctaggtcccctgttggtccaggccctgccctggacacttttcaccacatcttctgggcctacagcctgttatatatatttttttgtttggtcctaatatttgtgtaccttcccctctctactaaactgccagtttcctgaggacagaccgggtgtcttgttcacctgtttggctcctggtgtcacttccttcccagctgggtggccttggactggttgtttaacccggtgcacctgttttcacatctgtaaaatgggaacagtgatctctctccctctggcacatgtcacggcaaggaggttaatatcacacatggcagcactgtgccagatggctgacggaatggagtctagagaaacattgggaggaaaccaaagcagaggctgcccctctgccctccttgaagtagggagtatctaaggaggcgaggcatagtggttataaatgctgtcttgttatagaattgctgtctggttacatggggaagtgggaacagagtggtggccagtgggcctttccttgtctcctccagcttcttgctgcagagtgctgggcttgccccaagaatggactgctctggcctcacggtcatctcagattgcccagtggggctggggctggggctggggctggggctggttgggacctacccacaaccactgacctccaggtgcccgggttacagtacctggcattagatctcttcttttggggtctgggtgtagagcaggatctccctgcactaccccacgatattattgctgatctcagggttggggagtgtttagggaggcttgagttccctgacctttcaggaagcatgcatgtgaacttaggcctcggacctcgtgtagacatggtgtggtgatggctgggccctactctggtggggtggacgcaggacttggggactaagcagcaagtgacctagccacagacacagaaatggctctggtgggagcccagagtggcactggactctctggggggccagggctgaggggactgcccaggttgatcccggcgtcttgtacaatagaaccagcagtcacaggctcataaactgtaaccgtcctctttccgttgcctcttggtagcattcagcccctggcacactatgctgggtgttgcctagtacttggcactgtgacaaccaagaaagaaaaatgctgaccatgtctcactgcttgttcgagtaaatttactctatattttttagagatgtcgcatgggtgggaatttactcccactaaatgttttgatggaaacattacatttttggagtgaacatgtgtcaacatcactgtggagaaaaggttccaggattctctgccagccaaagtcatcaccataagacactggttgggggcctggcaggcggaggtgatgcgaccaggctggtagtggggcagaggtagccagatgggtaggagtctgcctggctggtctggagggagaaggggatctgagctgggggaactgaataggtggtgaggaggaagggagtagggaggctgtgggctgatgacatacattaaccacccacacagctcaaaactaggtgagtggggagcttgaggggcaggaacagcgagcagaggctctgaagtgttgaacactggcagctcagacccgagggacaggctggggccagattgttgagggtcctagaatcccagctcccaccagtaactagcgatgtgagcttgggcaacttttccaacctttctgtgcttctgcttcatttttagtaaaatgtagcatggatagccacagcttatggctctttggagaattaaaggagataatgtctgtaaaatacctagcgctgggcctggcacatagcaggtgccaggacacatttgctgtttgttggtgatgataaagccacacaagtatagatgtactcacataaattaacagctggtgcactgaaactacttcctgagttggccctcaatctaataccaagtttgttttctcaccttcagctaagtacaactggtctcttcagaagcccttgtggtctcttgtaccttgtggtacaactgtggtctcttcagaagcccttattcatgaacagccaggccctgggctgactttgctacagggcatccgtctctggccctgtacctgtttctgtcctacagacggatcctggggcagttggtgggttttagcagcaccctcctttagaaaaagcctctgtcgtctgctcagtctctagaaagaagagatgtctcctctcccaggatgcatgcatctctccccacgggatgtacaggcgttgcctggaggtattccttgacagtcgtggcccagactctcttgtcattcaaagaaatgggaagctttttgaggtgggagggtttcagactcccccagagagcctagcccagttgctgaggacatcttcagatctgaaagaagataagacaggagcatcctgagctctggggagaagacggcctgcagtgtgtgtttctccatcactcacgtatggaatcccttaggccctgagaaccagagatgaacagaccccaaggaaggcctggcagggcaggcagcagtagccaggagaagggagtcagaccaggaattcaggcagagaaagggagagattgtgcactttcctgtgcccggggccactgggaaggcttccctcaggtgggggcagttgagctgggccttgaaaggtgaatgaaaattagaaatgggggcaggaggggagcctcgtggaagcaagtgtgtgactgtgagaaaggcggggcatgcactgggaagagtaaaaaaggaggcgggctttgtgactgttccctgtgataagctccaggtataaaggtgaggagtgtgcagggacaggtaggacctactgatgggcgaggcccaaggctctggacttgttctgtggccacaggagatgctgaaaccaggagtgactggatcagggcagcttctgaaattcccccagctacacgtggccaagaatggtcactgtgtactctgtacttttatgtgttactaaagatgttgctgggccgggcgcggtggctcacgcctgtaatcccagcactttgggaggccgaggcgggtggatcacgaggtcaggagatcgagaccatcctggctaacaaggtgaaaccccgtctctactaaaaatacaaaaaattagccgggcgcggtggcgggcgcctgtagtcccagctactcgggaggctgaggcaggagaatggcgtgaacccaggaagcggagcttgcagtgagccgagattgcgccattgcagtccgcagtccggcctgggcaacagagcgagactccgtctcaaaaaaaaaaaaaaaaaagatgttgctgaaaggagcctgcaagcggttatgcagacttctgagcaggggctaggaaggagggcacagaggaagcaacagcagacagctggtgagggtgggagacccactggagatggacatattctgaccctcagatgcaggctcatttcttgttagctcgtgactccttactatgagagctgtcatgcaaaggaaaaggccctgttatggggccctgttttcttataacaagatattataacagtggggatgactcaacaaggggatgcttcttgcctgagggaaatctaggaaggcttccaggaggaaggactattcagattgaggagggaaatgagggggctagtaaaaggtgcaaaaacagttgtctaggggtgaggcacactttcagatgtagttgggtcaacttgagcaaatgacttagctattccagacttgatttcatctataaagtggtcacagtatctgccttgcctgtttgttgccatgatcatgaaatcagtgggagcagacctggcttggagcctgcaccctggagggaggtggtgctcagaggatgcactctgctttcgccttccttgttggtttggctgctctggagccaaagggggcttctctggccccaggacctctctgagactctatcttcacctctcccctgctaggaaattttattaagacattggataaacagatgacagctctgagggaaaacttctcagaaggaaggggacaggacactaagtgctcttctggctgggagccttttaggcagtagggggagctgggtagctcttggggctttggtggtgtggactgatgcaaatgtgggcagacggggtggtgttggatcgcctggcctgtgtgcacggcagagctgagcctggagcctagggcccagcaggggatggaatgagtcagggactttccaggttgggggctgctgctggggacacagtaaaacctcttcaccagtcctgcaataaccccagacagtatcctgcctgcctgtacacagtaggtgcctgacacagtctgcagcttagtaggagctcagtagttgtttgctaaaacagtggcgcaggctgcaactgccaaggactgacctggggtctgtgatgccttagggtggaggatgcgaggagctgggcaggacctaggtgggactccagggtgtggctcttgttctcccactggcttctgttcatatttacatcgggaggctgtgcagcctcgggttcctggcctcagctggattagcacctcttgctggtggctgtaagggaaggaggtgtgacggtatgataccctgcatgtggtagagactcagtaagtggataccattgcggtggcttctctggtgggatgggaaaaagggtgaccccaggcaaaaatacctggttggctgggtgtgcctttcccctaggggtttttgtttccgtgtttaaatgacccaaggatgaatctccaggccagcaggtggggcaggggtttgtctgcccccaggcttctgggcgcaatcgggaacctgggcagctcacacagctcaccagcctgtctcctccttccctgcacccgacctttcccttctgtcctgccggactagccgggtgctttccagaagagaaaacccgggactgctgcctgggaacccagtgcccttctcagcttaggctgtctagacccaagtcggggtggggagtcgggttaggggatcatggtagacaaacccctggccttgtctggacctcagttgtgttcacttgttaaaatgttggaatggaaatgtggggaagggagagcgtttgccttggttgggtctctgggctgcgctggtctaagcccgacgaacccggggtggggccagcgggccaaactggaatgcgccgcgagagccgggccgcgggcaagtgaggggctggcggggccggtggggacccagactcgcacgaaggtggggaaggagttgcaaggcagagacccccgaacccctgctccagggcctgcgcgtcccgcccgcccggcgtgccgaagcgcagcggcgggtcgctagcgggaagtggctgcagctggaggcagctggccgcggaatgtcacccgctgccgggcctgggaagggctgggcctactgctgtggggtggggggcgggtgggagggcccggagggctggggctggggcgggccgcttccgggctggagagggtttggggcgtggcgcagcccgacgttagtccggaatgctctgggagcagcgctcgggggaggttaccttggcgcgcccccaaatcttttggttcccccgctcctgccttccactgctctggctgacctggctcagaccagcttgaaaaatgcattcattcattcagtacatctgtcgagtgtctactctgtgccaggctctggttcgaggtgtgctgggcttaccggggcgtgcaggtccctgttctcgtggaccggacattttcatgataggtaaaagacagaaacaaacaagatgacttcagggtagttctgtggagaaaatgaagcagggtgataacttgggaggtgggagttgcccctttagctagagagatcagggaaggcctcttcctgggacgggactttgggtctgagaccggaatgaggaggaaccagccttgcccacggaatggcaaatacaaaggcccagaggcggggcttggggcaggatatgaccttgggcggagtcagtatgttaggggaggagcctgtagggacggctcctccctctttcttgacccagacctctgtgctctggcctgcaccctgcccagaggccccagagggcgacttgccatggctggaagcgatagtttgctttcaggagtgtttctcgtcttcttggacctggaggttgtgccatgtggttacctgcatggaagacggtaattttccacttgtttcctgaaggacacggaaacctttagatgttgtcatcactgtgtttatttaagtcatttttgaaatttcagcttggaagacacagattcagcacgtgcctttcgggaaggggaagccctcctaggctcacctcttagatgccggcccggccgagaggccccctaatctgtccagaagagctgcctgggtgagcaccacccttgggaatgggcctctgtggccttggacttcttagtgacaacttcggcaagatcctgggccgggccggaggggctgctcactggagacctggccatcttcggaagccagatctggctccagagcctcgggggttgcaagtgcccagaaccaggtcagcagagaggcctgcgctcccaccacaaaggtctgtttgaagtcctgtgggagggaggacagacaccacaaggaaacttcctccccggtgggtgggtctccagccaggtatggggtcagacaggctttggtcgggctggagggtgaggagctgtttctccaatgaggcctggtcccaggactgagtcctcagtgggcagggcttgttggtgtgctgtgaaagtgcaaggcttgggggactgaatgggggactcccttggacatgggaggaagagtgaaggtgggggctggggttgctaaactggttcctcctccagggaagcaagccctgccctcctggagcttccaacctggaggtggggaggtgggctggggggaagctttagggcacagctcagagaaggccaagcaggcaaggttgtggggcacctggaaggtgggtgtccagcggcctggctgctgacctaggctcagggaaccagcatttggtgggtgagctgtgaggaacgggccttgaccctaggctgcagggctaatgagggcctttagccagaggctcccagcacaggtgagggggaaactgccggtgcccctgtgccctcgcgctctcccagccctgcctctctgagacagatttaataatccatgtctgtctctctctctctcagttagtattgcaggagggaagctttacttctaaaacttttattgatccagacactaataaaagtaaagggtttttttttcttctttcctgctagagcaaagaacatcagacatcagagccctaaaacacaaatgtgttttcctcctccctagatctgggagggagttgtgggttggccttgttcagatctagcctcttcaagaagcctccctaacttctcaggcctgcagtcatccacctgttccagagcagttaaacgaaactgccacatgtgcctctgtctgaccccagaaggctgggctgtcacagaagctttccttcccacctgaggtccccagggttagggagagacgccatgggaggcattcaagacctggctcttgatttcttgtgtctctcagggtttggggtttggttctttggctgctctggtctttgtttttgcatcttgatttcatcaggacttactgagctcttatactgtgtcagaccctctcttaagacacagaaatacaacacgtagagcttggccacacacagcttaccttgtgatgggagaggcagataagaaataagcagagaaacaaagtgattctgctttgggaaacatagtgaagttcccctactgaaatgtgagtcagggaatttctgtctgctttgttcagcacctgtgttcccagtgcctaaatagtgcttggcacatagtttgcacttaaatatttgctagctgcatgagcaagatgctatgaaggaaacaagccaagtgttccactagggagtaatgggggcagggcaggacctgttgtagatggagcagtcagggaaggattgagttgcagaagatgccagaagcctgccagtttgctgttagagtgtgctggagcaagaactcctagcctagggagcagcaagtacaaagtccttgagcaggaaacagagactttggtgtgtgtggtggggggcgttgggtgttgctggatgaggtcagagagtaggtaggtcatgactgccaatgtctttcacctgggtagcagttcagatttattcagtgcagtggggagtaattgaaggcttttaaggtgaggagttcagtaatctgatttgcatttctgaagggtccctctgactcccctggtaggggtaaggggaagcccagtggttggggaggctgcccggacagcaggctgcctggggaagatggagaggagtaaacaggtatgagggatttcagagggggtagcagcaggatttgtgttggattggattccaaaggccagggaaaggaagggctcctggctttgctactgaggctccacgctggacatttcagacgtgaagctccgagaggtgtcccagaggcgctgtcaggcaagcatggagacacatgggtccggagctcagaggaggatagggctggggatgcacttaggagtcgtgagcatgctggaggtatttagagctatgggagtggaaagaatcaccaaaggaaagtgttgtgctaaggaagtgtctccgaaacagccctgaggagctccagcactgggaggaaaggaggtgaggtgctagcagcctgtgagaacagaggaaagctggagcagggtggcctgggttcacggggtagtaaggcacagaaactggttgactttggcaacatgaaggcctttggtgtcctcaaggagacccagtggggtcggaacagacaggtgtgttgagtaggaaaaggaggtgagaaggtggcggggacagcagtgagcaaagaagtgcgtgaggacccagctggcccaggatgttgaggaggggagggccagggaggggcctgaatgttctctgtccacagcgtaggtttaccagcagcagctgacccagtggatctcagcctggagattctgattcaggagcgccgataggccccccacagtgatctttcccagctctctgagccctctccacccactctctggaaggcttgctcactgtgccctgtcacgtttttggactgaatgctgagtctgttgaccctgtgttccccccgtcagcccctttccttacaccagtctctctgggtccacggcccctaaataagagtatcctggagcctggcttacctcaagtgtctttcccagagcagagctagacttcctttacaccaagggtatttctctggaaggctcctttatgtgtttggcttctggagaagtttgagatgttttacacaatattttggtggccaggagctctaaccctcacccccaacaaccctgccccaagactttttgctggctctggggagggttcagaatgcatcggcttgagggtgcagggttggcatacacagctggagataacataatgtctgctagacgcctggtgggtttcagtgtctgttgaatgaatggcactcagatatttgagtttggggttcccagttgctttgttaaatgcttttcctggttaaccagtgtttttacatctgttatctgcaggggatagtgtattacctcattttatacatgaggaaactgagactcaggaaagtaaaaggatttgtccagggttccacagttgctaaatgacacgaccagaattggagcctgggcctgcaaaacccccaaattgggcctcttcttactgactaatcctgggggtgaggtagtaagggtggaggttaaggcacccaggtctcctactacctctcaagaatagtggccagatgttctgccagggctccaaggcattccttctgcctcccacccacctgtttcctctgatgctcgacaccccctcctctccccacatgcgcaccagatgcattcggctccaggaagataggatgaggcaagccttgaaccttgtcaaaccttggggatgcttgcggcaaagcctgtagcttttggggaggctgtttctgcaacaggcgtgtagggtggccctatggctgatgcagaactccccataggtaaggtgagctcagccggatcacatgccatgaccacacgtgagcatggaagacaaacccagagaggtctggaggcagggcccctcccggagaggcaaagccacttatgctgcctcctgacagcctgtgtggctttaggctctcgcttccctcctgctctgcccctcctactcacccagcagacttgcttagtctgggcttgggtagccgagacaggttgttttcaggcctcaaaggatttgggccacagcccagcctttctcagtgtttctcaccttctgtccttgtctccttatgggacggagcaggcatctggaaggtggcagaggggtgatcctgcctggaaatcactgagggtccttttatagaaagaaacaggctgagagaaagaaatgacttggccacagtcactacccaagaggctagtttcctgtttgtgcctccagctatcctggggcagcttccttcaccccagctgaaagcaggcttttgttacgcgctcactctcagcaaggctttgttctgtatcctctcggcaatcctatgaggtaaataatattatgtccatttttgaggaggaaacagagaggcctagggaggtgacttaacctgtccaagaccacacaggttacaagtggcagagtccgggtttgaacatagcctggcttcagagctcattttctttaccatcaggctacacattctgaaacttatttggcttccaggcatcacagaaacagagtgagggtgctaaatccttgaatgactcagcccctgtggagttggacctgaagacgcctcctggccttggcttttctgaccaaagatagccacactgggcagggcacggtggctcatgcctataatcccagcactttgggaggccaaggtgggtggatcacctgaggtcaggaatttgaaaccagcctgaccaacatggtgaaaccccgtctctactaaaaaaatacaaaattagccaggtgtggtggcccatgcctgtaatcctagctactcgggaggctgaggcaagacaatcacttgaacccgggaggcagaggttgtagtgagctgagattgcgccgttgcactccagcctgggcaacaagtgtgaaactccatctcaaaaaaagaagatagccacacagcacctactgtgggcccagccactccaggtgccagaatggcccacgcttctctgagggtgccgtagaccaggtgctgagacgcagacagtccagtctctcttcccttcctctccccatcccactcctattccagtaactaggcaggccctgcccacccttgccccaggagaagctccactcttgtggacagtggaagggcctcggccagcttgcctgagtcctgggcttggaaggacggttgcccccatctgccttggttccctgcacctgccttttcttccccgcatcctccctctgactgcccgcttttctctgctttcaccttcccctagtgttcctcttctttcgtgttgtgtcagaagccatgatttccagtcttctcatctggaagatgaaggaaaagatagacccgaccccacagggttctgaggctcaaactgaaagcctggtggtggggcacctgtgacaggtgagactcctcatcttgcccccttctttcttcatcatgaagaagagacactggaggatgtggagcagttggggcctgtggtccaggtgggatggagcagtcagggcctcgtggagggagcaggtgggaggaatactctggctgggatggacctcacggggtgtggcccagctttgcagctgacttgcatgaagtcctggcgagctggggagcccttgcaccctcagcttcctcatctgaaagatggggcaatggtaatgcctgtctgtggagtggtgaggaacaaatgagactgggccacaaagtacccagtgctgtgcccagcacatagtgcccaaagagggctgctatctcatctcttattcctgagatttagcttccttgttttgtttttgagctctttgggaccttcgtggactttgaatttttactattgttcattgtgtctaaaatcttcctcagaagccgagggcctctaacctgatcatgaattttggagtttcgttttttgttttttttttctttcctgtttcctgtataggaaaaagggacctgtacctttaagaccccagcaggcccaagtaggacactggccctttaaaagcacattacagagagttggaacatagcctttgttgaactagccatgattagtcccagcggacagggctggagtggcatgtctgggatcagggcggggctaggctggccggggccagccaggagcagcggacagcaggaaggctcgcccggccactcggcttcccgagcctggtggctatgctgagggatggtgagtggcctgagcggagcttagaataagagaggctgggaaagccaggagggaggcagccccagagcccagggagacctgaatgagctgggcggcagcagacaccctcagtgagtgactgtcacaggagctggtcccaggagggactccggagcaccctgcccctctacgcagacatccactgccggcccagaatgtagaaacggttaggagggacctgtgaaaaagcgggacaccaagaagagcactgttgctgtttttagtttttaaaataagaggaagcccagtgtgagttgctctgtcccccaggcgcggtgtcccctgtggtgtgctccgttgagaactgggaaatgccagggactgctgacaagttttctgagctgaggagcttggcctttgctctgagtggccgaacctttggctggctgggtggggctgcactggggtttgggggccatggtatctctgccccagctcctcagcagaactttgttttttcttctcccttcctgcttccactccctagtccatggggcccaggcccactgggtggggtggaggcgggtgggagactgggaagactgtgtctgggccaggagcgtgttttggctctgcttgaatatttgaaacagttgtcagaagccagatcactttggtgtggtagcgtctttactgggcaagtacccatttctgaaaaaaagtcagaggaaggattgggcttgttacagccaagtctcagtgcaggttggtcctaaccgccttcattgccacggctgggggcggatgagactgcctgccagtaggtgtcctcactgttttacagacagccacccaggaggtgacaaaggcagggctcagtacatttctggtgacccaggcttcctgtagttacttaaaagttggtgcatttggtcataggatttttgtaggtttggtgaaaacctgaggcattgacgggcagtgaagagagtttgaagttagagccgaagtgccaggtgtcctgttccacccttgtgcctgtgaatcgtgacctcaggcaagctgtttgacctctctgagcctctgcttcagagcagagggcgtgtgcataggcgcaaaccctggagggagttgtcagttctgggggaggctttgtggaggtggtggcctttgagccaggcgtagacggataggctgctggagtgcaaccccttgagcagaggcgtgcagtttagcatgatgagccagatagggccaagcagggctggcatggctgggttgggacctggaaacgtagcttgggaagctggattttaagtatgttgctttctcagttggaatcctgtgggccaggtggcagatgacagggctagcttagcctggagtcagccagtgtggaatgtgggggaaaagggcagacggtgaagtctgacacactggccttgggaagcccctggaggtgtcagagcctcattctttgctgcagttagctgtgtgagggtcagaggtgcagagacagccctacgtgcccttcccaggtatgtgggctcactgtggtgtggtgggtgagcaggtacttgagagccacaggtggctttggtgcatggtcactggcagcaggaggaactcagcagccacactcctggttttctttgacatggtgtctgagtttctgcccgtgccagtggcctggaaccctgtggcttactgagagccactttcctgctgtcttgctgctgctgaacactcctggttgtctcctgctagttacagcctgagaagcagctgctctggtgccccacgcagacttccagacctcaggctttgggaggaatgggcagctgacatccctaggcccatagccccacatgctcctgcagacatagtggaggcgctcagtggctgtgctggtggctggatcaactctgcccaggattggggcggggcgggggtggggggtggggtgccttagcatgatacatcttcagcaaattgtgccaggaggcaagggcaacccacttgacggggtaggatgctgaggtgcaggagaggcccatccgaggtccacactcctttggcccagtgctccttcccttcacatcttcacctcttctgtctctctgagctcaagctgccaacaaggagggagcctctgtcccaaatggtggctggaattgaagagatagctgagctggagtgaccactggggctggagtctagggtgccagcatttgttcgtagatttgtccatctcttcttaaatgggggtctttcagattcctgcttaaaacggcctgtactctggagcctgctcttgaggtaagggggtagagcaggtgaggtggtctggggtcagttggcagaggggctttttgagagctcagctgtggggggagagtcaggaaggatctgctgggcagagtgagagacagatcttggaaatgtcctgggcccaggaagaagccaggagcatccagagaagtgctggcaggaagggcgtgcgggaagggacagaatgccccgggaaggcagtctcagcccagcctggatggtaatgggggcagccagggctggttactgaggctgtgtatggagagctcgctgcaggtcagttgagccctacagccaaaggtggtggtgtccctgttttccagatgagaaaactgaggcacacaggttaattaatttgaccaaagtcacagagttttgtgtgtgtgtttttaaggaaccatgcctgcttaccaccttcaaccagcatagtgccaggagctggggctctgcggacaaatggctggtccttggttgaggcaggaaacctggccctcaaggatgagggaaggaggccatccctagatcaccccaacatgaatggcccacctggtcccaggaagtaacgtggcatggcgcccaggtcttgggtggaggagatgagatggaagaagatgctgcctctgcccccgcattctagggggggcccagcatgagctaaggagggcttcctggatgtggagagctgggaggaattagataagccagaggggaagcacttcctggagaatggaaatactcgcttttcagctaatttattcttttgtttcattatcatttcccacttgggtctcgcatccccagggccctgaggtggctgttggaggtatttatggtcccgggtggggtgcagggaccagttagaaaccagtcccactcaggccatgatgcatgggtgtgttcacatgtgaggaggagccaggcacagactgagctcaaggagagggaacgcatgggtcagggccttgaaacattctcaggagtggtgctgagtggagagatgggggagggcagtgggctagcatgtttgtggtgggctctagagcttgggagcttcagagttgctgcagttgtggctggggttggagccccaggtgctgtgcagggaggttgggctcttttcctggggctgggggtagggggactgtcactctccctaaactttctgagcagccaggctaagcctgatagtttttcctacaggccagggagggctgcagggttgtccctgctcagaagcaagaggggcaggggcagctagcccacagctcacttctgatttgcccaccactcaccctcgtcaatgagtgttccttagatgctttttttttttttttttcccctgagacagagtctcgctctgtcgcccaggctggagtgcagtggcactatcttggctcactgcaagctccacctctcaggttcacaccattctcctgcctcagcctcccgagtagctgggactacaggcgcccgccatcacgcccagctaattttttgtatttttggtagagatggggtttcaccgtgttagccaggatggtctcgatctcctgacctcatgatccacctgcctcggcctcccaaagtgctgggattacaggcgtgagccaccgcgcccggcctagatgctcttcttttaaaattcagggcacttcgctgttctgctgaggtttatgaatgtttaaaaactgctttgcggtccccaaagtaatttgacaagtctgacagctattgattaaaaacccgaaattattcaggctgcaggatgacttgggggattagatggaaagttttttgtttcttctctctctctctgcacccctcctcccccgcaaaaaaaaaaaaaagaaagaaagaaataagatgtggaaaggtaaatgtgttcctgaatgttttttgaaaactccattaggcttgcacagtttatacggggagaggatgttgaaggctgcctctcattcaggagccagtaccagcgccctctcgaatccctggtctctccggagctttggcccaagtcaccccaggcagcagtgagatgttgctattacattattacaggtgatggtagtggtgttggtagcagttatgatagtttatggtcccttatgttctagggagttgacgtagggtttttgtggctttctctgaagtagctcagcgtgtgaggaaatggcacctagaagggggaggaaactcgttcagggtctgtgatagaccttagatacagctgggatagagaccaaagactccttcagggagaggaacgggccgttgctggggtgctgggctgattggatgcctggcctccaggcctgactcactgtgaggtaggtgccaagagtgtcccacagagggtgaccaggccgttagaaccccagctttcacttctggaccatgtgacctagccaagccactccctgtctctaagcctcagtttcctctttagagaacgtcctaaagcttccattgagccttttggattaactggctcatgtattgccccatgagccagggcttgtgggacctgagcttgaatacccactctccctttcttctggggcagtgctgccttttgtgcagagttgttgggagaaggccatgagatgatgtttgtactttggtgagaacacctgcaactggcacatggtaggtgcttagtaagtggctgttaggtccaggctgccacagtgtcattcatttagtcagcctatattgggcaccacgggacaccaggcctcacagcaagcatgagctgtcccatcctcctgttttggttgcagggtgtggaccctcctctgccagctcagccctgtgatgtggggggaagcacaggctcccaggggtgagggcagaaggccacgtgtctccctgtctcacagcccagggcgttctgtgtgtatgggggcgtcacaactgggtcttggtgactgctaggacctaccccttaccttggcctgagggaaccctgggttgagagggaccacgcctctgggccctgtcatccctggaagacttcccaggcagggcagccaacctttctgcctttttaggacaggctctgtctccccagggccctgggagccaccaggcggctgcattcctctcctctcccctgggatcccagctgggccaggagtgagcactggccttctgagcagccggttcccaggccagcggggcaaggctgggcttggggagagagctctgctggacatactaggcagggcgctgccctgtttatgtcctgccgtttgattcccagcaggtcagtgcattcattgtgaccatgtccagactctctttttttccagtgtgggcagacgcttctagcacagcctctggacctgcctggctatgacaggcagaagcatgattggcatgttctgacctgatgaggcctagagagtctgctgaagtcctgactgcagaaccatcaggtcctgccagcctttgggtgggcaccaactctgtggagacaaaccttgtccaggatttctcttccttccagacctggttggggtagtggacagtggcttgggaccacacaggctggtgggctggagactggggctggagatggctgtgcttgggagtcccaggcagaggggctaaaggggcctcctcacgggggtctactgcccactgctaggcacaccttcttctcctttcatttcgcctcaggaaatgaagggctttttaaagaaatttgaggcatcccagagcatttgggcagatatgattgatccccattttgcagatggggaaaactgaggcatggagaacgtaaagcgtttgagtcgtcacgggacaggaacaggaaacagcctgggaagtccatatcttgtcactccaaattgtcaaaagtgtgacctatcccagaaatgtcagccttgatagcagcgtgtgcatcgttcaccagtgttgttcatagctgtgtctccagctcctgacatcgtggctggcaatgaggtgggcgaatggaacagaccaaagaggcatgaacagttatgagcaatggatgggagtcactgacacccctgccctcctgagcctcccgcctgcatggtctcatttgatccttagagcaacccatgaggaaggtgtgtcgttatcctcactacggatggggaaactgagtcctagagagtcgaatgacttaaagtatccaaggttgtatatttcataaggaatagagactcggtttgctctgcagccaggcacccttgacactaggccctctgtcctcctgcccgctcgcagctgcaggtgcatttctgtagcattcacttgtgtgcgcgcgcgcgtgtgtgtgtgtgtttaatcccagggcccactgcactgcctgcctttgtgtactgcccagcccattaccctggcagccctagccatgcagcatgtcttaaaggggccccccggctcctgcttgcacactttcagagacagggagcccactctctctaaaaccagacgagcctggcccattcaaggacagctgtgactgagctggaagtggcctctcctggtcccagccttgccctttggggccacacagggcagctccctctgagctttcgagatttggagggtgaccctgagccccttattttccgaccaaacaatcccactctcaattccccccacccaatagttgggaacacccttgctgtgtcaagtagggatttttaattactgtaagtttcggtttggggtcctttccctccttggaataatgagtttgctgagcttttgtgtcaccgaccttttaagagaaaaaaggatcagagttgaaaaacagcttgtgggttggctggaacgctatcagataaggctaggccccaggagccaggacagtgtccccattgttctgccaccagccctcacaatgagctgctgttgggccctggcgctgtctctcatagcagctccccgtgccttgtgcccacgtttcctgggccctgggcaggggctgccccatccctgtatcccccggtccttccttccccacctggagtgagtgggtcacagctagtgggttagctggctgtggacctttccctgctgcccggctgctgtggacctttccccctgcccggctgctgtggacctttccctgctgcccggctgctgtggacctttccccctgcccggctgctatggacctttccctgctgcccagctgctgtgggccacccctggacgatggaaaggccaagccaaggctggtgcagttagtcttgaactccgctgaactgggttcacatctgactcggccacttgctatgcatgtgatcttgggcaggtcacctcaactttctgggtgcacctttttagtcctgacaggattgtcacgagaattaagtggaacaggtgggagattgtggccctgagccgggcttaggtagcgtagtgtgagctgtctgtctggagagaccagggaccactttgtggtggtgacattgggctggcccttgaaaactgaggaaggactttgtttggcaaagaagtggagggagaggcagaatggacaggctcaggagactgcttggacatggacccctggaggataagagtttgcagctttgtcaggaagtagctggggaggagagtccaggtcacttgtgcgaggggcctttcaggagggctcggacaccagcttgaggcatctgggacttgattatcttacaggccatgaggcgagagaggagggacaggagtgaggccatgccaggcggagtggcttgttcagtggagggtgctgctttggtctagacaggagaaggccagtggaactcccattcccctctgccctcccatgccctggccaagctcctctgtagcagcggagtccagggcaggtcaccctagccatggccttggctgtcccgtgtgtgacctggatgtcatggtgccacctccttcctgggagcagtaaggattccatgccatggaggacaggtaaagggtctctagtccctggagcgctgtcatggggctagtgatctgccatgtttagaagggtctcggctggggccgtggggagcagtgtgcagccacagagggtaggatgagcctcctaaccttgagagggatgggggaagcggcccatacttggacagagcaagggcaggggcatttcccggagactctggaatgaacattggaatgctgctcttgggacttggccttgaacaggcagctgccctgacgacccaccctcaggccttcttcgtccctcctccaagggaacaaccacgtcaccagggtttgcaggctgagggagggctatccctatccccactgacctcccgttccctctgagcttagctgaccttggctgctggtgtgttggggttttggtccaggaactctaaggctctggaccttggagccagccagacccaactttacccacaaggagccccctgcctgacaaggagccagttctgtgacagaccttcccagcacagcctggatatggctgtctgcccagggagcccaggaaggcttcagggaagaaggggcactgaagctgggtgctgaaggttgggtaggaaggggaaggacagcatgtgcctggggccctgcctgagactcctgcttcctgggatggaggggcccagcaggcaggccgctgcgagagtgggcctggtcaggtggagcagggaggtagatgccagccagtggctcagagtgccaagttctggggctggcattgaatcccgtgtggtctcaagaggggatcccttcacccccacaactcaaagggctgggaaatacctccccgtgaaggcgctgtcttcacagcactttcagcatgtgccggctgccagtgttttctgggtgaagcaagccaccttcctcctttttcagatgaggaaatggacccaagaggtttgggtgtcgcagcaacactagatcaaagatgggatgctggggcacatctcttgccctccctggcaggcctcagtttctcccctgtaaagcggggtgaggtcagcatctgcctcttgggctcgtggagattctgtgaggtgacttgtgtggtggttcatgtgacgcatggcccaaggtaagcccggcctggggacgccagctccaccctggtgggaggcaggcagtgtggagtccacgccctggtttgagacctgcttctgtaggtagtagaggtgccacatcctggcagggttgttgtaagaagtagctcagacctgggccgtggaagtgatttgcaggggtggaatccccatgtgaaggccttttgccctccttggtgccacctcgcctaggggaccaaagctctagtctccaaggaccacaagaggtcagaggggaaagctgtcatgagactgagctaggcacagggtcgggaggatgccgtgggccatgcaattgggccaccttctcttccaccccagccttgggcagcagagagggacttgacccagggctgggggacggcagaagccctgaatacaggggcatcagcccccagataccacaccacatagggtagctgtgggcatggctcctggactgacctggttcccatcccagcagggggccttgggcggctcaagtaactgctcctccctgagcctgtcatacctttctgtaaaatgggtagatgaatactcctggcagggctgtgtgctgttgaaatatgaaaaaagggatgtgcaagtgaccagctgggcgctcaccttgtgctgactagaggtgggtgcctacaggcatcccttcctgggagtggaatgggagtgaggtagagaccagtgcctgcttccctcctttcacctgagcgtcccgggtagggaagctgagcctatccctgcccctttggagcctgggcagtctttggtacccatcttctgccctgcctctaatgcgctgcttccctaggctggcaaggcagaggctggaggtgaaaaaggaagtggcccaacaatgccagcatgggatgaagccagggtaggggagaagcctgccttgggtgactgatggagcaagcagtccctgctgtgaagtggccagggactgctgcaagcacaggacagggctggcttcccagagaggtggttcttgggccttgaattggtcctgctgggttcaggaagtgaccaaatgaccatttttccttccttagccccctcatcttatcagctaccaccatgggcacaccctggcagggtcacagcagaccagctccctctgggcccagatgagggagggaccgaggacactgtgtttcagggcctgtagactccaggctggtcaggaaggaaacgcataggaacgtgagtgagagagtacgggtccactggccctgcctccaccacccacccgcttgctgtactatccaggaaggagtagcctgggagagcttgcgggaaccacttggggcctccctgggcctgccctgcccctattcctcttcctcccagagagcttgggctgcagggatggatgcagcctctgctttacatcccaccccgtggagaagctcccagggaagcggggagggtcatggctgcccaggtaggccgggccagtccaaggtgtcttaagggccttgagcttccctacagccctctcttctgccaggatcctttccaggtcagccagagcatgcttgtgggacatggtggggaaggaaggggagggctctgcaaccacagactccaggatctggctgttttggggtctggcctgggcctgctgggctcctggggttgcaggaccagggtctccttgggtttccctgggcaggcccagcctgctgaagcatgcctcgcctctcctctccacagccagctcattcatgcgccccaggcaggaggcggcctcagctcaccagctccccgctctgtacttcctgggtccctaccccaccctccctggctcccagcatccttacctggcagagattttccaagctaggccagaaagcagcccaatcccagccagtgtgacttccctactatcaggcagggcgtctcttccactgaggtatgaagccccatgtgggagggaggcctggagtccaccctgggaggtgggcggctcaggtggaatctcagcccagggagggcaggcccacccacggcactggtcattgccgtgatggggaggaggccaggccgctcgagcaaggccttgagggattatcaggagaagaggcctgttccaacacagcggtgtggcggtgtgatgtggtggtgtggcggtgtggcgtggcaggtaggccagtgcccctttgtgaactggacctcccagggagagtgcctcagaggagcagaggcacatgctgggcttgtccatgggcttaggccacaacgggaagccccaggtgggagtccttgtgggagttggggagggttcccccctgtcttgaacttgtctcacagttttcctctggctctgcccattccctctgctttcagaggccagcttcgtgctgggtgtggagaggcagagggagccggttgactggggctcctgggctggcctctgtggggtatctaagggttgggattccctcagctctgactccttacggcatctagcatgggactccatgttggggagggctcttatgctcagagggctgttgccatggagatgtggagcttggggtgggagggtggctactgtcagcctgagtccctctgagcagggctcttcctgctcacctctggattcttgagcacccatggagtgggcctcagcccgctgacccggggcagtcgcagaaatgagtgtacagggtatgcatcctacagggaagtgtctggtggctctgccaagctgcgagcccctcaaggtcagggaccaagcctcagcatagcccaaggtaggggtcttggtttggcgaggcagggagagaatgatggactgagcacttggaccattggaaccaggagccaaagggcatagggcgttgggggtaggaggtccatgtgggctaagcctggagtaggtttttcaccaaccccagggtttgagccctggacacaagcagggctcagcttctgcaccagagatggtcttagcaggcccagcctgtcctcacgcttttcctctgtcccaccgtgggggctgggggctctaagaggacactgctctgtgctgctgactttggagagactttacctaaccctagagcaggtgtcatctgcggtgctttccctgtgatgcactgaggaaacaggctcagaggagaacgatttccccagggccacacagcaggggagcagcgggcccaggtctggtctgcgtttgggtgccgggtggcatcagccctgtgctctttgtgcctgtgtcggagccactgacctgggccctgagtcccagcatggggaccccgatggagtgtgtgtcttgggtactgtgcagagactgctgcatcccttctgcttcgagactcgcctcgcctcgctgtcctcatctgtaagatgggagcagcagggtccctgtggctttccctcgtgtgggtctgctggtgtgggacagtgtatgaggaagggctgttggcagtggtatgctggataaatgttggggcagagtgactgctcagtcttggacaaggaccagtgcaaaagagaggggaaatgggaaagcgcccagaactgcagacagctgcctgggtcaggcgggctttccttgggtctctgagacttctcaggagccaagctggcccaggccccgcaggctcacttgcaaatattaaccccggagtggcgcctaatcctcaccttcttgctctctgagaggctgagcccccagccagactcttgcagtcgggaggaggttcccaccagtctctgtgacagccctgcccccagatctgtcttaagacagaaaggagagagagtggagaggagtggctgcctgctggaaggggcacggccagggcagatgggtgggacatggcaaccagcttgacccgggctgtgggggcccacctgacacacctactgccaccccaggtcccatctgatgccgaggctgaaggagtctcgctcccacgagtccctgctcagccccagcagtgcggtggaggcgctggacctcagcatggaggaagaggtggtcatcaagcccgtgcacagcagcatccttggccaggactactgcttcgaggtgggtcccatcacaggggttggggtggacaccccatcctctcctggcctggctggtctcctccagacatcctcctggagtccagtctgctgtggcctcagcaggggccagggtcttggggacagtggctagtagttaccgatagctttcagctcctaagagacctggtggagctggggtggaggctgtccttcctactctctaggttctctggaaatgggccagcacctgttctccatgctagcctgaagctgctggggcccccagtggatgacagtgagtaggggaaaagcctgaatttcttaagcaccagagcccatgtcttagagcctgctcacctcccaaatgcagtgtggatagcagagagtctccccttgtctgggcctgtttcccactgtgaacaatgagagcccaaatctgtcctgccctggcattctgcgacctgaggtttgaatgcagagagccagtgacccacctggggatgacctgtccagtccctcataggaaatgggggatctgaggcccagagaaggcacaaagacatcagaggtcacacagcaaggctgagaccaagccgggagcagggttactattgttgcaggtgttcctgggagttactaattgcttctgcagttattcatattgcttcctaccagtttctgggaagattcctacccccaataatcatgcataactaggagagctctcttgtagaggaatgagcctggtaatgaaaagcagccacttggggactagtgtgacaatctcctggcacccccagccctggggaaaaaacagaatggtgcctggcacctgccccataccctgtgcccactggggaccatttctggttcaggactcctggccaagccaggcttgatctgggttctgacttccttgccagggatagggtgaagatggccctgtctgctggttcacagcagggggttctgtggagggtgcaggccctcgaatgccgtgtgaggagtgtgcttcccctgcagagacccgggtctgctgctggggacagtggaaacacacagcaggaattgcccggactggctcccttacctggcaggagatgtctaagctggaccagaggttgagtgagagtcagacagagagggaaggagaagggtcagggactggggaccctagggcctggcacatccagacagtccgagtctcatttctccagtctggcataaaaaatatcaggcttatattaccattgttgtcactgctgcttgacggaagagaaccctcagagttgtcagctgaggactgaggggattctggtacctacctttagttgtctccttggttcttgtggttccgcctttagggaaagtacgctcgggttaagcattgccctctgacctgggcaaggtcttcgttcattccctcttcccatctcagggagagggaggttagagttaggaagatgctttcctattggacagagggcactgagggacgagtgaggagcctgctcgtgcaggatggggccactctccggctgctgacttgccctgggacagtggctctcaagtgtaccacctgcaaaacatgaagtagaggcgtcatatgagccttgtcctggctccttcctgaagctgtgatgcagacctgatggccagagtcccctgagcctccaaggtcttcttccatcactgcctgcccttgctgtggtcccttccctcataacactgtcttgcctgctccccacaggtgacgacgtcatcaggaagcaagtgcttttcctgccggtctgcagctgagcgggataagtggatggagaacctccggcgagcggtgcatcccaacaaggtaagcctgcgcccctctcaccaaagcatgggggattgaaggtaggctcagataggaggaaacaagagagactatctctgtggtgtgggctgggattgggggtggtcagcctgcatggaggcagggcccgagtggacaatattggtggactctgaaagagacgtttgagttgaccaggttgagacaggtgctgtgtgcctctgttttctaagctacacattgaggctgggcttggggaaatgagtgctggaccctggggtccttctgctgggaccccttgtccctactccccagcccctggctgagttctgctcatcttccccttccaccttagatgtctgcccctcctccaggtgaggacccctgtcccaggctggtgccctctgtgttcccactgcccctgggctcccccattaggtcctgggagcccccactgtaatccctgcttctgtatctgtctccctagccgacttgagggcttgaccaagtcctggtcaccatagccatctcttaagttacagtacagaccagcatattaaggaagagttaataatggcatagcctgtgacgtgtcaggcgttgtgctggcctctctcagtctcgccctctatgagatgggggttttaccttagtgccgtttcatagacaagcaacccaaggctccagttaagttgcttgcccaaggtgagtgagcttctgtgaggtcgaccagagatccagcccttgtccatcatgccctgcctcatcctgacttagggcctaggcgcccgctgccgcctccaccttcagagctcctcctgggtctgaggactctctcaggctctgggctggttgggggttgcacgtggcacccccagctgaccaccctggacccccgtgcacatacaggacaacagccggcgtgtggagcacatcctgaagctgtgggtgatcgaggccaaggacctgccagccaagaagaagtacctgtgcgagctgtgcctggacgatgtgctctatgcccgcaccacgggcaagctcaagacggacaatgttttctggggcgagcacttcgagttccacaacttgccgcctctgcgcacggtcactgtccacctgtaccgggagaccgacaagaagaagaagaaggagcgcaacagttacctgggcctggtgagcctacctgctgcctcggtggccgggcggcagttcgtggagaagtggtacccggtggtgacgcccaaccccaagggcggcaagggccctggacccatgatccgcatcaaggcgcgctaccaaaccatcaccatcctgcccatggagatgtacaaagagttcgctgagcacatcaccaaccactacctggggctgtgtgcagccctcgagcccatcctcagtgccaagaccaaggaggagatggcatctgccctggtgcacatcctgcagagcacgggcaaggtgaaggtgcgtgcaggcccctcggctcctgacacaggctgggcggcagcactgggttacctgcccttcctcacatccgtacatttcaggcctaacagaggccttggaggcaccggtcactaccagaagggctccctaaacccaaaagttctatcgtgggctgggggttttgtactcctgctctgtggctggagctgatcactgaggcctgtgtggagccagtggatgggattgcagctggtagtgagggagtgggcttgggttgaggtgccttccaccactgctgcagaggaccgaccccctgaggcgccaggggaacaggctgggtggccacggctctcccagcacacaggtcccacaacgccaccagccgcagtgagccaaacacacgtcccctgtggggtatggagttcggcagacctccccagcacgatgcacagatgagcctccctcacagctctacctcaccccacactctcacccagacacacagattgtcacacaggtagacacagtcaaaattgtactattcgagggttagccagccccaccccagagcctcacagaagcgggaatcgtctgagacccacccaggcaagtcctagttcagggccagaggtgctcaatgtccatctccatgacccctttcaccttccgctcccgaagatgggcccagcagcccaccatgcaagccgtgcctcagccccacctacccggtttggggacaaatgggctcctggaccagggtgcccctaggaaggcagtagagcatggtctgtgggcctcgaaggcgaccttctctctttacatttgccacctgccattcaggaagctggccaaagagggtgggaaaaaggggctggacttgaggcctctgcagcgtggatggaccctggtgctgggctaaggactgggcctctgccctctggacagtggcgtgttgtgagccaagtggcaggtggctgaggggcaccctgtgtcaaggtcctaggcccttagctctgggtcggggaggcacagttgggagccataccccagggcagagtccagggcacaagactcgtggaggtccctcaccctctcacctgttcctagaggccctggaaggggaggccatggctggaagcctcagcagcctctgcagcccccctccctcttgcacttgctgtatgctgcaagtgcagggctggggcggggacctcctccccatggacccgcgatggggagcagttttcctctgtagtgctcagctacctcctccctcaccttctcccccagccttcagacttggctggctaggctgcacgttgggccagctctggctgccccgtccttaacatgctggtcaacactggggacgtatgctgggaaacggaatgaatcaaggacccatgggcaccagagagggagtgatgggggctgcagaggctgcattattttctgcagttgtgtctgatgtttcagtacctggttcccagggctgggctggggctggcctgggaagcggattcctccctgaagcagcctgaaatgataggtatgtccaggtgctcgtggagggaggtgaagtcagggctgcagccaaccccaaaggccctcagtgggattggggagcagtagatagaagcatagaaagtaacttgtgctgctggggtgacaggtacctaagcccccacccctggaatacttgggaactagcccctcttccgtctccacggctagaggagtaacggagtctgggaagcaagggacttggaccagatctggccccaggtggctgtgtggccttggacaagtcattttcctgctgtgtgtgcattggtttcccccttattgggtcctggctctcaggaagttctcatcccagcactggggcctggctctcattgcgggagttcaggaaggctgcagtcctgagcgggagccctggaggagccccgggggagatgcacctctgacccccgctttagtgtattcagagaatgagaccctggaggtcgcctgctggtcaggaaggggtcctcaggccacatgatccccaggaagccaatgacagcttcccctttgcccctgctgtccctctgtgcctctgctgtgcaccctgggttcctgtgtctagatctcagttctgttttaaaggaccccaaggtcgtgcatgtcggagtgaggaatttcttgagcacagatgcctgggtccacccctcctgggcaccttgcaggctctgtgctaggtggccccctgccctgactgtcaccctcccttgaaactatgacagtttttcctattttcttcccctcccccaagccacaggttagttgtgagcacaaggaggtgggggcttctgagggagggtgttagtatctgcatggttgctagagtagggggaaggtgtgggttcgggctcctgtgctggggttttcccacaacactgtgtgtgggacctgatgggcctggggctgctaccctggattgccaggtgggcagtggcgcctccaccttccctctccagccagttgcacatcacttcctgctctcacctgcctgagcatggtggctcacgacctccccgggcagtggggctgcacagaaggcatctgtgtctggtgtgggagcccccaccagagtcataggtggatactgatggccattcttaccatgagacagggcagcctcatttgtcctctttggcactgatggtgcggggagaggcgagtcctgctgtggtcaccaggccaggcctgatcagggctgtacatggaaatgagtccattctctgtggtggtgggggcttgtggctccacgtggcatgctctcattcaggctgcctccatccatagacccggctctactgtcaccagttctaggctcctaccctggctgggggcccctgccctgcccacactccccagcagcccccaaaggtgggcacactgttcctctccgggacccccgcagcttggtgatggaacagcctcaaaatgccaggacttctctggctaggtctggaatcctagggccctccatgccaggccagctcaggtcctgctctctccacctcctgcctccccaggacttcctgacagacctgatgatgtcagaggtggaccgctgcggggacaacgagcacctcatcttccgggagaacacactggccaccaaggccattgaggagtacctcaagctagtgggccagaagtacctgcaggacgccctaggtagggagtgggccagcagcagggcagagggtggggcagggcccgccaggtcctcactccccactccctgcccacttgtccataggtgagttcatcaaagcgctgtatgagtcagatgagaactgcgaagtggatcccagcaagtgctcggccgctgacctcccagagcaccagggcaacctcaagatgtgctgcgagctggccttctgcaagatcatcaactcctactggtcagtgcggtgcccaggtctccccaccctgtcgccttccccatcctgtccttcagtgtctggcacccgcagtgtgcctgatgctgcctggcccctgagttgtactgacttgccagtcccctggcctagtcccttttgagctctcaggtggggcagcgttcagcatgttgctgtggttttgtgatggaaagaacctggacacgccagtctgccgtctctggtgatgagggagcgcccttcatgtgccgggggctattgtgggtgcttgggctgcagcgggagtgagactggcaggccctgtgtgggcccccacttggggtgggcggatggcttcacctgaggctcctcacctgtccgtgggagctaaggtgctcatgtcacagccttgtgatggggccaagcaggggcacgttgggggcctgagcaccaggcaggcctcttgctgggactagagaataaacagaaaggactagactttgaagtagaacggggtctgcagactctgccagccccagaaagcagcagggcatgcagcagtgggctgcttagacaggcccctcagcaggaccggaatcagtcccggagaaacttgcggtaaggccgacttcacggccaccagcttgctcctgggatatatgtgtgtgatggccagccagcctggtgccgagtatagcctcgttctgtggtggcacacaggactgtgcgggagggccttgctgtcagcccaagcagtgggttcatattcaccccagaggagctgcccaggtttaacctgtgtccccctccagctcagggcttacagcccccacccacccaagcctccgtccacagcctgttctgacaccactctctccccggccttacctcactccttgttaggttcatctctttcactcacctgcaccttcccctgcatacactcctgcccttcctgctccgaggccacacctggtaccctctgtcgcagccctgatcccatcaggatagggttgtgcctgtgcctaaaacatttcctgtgaatgctggggcaccctgggggcaggtgagcccaccacctcaggactgggcacacaggaaggccagagaagtgtttgctgctccccaaggacaagaaaaggcagggggaatgggcaggccaggagggttggcacccagggccttagcccctgggctatacaaggtgcttgcctgggccaaatgggcacctcaagatgggccacaaatgtgcagctttccacacccctgggccggtggaggagagcgactgtagggccttgaactctgggaacacacttcccattcccagctgggctgtgctttccccctccccctcttccaggggggctgggcatgtgactcagggaaaacatatttgtggacagtgattttccatttcctctttctggcatttatcagaggcacctctccattctggacaaggccattgatagatgtcaccactcaacacctgccccctgtccagttctgtgccaggcactgtgagagccacggctaaaggtggctcaccttcattccccgctaggtgtgcccttgatgggtcagccagcatgcattgcaggagagcctgctgagcaggctgctgggcctgtgggggaagaaatttcaagttggtcaagcctgttgtagccttggggttttagccttacgatggctctgtgagcttggcagggcaggccttgctctcagtttaggggagagaaaacccaagccttccaggagggctagggccttggtcagatcaccctgagctcatggcagagccaagtgtagactgagttcacggaccactggggcctggcctgccccaggctgggagatgcatcttttagggaaaaaagataggaaacccacttaagggttggccaggtgggcctgaccatggcaggccaggatgcccagtggaaccaggagccccattgtctagggccagctctgccggcttgctccatcaccctggggcagtcactacctccctttccctccccatgtagagaatggagagctgtgttgtcccaccgtgttcaggggtagtcccatcttcttgatctttctgagcttttaggaaatcctggattcctgtgacattattcaagcaaaggaaattagtctcaaagccagtgatgggaacccaaggaatagtggtctattcctgttttcctcacttccccctagacccagatgcctgctgtttgggttgaaaaatgaagtagacactggcagagaggtggggagggcccagaccagaagctggagaggtggttcagcactggcccttggcagttaattccggttaggacggagagccagctcctcatgcctcctcccatcccacctgcccggcccttcactgagaacccactgcccgatgggagcctgggtctccctgctcctcctcctgcctgggcacttgctccagccaccctgtattgactgctctccccagatggctgtgtcctcagagctcagacagcggggctgacctcacgcagctggcggggtagagccaaggttggaatgcaggttcctgctctgtgcactcctgtcctgggcccctgcctgacagccaagcccacctttgtctgtccctacacagtgtcttcccacgggagttgaaagaggtgtttgcctcgtggaggcaggagtgcagcagtcgcggccgcccggacatcagtgagcggctcatcagcgcctccctcttcctgcgcttcctctgcccagccatcatgtcgccctcactcttcaacctgctgcaggagtaccctgatgaccgcactgcccgcaccctcaccctcatcgccaaggtcacccagaacctggccaactttgccaagtgagtgcctcctccctcaccaggcagagttgggcagggctggtgtccacagggcaggccctgggggtgtttctgcccccaagctgagcagagaccataaacaggccctggttttgtccctgtcatcctcagtccttctccttcccgctttttaaaaaataaaatctccacaccctgtccttctactcaaggtatatgtcattttggtatgtttcttaatttttaaaggtgacgacatgagacatttttttccttctgcttttttgaattaatgtattattataaggattctcacatatcccttaacattcattaagccctgttttgaaataaatgactaatattcctccaagggggactggcccatatttccttaatccattccctgtgcttgggcacttgggttgggcaccaccatcctggtgtcaggctatcaggatgtctttgctgataaagcactattggtgtttttggctgcatccttagagcaagtgggcagaagtagaagggctgggtcgtctcactgttgttcattctcaaaacatagattgagccccatcctggggccatctgtgtgctgggctctgacggcaccaagatgaatcagtcctggtggcgctcagcacttcagccagggagacgtgtggaatgagcaggagagcagtgatagacacacacgagcctcttaggagggctctcagcttgttgggagaggagacaggaaagcctccagggtgacatgatcccccaactgcatgtcagggtgaggcgttcattgtctcaagaggagcagaggctgggcatcccagggagggccatgcactgtgccaggtcaggagaagcgggcgatgagacctaagaggacagcagggacctgaaggccagacagggctgtgggagccaccagagggttttaaacaagggagaggatggccttcctctgttctggatcctgaaaagctcaccctgacagcagtgggcagatgggttggagggagcaggatggtagccaggagacgtgaaaggagagcatagctgtggttccagcaacaatagcagaaaattcgcagggaggggagcgggtacaggaggcagtggctgcaagggacaaggttaggggtgattagaaggcaaaatcagtgggccgtgccatttgggaatgaggaagagggaggagttgacagctgccagagattctgtctcaggtgtatctgtatgggtagtggggtctccacttagggtagggagctcaggaggagggcatgggtttgggtgttgatgatgacttcaggtgtggcaggctgagtaggagggactcccaggggtggtgcctgcagatatattaatacatgcctgaaagctcattgggagacctgggttgagcagggattgagcatcatctgcataccagggcagtgaaacttggaggaaaagccgaaggacactgttaacaggcagtgtatgggggacacagaacattccaggtcctgagataaaaggttcagaaaaggatcgctggacttaccatgagcaaggagggccctggtgacctgggtcagagcatattcagctgacttggggagtgaatggagtgggagcctgccatagtggggaaagcgggtggtggtgtcccagtggagggagttcctgggcagggcctgcctgggcccagtagtgctcacccaactgccctctctccagatttggcagcaaggaggaatacatgtccttcatgaaccagttcctagagcatgagtggaccaacatgcagcgcttcctgctggagatctccaaccccgagaccctctccaatacagccggcttcgagggctacatcgacctgggccgcgagctctccagcctgcactcactgctctgggaggccgtcagccagctggagcaggtgcctgttgccgtggggcggaggtggggccaaaagctgccatcaggcttttagtgttcccccttccagagtaaccatggagggcagagagtttgcccaagtggcatgatcaggccaggtcctgtcagaacacactggggatctgtgggccccattttctctgtgggcaaatgctatgttcactcagcagtatctgccaaggctgccccactctgggtactagagctggggtgttccgcatgcactcagcctttagtggacaagcgccactgtgctgcctgccagagcatgtgagaaatagaattggatcgtgaatccgcctgtatgaagaagatgactcaagaccctgtacctccacttgtccagcaggaagtcgaaaacctttctaggattgcccttgaccatcagttgacaaggttactccctagacacctctgacactgctgcagtcacctgaagtgagccctccctagcccgagacttcactgacccccagcctcagcccacacagtgagcaactagttcttggacttaagggctgggtctaccaggaactacttcccgaatatctgttgctttctagggctccaagggaccaccttacttttgtaaggtgctgaaactggcctggaaggcccttcatgcctcctggtcccattccctagaggtgaccgctcagagcactggtatgcagccttctggacacgatctgtgcatgtgtaagcgcacacacacatgcaggcgcacacacatagagctcttttccttcttcagtttgttttaaagcaagaacatactgtgtatgctgctgtgtgcatttcttaccactgtgttgtgggcctctttgcttgtcagtgcaatctccaccacccccagggactttttaatgactgcattgtatgaatgctatttatttcaccagtcccctattgatggacacttaggttagtcctgacttttcactagaaataggtcctgttgcaatcaaaggccatcatttttgctcatttgtatccacttgcctttggctgtgagagacacaggagggagaaatggaaatgagggctgagaccctacattccacctgttccagtccctgcactgcagccaacactagtcactgtcactgccaccacttacctttcccctgtgctgtccacgtatctgcacaaccaggcaggaagaatggaaggtgatcagtattgtcacatcggtgatagggtgcaacagggatttgaaactcaactgtttgcctctcaattgcgtgctctattgcctgcatgagttttcacactttgttttctcacagagacctctgtggaagcttgtgcataaacaggtgaaggcagtgtccccaaagcctagaatcctctgccccttaagttctctaaagcgtgccagcaaggttcagatgggttcaggcactgccttctgcctgaccagcacctgagggtgcctgcagtgtgcttggaccatctccactggggctcaggtgccaaggtgggtcaggccccagcccatcccgtggagtaagtgatgtgagaggggctgtcacagaagcctctggatggagaggtggaggtgtggaaatgctgggattccatgtgtgctttcctctctgcggaggcaccagggcagggcaaactgaaggagaggcttgcactaggtcagcgtctcccactgtgggcctcctactcctgccctagaaatgtccgggagctggttaaaaatgtagatttaccgattcctgggctcacccccctcccagacccagtggctctgactggcagcaggtggggatctgcacttctgacaggctccgcagtggttttgagccatagtggctgcagcacatacagcctacccatgtggtcccaggaggtcacacctgcctcttgctgtgcctttacagagcatagtatccaaactgggacccctgcctcggatcctgagggacgtccacacagcactgagcaccccaggtagcgggcagctcccagggaccaatgacctggcctccacaccgggctctggcagcagcagcatctcagctgggctgcagaagatggtgattgagaacgatctttccgggtaagagctgccagccatgttgggtgtggtgggtgcgtgtgcagactaggcacagcccatctgtaatctcagatggggaaagaggatgcctacatagtgtttataaaacaagcctggcaagacttgagttgtacaggtcctaagtggtgaacctccatttgggaaaaatcagggaagccttcctagaggaggtgatgctataggtttgttttgttttgggaaaagtagcatttccattggtggaaaaggcattctagacagagggacaagcacaagcaaagacatgatgtgtcagagaataattgctggtcccaaatacccccagcatttccagatcccctgatatttgttaaaaatacacatgttcctggtatttcctgagcctgagtcagaatctccagaagtgtttagttgggggtgttttcaataggaattcggtggctctgccaggctttgaggctgggaacagcagaaaacataaagtgatgctgagacccagtcctggggtctgctctgcctaaataagacacacacggcagagtggaaggcaaaatgttcttgtttaagtcaaaatagagacatttctatcagttcatgttgaagcatttctgctctacccctactctcccctctcccgccagtgatccttcttaccccagcatgtgaggccgcagctgtagcagcagagttgggagtgtggtctcccccaaggtggtggcagggcaggcttttaagcaggggagggtgctgagatcaagaacctggggttaggggagcccaggaggggccagagatgcaggtccactgagtcttgcattgggtctgttcagtgagtgtgccaagtgaagacaagcagagtcacatgccaagagtttggagtggggggtgcagtagacagcccttgagaggctgagaggcagccgggcccgtgagttctgaaaagactgacctggtgtgtggcctgggcagccaggcccccactgctctccgtctttcctggctcatctgctgctctagccagttctcccaggcccgtgagcactgcagcccatctcagggagtggcacttcctctccgtctgaggctaagccaacccattccccattccaagccatatcaagccccccaagtccttgcagccttcagttccccccacccacattcttctctccaaagcccccctggaccccgccacagttgtgctttcttccaaggagctagcttctggggaggggccagggagaggccagagaaaagcgtagaatgaggaggaggccagggcaagtgcagccctcccaccaagtcatgctctccacagagcctgctctcattccttgtttttgccaggaactccagcccccgcctgccagtcaaacaagggagcggcagcaggaggctgggcaagaggaggtttcaccgggcccccacttcagttaccagtctgattaggaacaagagggaagaggcagagggaacccagtgactctgaagttggggttctcaatgcaggatccgtggatagcagagagccactgagttgtggcttagggcttagctaaggaggagttttccagagcaagccaggccccagtacccattgtcccaagatgcagctgaacagggaaggggtcttccaggcagcgcggcctgaaatgtgcagtgctggcccctaaagaagaggttctgtgcaggagcagccgcctcagcctctggtccccggattctcccactcctgccaccccagcgcatccatctccccagcgctggctcaggctgccaggccccggcaggttggcgggtgctgtcggtttggacccgccttggctgcactcacagttcttcttttccccttctttccctgtgtgtgcttgtctccctgcagtctgatagatttcacccggttaccgtctccaacccccgaaaacaaggacttgttttttgtcacaaggtcctccggggtccagccctcacctgcccgcagctcgagttactcggaagccaacgagcctgatcttcagatggccaacggtggcaagagcctctccatggtggacctccaggacgcccgcacgctggatggggaggcaggctccccggcgggccccgacgtcctccccacagatgggcaggccgctgcagctcagctggtggccgggtggccggcccgggcaaccccagtgaacctggcagggctggccacggtgcggcgggcaggccagacaccaaccacaccaggcacctccgagggcgcgccaggccggccccagctgttggcaccgctctccttccagaaccctgtgtaccagatggcggctggcctgccgctgtcaccccgtggccttggcgactcaggctctgagggccacagctccctgagctcacacagcaacagcgaggagttggcggctgctgccaagctgggaagtttcagcactgccgcggaggagctggctcggcggcccggtgagctggcacggcgacagatgtcactgactgaaaaaggcgggcagcccacggtgccacggcagaacagtgctggcccccagaggaggatcgaccagcctccgcccccacccccgccgccacctcctgccccccgcggccggacgccccccaacctgctgagcaccctgcagtacccaagaccctcaagcggaaccctggcgtcggcctcacctgattgggtgggccccagtacccgcctgaggcagcagtcctcttcctccaagggggacagcccagaactgaagccacgggcagtgcacaagcaggtcagtgctgctagtcagagggcagggctgggcacttgggcccagctggggctgtcataccccataccatgctcctcctctcggtcatttcacctccaccctcacccagctgccatcccatcccaccagcctgccacatgcgccaccaccccctccccctggcttcttcctgaatcctgtgaaccagggacactgtagccttggggaactccaggctcctctgtcagtgcccctaggggcaggctggggtcagagagaaagaggaggagagtgcattcatcttcggttccaagcctgtcgaagcgcctacccagctctgcccccacacgcccctcccaaaatgttttcacaggctggacaggccttcaggcacaaccacctggagcatggatgaccctgtcacccaaaggctgcaggcagtgtctggagtggaggtgccttgggctgacagcccagcctggccctgtcccccactcagtgcagcctgccccggtgcccccagtggcagggtcactcactgtcctcttggcagcagagtgtggtgctcaggaggccacctggcacctgtcagctctgcctttggctgccgtctgagagacagttcccgggtggggactgcctcggtaggcgctcagtcagctggaggtcccctcttcccaccgtgtcccagagttgcttgtccttgtggctcacctgggccactcccgcccctcctgcttgccctccacctccctgcagcccctcacagctgtgtttcattgtagggcccttcacctgtgagccccaatgccctggaccgcacagccgcttggctcttgaccatgaacgcgcagttgttagaagacgagggcctgggcccagaccccccccacagggataggctaaggagtaaggacgagctcagccaagcagaaaaggtaaaactggaccctggcggctcgggacagggcggggctgcctcccggcagcagctggtaggagtctctcccccaggtcccccagcaacgggtgctgctgtccttgtgaagggcccgtcacctctgagcccctgttccctgtgagaatagcagtcagtggggtctggaagaaaagcaacaagagggatggattagcagcttagacctgaggcttcccatctgcagattggaatcaccagggaattgtcttggatacagactcctgggacctctgggaaggctccttagcccaggcaactgaggcagttgagcttcctgaggacctgggggttgagggctgagggtgcccaagtgacatatagaagcccccctgagggaacttggtacctgaggaggcagaggcatgggtccccaggatggctgggagagccaccccagcctggcccccaaggcttgtgcctgcccacggcctggctcttcacccctctggtctccaccagggcctgggaaagaaacagcagttaccagcttggggggtggggtcaggctgccattgagatgttttcttccccacccccgggaaaagaatctactctaaaaatgaaactctcactctgccacacactctgccatctgctggggcaaggggatgcttcgttggtctcccaagccttccagctgtggcagctgctctggatctgggggtagtttttgtctcctactgccagctgcagtccatgtagacggaggaaccagcgcaggccccagaacggcaggcgcttctccactcccctctggatgctctcgccccgctgggccccaggaaagcctgtggcaacctctcgagcaagggtattggggtcagaatggcagaactccttctccccggcctcaggcgaggcccgtctccatgctgcatcctgccaccgccaccatccccggtccgctacatccacctgctttcaccatagttacatgaaggggaccgggggacagggaacacagtgctcccagagccagagtttggctggggagtgaggaggactggcctcactccaggctttttgcatccctgtgtcctcatggcgtctggcccctctcgatcccggcgttggcctttcctcgctcagcgcagagcacctgactcctctctgcagccacgccgcttcccagcctcgtccacatccctgctcctccctgatggttggggtctgtgctggactgaggcagatccagagcctggaccacctgcctttcagttctctctctctccatttcctcatgccactgccaccccctggctttagattcaaacagaggctgggaagctgggatcttaccctgctagtcagtcgctcttcatgtgacatggtcaccttgtctgggcctcagtttcccctcctgcagagctcccacctctcagggtgctgtcacatgtccttcatgtatccaagggttttttaacctttgtcatataaaagttcaaagccctagttacaccctcagtcctgggacttgggtctaagtcttcatccccgctgtagccatacaggtcaggctgggagtttggagtggaggccccacggtggggcacaggcacgcgtctggctgcagcccccaccagctgggctccttgggcatctccttgctatgtgaagtgggcgggtcacagccactggggcctttcaagtggggctccctcctacccttcctcccactcgggctgacgaagctgtgctctctgtgtcctgggtgctgtgcccgtggacgctgccctcctggtaggacctggcggtgctgcaggacaagctgcgaatctccaccaagaagctggaggagtatgagaccctgttcaagtgccaggaggagacgacgcagaagctggtgctggagtaccaggcacggctggaggagggcgaggagcggctgcggcggcagcaggaggacaaggacatccagatgaagggcatcatcagcaggtggggcccacacctgcctggcctggccacaggcacaggcagggcagccatcgctgccttcgaggaggcccctggtcggggagcctcctcaaaggataagctgaatgtggagagaggagggaagagagtgtctgggcagtgggagcagcgtgagcacaggcctggaggcaggaggtggcctggagggtgggcagcccatgcagaatacaaagctggggatgaggctggaccaatgacagctggctcccgacgggcctgagcctctacaaggagccataccatcttagtaagcactctcaggggcgctgagaagctggattggggggtgccaggaaagacagggaggaccccaatacagggtaagaaaagtgggaatgagtctcagttacgtatagtagatgaaggtggaagacacagcgtagcccccagattcctaccaagagtgtctgggtgtgggcgtatcagggtaccagttactgagctgggaactgttaagaggagtggtttgagtggggagggagagggggatggtgccagtctgatatcctgagttttaaggggcctgggttatctgggaaagggcttcagaggaacagcgggttttaatgctgactctcatctttttgaaggcttatgtcaggccccatgttggtgcctccatctctgtctctggctctgcctatgggtagggcatccctaccttggtgtcaggcagggagtacaatcaaccccagggtcccagtcgtggagtttacttccttctcagtaataccaggcacgggaggagagacagtgtgtcttgtttgaattggcctggtctaagaccccatcagctggacagaccaagcaggtgtgcaagagccaggaaggcctctgctccatgttttgtctatgacataagcccttcccagattcctcctatttagaccacctgtttctctgttcctgactgttgtttgctccatttacttgtagtttggttcattatgaaatagttaacatgagtgaaaccagggtggctagaaacctgctgttcacttgttctccagctctgctcttggctcaccttgtgtgtgtttccaagaatggaaatgcttttcaatttaactgccttctctacattgtgtgtattctctgatatttgcatgttctgaattcagagacttgcttaacacgttcgtttctactaaccaatcctggaatatttcctccttaatgtaaatgtcagttaggtagatagtgttcaagtattccatatccttactggcttttctatttctcccttcattccaactggtttttgctttatgtacactgaaactattcttaggtgcatatacatttaggctgtttatgtactattgttgaattaattccaactggtttttgctttatgtacactgaaactattcttaggtgcatatacatttaggctgtttatgtactattgttgaattaacctctttgtcattataaaatcactttctttatcccttgaaatattctttgctctgaaatctgccttgtctgctattaatgtagccaccccaacttccttttgattcgtgttggtatggtatagctttttttatcctcctgcttttaactcattgtcttggtccattcaggctgctataacaaggtaccttagactgggtaatttataaacaacagaatatgtattgccctcagttctgaagtctaacatcaaaatgccagcagattcagggtatagtgactctctgcttcatattatagtgcaccgttgctgtgttctcacattgtagggggtgtgagcaagctcccttgggcttcttgtataatataaaagcactaattccatttttgaaggcaaagcccataggatgtaatcacctctcaaaacccctacctattaagataatcaatcaccttgggggttaggtgtcaacatatgaatttagaaggtgacacaaacattcagagcatagcacccatctatatatatgaagtgggtttattttacgggcaccatactattgggtcttgctttcgtctaaatggttctgcctttttattggagtgttttgaccatttacatttaatgtaattattgatatatttaaatctgttgccttgtttcctatttgtaccatctgttctttttttcctgccttcttttggactgagtatttttttatgattccattttctctcctattgacttattagctttatctctttgttgctctagggcagggattggcaaactttctacaaaggagcagatcaaaagtattttaggctttgtaggccatatggtctctattgcaactgttcagctctgctgttacagcagaactatttgtgtgagatggctatttacaaaaacaggcaatggtccagatttggccctcaccctgaggctgtaatgacagggagtctgtcattgtctttgttcctctgtactttatgtatctgttttccctggctatttataagatactttttttttaaatcactggttgtcagtagttggattgtgatgttcattggtgtggttttcttctaatttcttgggtcttggatttgtatgtctgcagtcccacctccccccatttctttctctgggattcctagcacacgtgcattaggctgactcattttgtcccgtatctcactgatgctctgttatcttctttcttcattttttttctgtttcttctctttgatagtttctatgactatgtcttcaagtttgctaattatttcttcttctgtgtgtaacctgctattaatctgatccagtattttttcacagcagataattatatttttcacctcttagaatttcattttgctttaaattccatcagttttaattctcattgtgcttttacttctgttttctgaaacatgtagaatatatttataataccttgttgttttcatgtccttgtctaattctatcatctgtgacatctgagtctgtttttactgatttattttccgcctgcttatgagttttcctacttctctctgtatacttggtaatttttggttggatgccaggcattgtgaatctcacagtgaggtgctgaatgtttttgtgttcctttaaatcctttctgggggctttattctgggagacagtgaggttacttggaatctgttcaatcctctcagggtttccttttaagttttgttaggctgcgtcctgcagagcctttagtcttggcctaacgtggccctgctctgagggggtttccttccccgggtcctctgtgattcccagtgttggtgcgtcactgcactctcactggtacaacatgaactgcttctgcgattgtttcgtgttctcctttctgacggttcttgcctagcctggtaattttctcatctgcatgcggatattattcagtcagagacacaaggggaacccccactcgggagctatgtggagtttctctctgcctcttgctcctctctggcttctgccctgcaaatcccacacctcttgaccttcctgacctgcctgtctcctcaactcagtgaggctgctgactccgccttccctctgcttccaggccgttcactgggctctccttgttggtttctgttctcctagaaattattgtactgcattgcctgtattgtgtccatttttctggtttgtttgtttggttggtttttaataaagagatggggtctcgccatgttacccaggctggtcttgaactcctagtctcaagtgatcctccctccctggcctcccaaagtgctgagattataggcgtgagccaatgtgcccggccctatttgtttttaagacaagagagtaaatacaatctccttccaatctaattttccttaataaaacaaataccctcctgccaccccacccccagcacaagctttcctcagagtgataccttcctgtactggggaacctgccccggagggtcccccccgccaccaccgctcctcccagttagtgctccctgaactgctgccctgctgcccccattacagtcccgtgcagaaccggccccggcacagtggctccctgtgtgtcttctgtgagtgggctaagtgcttgcccagtgtgcggtggctgctctaggctggaggaatcaagagggcagggatggagagaagccttgggagtggagggctcatctaagagtgtgtggagcaaggagaagggaggctgaggccaaagccctgtggacccccatgtccagaggcagacaggacaaggcatctaggagacaggcagacccagagagtgtggggtctcaaagccaaaggagagtgggaaggtgggagtgcccagcagtgagagtgtctcaggaaccagccaggtggggccaggagggctcccaggcagggagcagcaggacggagccggcctcctgcccactgagcttccgcgggtggtatgtcccccagctactgctcattgttctgcctgcacacctgtccttcagatgtctcctactgatgtgcgacctcccagcccaccctccagggaacgtcactgcttcctgctctttgttccagggacctgagctttccactagcgcagctgctccgtgcagggtgtagttagttactcgtgcctcctgccttgtgaactccttgagggaaaggactagagttcattcatcttggcacctcgcgtacaactttgtgaagatggcgggggcagggtggaaaaagttctagagcctttcagggccttcgtctttccaccacctgcctagctctaggggtttgaagatctaatgcccatttccacccatcttggctcctggaagaacatcgggaaaggggcagcccgggggcctctggggctttaggagcagcgagtgtgggatgtggaggtgaggaaggaggcccagcagtgtcagttgctgggagtcggctggagggcctctgccccaggcaagtatgggaggcaagtctctgacccaaggaggggctctcctagtgtgtccctgctgtgtgcgggggtgatgggcttgttctcacaccctccccacctctgctgcctccagggccagtctgactgtctctgtctctggctataggttgatgtccgtggaggaagaactgaagaaggaccacgcagagatgcaagcggctgtggactccaaacagaagatcattgatgcccaggtgggggctccggccctttggtcagccacaagagttaaagggcctgggattaggaggggtgactagcctctccatcctcagtcatacctcactgcagacactgaggggaataagaaaccagaatctgccctgagaagtcagacctgtggtcttagtgggccacaagctcactaggacaggctgtgaaaggagagaggcagctcctcccctgccagggctcttggcgggcattgtctttcaccaggactgctgaccaaagagtggaagccaccaggagggcagtgggggtaggagtgaaggcaggctggtcagagggagcagtggggctctcgttcacaactatggcatccgggctgcattgaggggagacgtgaaaggctctgtggccccagcctcctttactcagggctgcaccgctttcctttcactcacccaggagtaggctgggccttgctcaggctgtaaactgcacagaccaggagctgtgacctctggtgtgtcatgcacacacatgtgagcaagggtgcctgccctaggggccgcaggcagcccatagacagcactagagctgctgcatttgggctgataagcaggcagcgaggctgtgtccatgatgctgcagaggcctctgcctaccttctcttgccagctgctcacagcccggagcctgcctgccaccctcatctccaggccacccccttccccgatgcttgtcgtaggtatacacagccctaaggagcctgtcccatgacccccgctcacatccccattgtccacaggagaagcgcattgcctcgttggatgccgccaatgcccgcctcatgagtgccctgacccagctgaaagagaggtacagcatgcaagcccgtaacggcatctcccccaccaaccccaccaaattgcagattactgagaacggcgagttcagaaacagcagcaattgttaacctgcctgaggagggaggaagctacccaaggagagggggactatggtggccaagggcagggtctcggcctggggaggcacccacggttgcagccccagcgcgggtgtcaggaggccgagcctcccctccctgccgctgtccaggaggcggccgcagagggagccaccagagactgaagcagcgtgaggcgaggtcaccagccgctccctgtggggtgcgggcagaagagactgcacgctggggagtggggacagcctgatggggcagggggcctgccaaaaatatgtctgttggttcctgaatgtggtgtgtccttgtcctcctggatctggccgagtgcatgtgtccccccacacctgtgccagggagggggcttcctggaggggggattcaagggctaggggcctacacctgtggcttcccctcgcctccttggggggcccgggactccctggcagccaggccctgtcatgtgggacctggcacttggcagatcagttggcaggcaggaagataggaggacacagagcaggaggtcagtgtcccctgcctgtctccatccgaagcacctgccactgcatgcagcctgttgggaccttcctggctgtgaggaactgaggattcctacccacccaccccctctgaacctgtccccagagcaccacctgctaccttcttccctgccttagttgtattgccagatagacccagtgagggccatggctttttcttgtgagctcttgtccctgtggggaggacccacagcttcccacacctcccacacaggcccaggctgatgctctagggctcccagaagccagagatctgggcggatctggccagatggctctgagcactgtatctgccttctcctggggcccagcacacccagggcacagtggtcctgtagggagtgccacctggtgctcaccctgaaagaaaaggtgatccttcctctgagtgatggtttaaaaaaagattctaacgcctgcaggccctgagaaggtggataactgtgattttttttcctttcacagtatgcattagaaacaaaagcccgcttgctcgcttgctggaacacaggggccttttaagttgagcgtgcgcactgcatgggaaatagcggccctggaggatgttagacttgctccctctccaagacagcagcagcctgcacctgccccgtgtgtgtggccggcctcctcctcacccttcccggcccccggccaaggacccaggcgctgcatacaggggaggggcgcaccccacagctggggccggttttcctcagctctaggctgttctgtagcttatctgcccctcccccactttcaagacagatgagcaggagcttgggtctctctcggcccctgtctgttcccagcccctgcagattctgagcaaaggccctgggtaagaagggtgggagtggggcctttgccagcagagccagggcagggcgagctgcaggaatcacccctctgcccctgcagctggaatgtgccacagaggccccacctgaagggtggatgtgctggaggggtggcccagagccatactgcgtccaccctgagctcggggacaggtgacagtggctgctctgggaaggggcttttagatgtaacctacaattcagttaggctagagacagatgctggtggaggaagggctgggccaccagggatcacagaccacaggaagatgggaggtggaagcagaggccctgcccccaccccttcctgtctcactcttctgtcttgtccccacccatgcgccttcgtgcctgagaccagggtggccacacaggcagggcctggctccagtctcatcctcccattgcccagtgagccctgctcttctctccccagccccctcccaccgctgcctcgtagagtgacctcggacagagcccccctagcaatacagggaggctcccggggcctggacaggcgggctcggaggctacccgctgtggccggtgccagctgcccttgcagggtgggtgagctctcaggccgagagccttatttacctagtgcaaaaactgtaaaagtgtacagactcttcacagatttttatcttaattgcaagtctgccgattttgtaaatgttcttggtgtttgactgtaatgtaactatctcacctaatggttgtacatatcctttggtcctggtgctgccgagggctggccgggactgctgctctcccaagggttttattttatttctgaatctagagaacagtattgggcaggaggaaaaggcttggtgtctgcggggggtgtcttccctgcctgtggcatttgtgtgttggctttgcagctgctgtctgagtagtggccactggggtgccttcactgggccagtcaacggggggctcctgcccaggccacagagaacctgagttcccgggagctgggccctgcctgcagccagggctggggttgccagaggccctggagggaaggacagtccctgctggggaagaacagccccggggccccctggtcaccgagactcagcctctgctggagaaagccacgccctccctgctagcacagaggcctgactgacttttttgcttaacttccatgttctgggtgatggaaactgccaaacctcctgtcagtgaggactctttccgactgcccagaaagtgggggtggaggaccgaggctacagctccacacgccccggtcccccagagcatctgccccaggtacacctccccctgcgccccgcacgactgcgggagccagactgtccagggaaacagcctctctcttttctacacactcagccacaaagccccccagctcccacaccgcgtcccagctcccctcttttgtaagtatgtgaaaaggaaaaaatgcaaacgttggagtttgggctggagctcctccctccagctgcgacttttaactatgtaataatgtacagaggaagctgttggtgttctaagactctgtgtggctgtgcaatttctgtacatttgcaattagaaatattaaagatttatttagctatttt

SEQ ID NO: 15536 - DNA, 193171 bp, Homo sapiens
tgcttgcaggaatacccagtcatctagttggaaaagccgccagatggaatacaaaaggaggaacccagacgctcatggagacagcctcggttcataaatcaggtggggccaggggctgggggcccacacgccatggagcccgactcccttctggaccaagacgactcctacggtaagacggtgccagcaaagtgcagagttgggggtttcagcctctctgctcaacagacttttctctgctataggaatctgagttgaagcagggaggcagtcaggcatctgggcactgtctggtcttgggacccatgggtgggcatgggtgcgttgggctatgagactcagggctggagggtccctggagcgggcagcccctcagactccaggcattgacaaggtccaggggagggagagagagtttctcagctgcttctgttttgctcctggccaagaaggaaaggaaggaagttttgcagcccccctgcctgtctgcctacctcgctgttcgccaggcctgccctgtgctgtggggaattcaattagtgcgatcctgcggataaatatagatggaagaggcaacaggaacataccttgtaattaaaggccagggctcatgctgaaagcactccccgtgtgacagggccccagtggctgccaccggagagctgcccaggccactggaagctctgcatgcattattgggggaaaagttgctcgggacagagcccatgcagagtctggaagagggatttataagactcggaagggttccttcgtggtggtttctgcaggcctggggctccagcgacgcagtaactcagctcctgcactactcagcctggccagagagctcacatttggctgggatgcccggcacagcctggctgtctctggacaaccaaggagggacgcaagagtgcaagagtgtggccgaggcaccgaggctgggcatgggggggtggggcagcaggttttgggactcagcagggagaagtcctgttggcctcggaagaggtggtaattgcagggcgacctcatcccagcttgggtcaggtcagccttccaggggttcaggtcctcctgagaccacagttctactaagaaaaccaagtgcttgtttctccggactttcccccaccccatccaggcctggctgcctggcacagattcaaggccaaatttccttcctcctgcaggagctcagccctttccaaggagaggggccctttgccacgtttggagctgcagccctcagggaagcttggcaaggcccagcccacagacctggcatctttgggcccaggggacggggggtcagttgatgcatgcagagtgacctccatgtgccaagccctgtgtcagggtcagggatgtgtaggaatgaggaactcagtcctaacaaatagttggtgcttagtgaatggaaggaggaggagaatacaaagggaggagagagggaaaaaaatagggagagcagcccttggcctggaagagctcccagtctggaatgggagacagacaaacgatcccagactaaattcagagtgatgcggtccttggggaggccaggggcagacagcctgagggtgtgggacaggcctgcctgcctccagagctgttcactggaagcttggcattgggatgcgtatggactcattggatgtctggatgctcccctagggagggcactgacctttgaagaggcaggcgagggggtgggaaggaccagccccagccagggatatctcaggaacccacagtccccacttgctgtcctccagatttgctagtagcagcctctgggctgggcaaggctggaaactgaggctgcctccaccctcatggaaaggccccatgcacaatcagctccttgtcctggcctgtcacgaggccggttgctgatctcctggaagctggccaggcagggaggtaagggattcaagaggaagaggaaagggacagagggggccttaggaaagggacaggcaggcatggagtggagcccaggctctctctgggagcaatcccaggcccagctggagaggggtctggcttttccagccaaggtctcccacccagccagcctcaggggtccagggctgaaggaggccatcctgggtcagggcagcacaggaaaactgcggtctcagtgagtcacttccccagtctgagccccggttctacattcatcaatttaacaattactttcaggttctggactgggctttggtgttcaagaacaaatcaaactttgtgactttcctaggctaatctgagagagatgcaggtgcactgatgggggaagtcaaggcgtgtggaagccctaaccctatacttggaatccagaaaggcttcctggcagaggtgactcctccactgaagaagtcaatgattccctctatattgatcagctcaggctgctgtaacgaaatagacaaggtgactcacacaacaaagatttcagaaacagaaattaaaacagaaggctgggcgcagtggctcatgcctgaaatcccagcactttgggaggctgaggcaggtggatcacttgaagtcaggagtttgaggccagcctggccaacatggtgaaaccccatctctactaaaaacacaaaaaattagccaggcatggtggtgcatgcctttaatcccagctacttgggaggctgaggcataagaaccacttgaactcgggaggcaaaagctacagtgagccaagatcacgctgctgcactccagcctgggcgacagagagcgagatgccatctcagaagtaataataacattttgcagtgatgtgatcaaaggtcactgcagccttgaactcctaggctcaagggatccttctgtcttagcctcctgaatagctgtgactacaaacatacaccaccacacctcactaattaaaatttttgtgtgtgtgtggagatggggtcttgctgtgttgcccaggctggtctagaactctcgggctcaagcaattccaatgcctcagggtcccaagtgttgggattctaggcgtgagccacagcagtcagcccttttctctttctcttttttttttttttttttttttgagatggggtcttactctgtcatccaggctggagtgcagtggtgcgatctcagctcaattgcaacctccacttcccaggctcaatccatcctcccacctcagcctcccgagtagctgggaccacaggtgcacaacaccatgcccagctaattttttgtatttttggtagagacaggttttcgccatgttgcccaggctggtctcgaactcctgagctcaagtgatccacctgcctcagcctcccaaagtgctgtgatccttttgtctcttcttataaggacactaatcctactagggccccatccttatgacctcatttaaccttaattactccttagaggccccatttccagacagagccacgctgggagttcaacatatgacttgaggatgggagggatacacatgttcagtccacaacaccctccttttttattgagacagggtctcactctgtcacccaggctagagtgcaatggcatgatcacagcttactgcagcttcgaactcctgggtgtaagcaatcctcctgcttcagccttcagaatagctggactacaggcatgcaccaccatgcctggctaatttttgtattttttgtagagacagggtttgcccacgttgcccaggctggtctcaaactcctgggctctctcaatctgcccgcctcggcttcccaaagtgctgggattacaggcatgagccacagtgccggcctggcttctgggacaggctgctctcggggtttcctcccattatctctggctggccccttctcctggggctctctctcctgctgctgcccacagggtcccttcgccagtgcctgcctcctctgctccttcatgattgaactcttcctccttcacccctcactccctcgcttcccgccatcagatctgaccttcctcacgcccccaagctgtctccccccagggcctttgagcatccttcctctttctcttccctgagctaattcctcctcctcttcccagtatcaactgaaaagtcacctcctcagagaagccctccttaaaccatgttcccccaatgcatcactctcataggccctcttttcctttatggacgtgttcatatgtgcactacacattattgcatgctgatgtgtttcacctgcatctcccgtgagtctctaagcaatctggatccccagagcatagttctccacctggcaggagtaagcatccaacaaatgcttgttgaatgagtgagtgaacaaatgcagttggtgcaggcaaaaaggcaaggaaaggcattccagggcagaagaaacagcaggtgcaaaggcatggagactggtgatgctttggagcattctctgatacttacaatcttggtcaggggttggcaagctgagctcctttagggggctcaggaacattgatggggatggggaagggttgggagctgcaaagctgggggtgaggctctggacatctctccctgcttcaagctgagcaaagcgcctttcgtctagtgaagaccccagttctgattgcatccatcaggtgttcagaggctgaaagggttcagccatggcatggtgggggatccgcagccactggcactgaagttctggaggcctaagcctcttagcaggcaggactgagcagagccctattgggtggtctggcggtgggagccccttagagcatggccaagaagggctcagacacagctgcagcgaggagcagacataggtgcagaggtttcttttacaggacagtcagaggcaggaaggtgaggagaaggggagagctcggaaactcggcactaacccctgcagagcccttgtgattggccttagtttccctaggtgtaaattggggtgacggccagacaagatgtgactgtcccctctggtgccagccccttggagctgtgtgaaaagtccagctcagagaagcatgtcctttccgtctgccttgtgatttccaaagaagggggcaagacagaggcctggcagcggccagcataagagaaaaagtcctgccctgcaaaatatgctttctccgggttcttttggagtcctgctatttctccacttcgtgggtaccgtcctcctaccaggacagctcctggtgcttcctccgcctgggtgtgttttcattgtctgctcaccagcctgactcccacatgagactataaggcccttgagggcaggggctgtatcttgtctgccactgggttcccagggtgctgcacagcactggtcctgagaaggcactcaatacatactcagtggatgaatgaatgaatgaatgaatgaatgaataagtgagcgagagtgagtgaattaatgagtggcatgagctggatcctgcccttaacttgctccgcatccttaggcatcctccccgactctggacttctggttccttagctgtcagctgagggtgctgggccccatgccccaagagagcaggcctgcatctcatcccagctctctcggttattgggtggcctggaccaagtccctgccctgacttagcctcagcttcctcatctgacaaatgggcagactcagccctgccctgcctgtttttcaggcggtcttggagctctggaggagtaaggaggcaaaacagtgtgaggctggacacctgtcaggggagtctgtgactcgtacaggagcgggggttgggctcagacagcccgctgggataaaccctccagaagcgggtggttgctttcgatatcatggaggtggagcaggcagctcaaaagctcagaactttccatttcttcctgatgacaaccagcatgggcatctacctcagggttgttggcagatcccagcagagaagcaggtggatgtgagtttgtaaacttcccaatgctactgctgtaataactgtttggtaagcacctactccatgccaggatccaaagacactttatctacactgtcttctgttttggtttgtttgtttgtttgtttttgagatggagtttcgctcttgttgcccaggctggagtgcaatggcgcaatctcggctcactccaacctctgcctcctgggtttaagcgattctcctgcctcaacctcccaagtagctgggattacaggcatgcgtcaccaagcctggctaattttgaattttttggtagaggcggggtttcgccatgttggtcaagctggtctcgaacttctgacctcaggtgatccacccgccttggcctcccaaactgctaggattacaggcgtgagccaccgtgcccagcatttttttgttttgttttttgttttttgagatagagtctcactctgtcgcccagtttagagtgcagtagcatgatcttggctcactgcaacctccacctcctgggttcaagcaattctcctgcctcagcctcctgagtagctgggactacaggcgcgcaacaccaggcccggctaatttttctgtttttgtagagatggggttttgccatgtgagcaggctggtcttgaactcctgacctcaggtaatctgcccaccttggcctcccaaaatgctgggattagaggtgtgagccactgcatctggcctacattgtcttctgaatccttgcaatacacctggtgggttgcagttagccttattttccagatgagaaaattgaggcccaaggaggttacgtgactggccctgatcacgcagtgagtgcactgatttgaacccagctttctccagctacaaagcctgatatctttattttgctgcagtcctgaaagccattgtgtgccaaagctgccacctggaggcccctccctgtgcctgtggaaaatcctctctcccggggagcgttcactgaagcagctcagagatgtggcaggagccatgtcagctcagctggccaaggcgagaggcagactcagctgtgggacagggatggtctaaagagaagacaatttgaggccaaaatagcctaatgtcatcagggggcctgatatcatgactccctgggccttcctttgagaggcagagggattagcttcaactggtgacagatagataataattgtaaaaaataacagctatgtgtccagccactggcctcccatccatcgtctcgcttcccctgcttaggcctgccctccctctgaggcctcctcctggctctgccactcagctcactcagcaggtgccagccaaagacctgggctctcatcgagcctccatttccccatctgtgaaactgacaccagcctagcctgcctggaatggggaagggacgccagaatctagatcccttccatcttgttcgagggctctgtcctagaccaggctgcctgggcctcagaaaaatgaaggaagagaagccacattcatacctggagcccttctataagtgaaaaaattaggccaaggatgcagagctggggtcctatttatgagcatttactgtgtgcctggctcactgctaaatgttctccactgactcctcacagaggaaggaacaaccccacagctcagaggagaaaatcaaggcttagaagggccctgccacacagcgagtgaggaacacttgtgattcaaacccaggactcccaagatcctgtgagctttctccactttgggctgctcccaccaccccactgggtctcctggcccccaatccagggccctttcccatgcccaggggggcctcggttctgctggccagccatgcggggggcttctgaacttgcccagctgggcagctggatgagtggtagagccacacgccccctccccttgccctgagactctgggaagaggcgcaatcaggaggaacagacaataaagaacaaagaggccagctcgggaggggcttaggtcatttccacacacaagcctgagcagctggcctcataacaaggtcaggggctgaggctgcagtgggggttggctggtgaggagggagcccctgtgcctggagcagggcggggaagagccaggataaagctcaagagagaagagttggtttccccagagagagggacagggaaagggagggagcacctatgtgcataggacgcggacatttcacttcccataggctcctggagagcccctcctgaactgtacttaacacccccaggcctgggcttctatctgctgcgcctccgtgtgacctgtgagccaggccagttgattctcagagcctcggagggatggggacagcagcagccaccgcgcagggctcctctcttgtgaggaccaagcaggatagatccttccttcttctgtggtcctggacagccactgcctcaggctggctcctccgccacgggacctggtgcagagtcaaagatctttaagtcaatctgtagcatgatccgggtcccctaagctttcctaccaccgaatgtgtttcttggtatattgttcaattcccgttttacagaggaagaaactgacacactcgcttgagtatcggtccttcaagtaatgtggcctgactcatgctcaggttgctggatggctgccacagccctccttattccaaagaggcaggtggaccccacacatcaggcccagtgtgtccccagcttcccctcactggcctccctgggctgactgcaggatatccagagtctagccttctgctcccactgccccgtctgttccttctgctgggtggatacgccctgggctgcttagcccaccctgggccttccaaagccagagctgtggtcctcccagctgggattcctcccaaggtctcaactctggaagcccagggaggctggaacaaatagcaaatggccaaggtgtagggagacccaaggggaagggtctcttgaggtcctcctgtccattctctgttacatcatgggaagatggaggtcagagaagatgaaaccaggcccacttacggtccatgctacctcctaagaggtccagagatccaccccgactctccgtctccagcccccacttcaggccaggcctcaccttggacacctgcacagctgccttgcctcttcctggggctgtccatctctacctgccccccaactcatccttcgtgcacagccagaaggggccactcataggcattcaaaaaacttcacagggcccaccgctgcagcaggataaaatccaaactcattaacagagcttaatgccgttcatggtctgaccctgcagatacacttctgctctcatctccaagccacaccccactttcttgccactcccatcatcatgaattaatttctgccttgaatctgcctctctctctcccttacctttgcacttgctcttaccgctgcctgaaacactctttcatcttagccttccctactacccctccagcccggtcaatcctgcccatcctgaagtctcagctcaggtcacctcctccaggaagccttccctgactagcttgtttgggctgcctaggctccctgggctttctgctatcccactgcactttgatgagtaaagtccatttgctttactgtttgtccccatctctgggctgtgagctgcttggtgagccacagtgaaaacttggaggggaggctgggtgggtaaagaaagaagtcaggataaccctgatctctggcctgtgtggcaggagatgttggtgtccacactgacatggggacctgggtggaagggcagattctggggggggaggggaaacgatgttctgggcttgctgtgtctgaagggcctgcagggccatccagtggctatctctagagaagttggtgacggtcacctttgagagaggcctggattccagaagggagggaggggagctgctggggccttcccagcgtgtgtcagaaccactccctttcccaggcttgcagaagccctcactcaactgcccaaccagggtcctgtcacctcccccaggaagccagcctggccctgacaaagcagtgctctgttctcccccttgaccattactcgcctctggtctgaggacatctctcgggctctgccttagaactcttcaaggtgggagccacatccctccatgtcttgtagactccgcatcgcccagcacagggacagacacagagaagaagctgcatggacaaggagccctgccccttcccctggacacagccccagccagtgggattctggggaaaagaaaacacaagcctgaggagctttgggtcagattgtctcgggagagtgggggaagaggcgggtggagtgggggtggatttctgtccaatctggaagcctgtgctggatggccggatcgccagcaccccaggctcgaagcgttccagccggtgacctacattcccagggcgcctctgtgtgtgcgcacacgggcaggcgtgcgtgagtgcaggagctccacggtgtgtctgccagtgggcctctgtctcggcaggctgtctcctcaggagcccgtgagtgagcacgtgagggcgtggggggcccacactcctgctctggggttccacagactgcaccagaaagagttggtctgtgccctagaaaagccacagccagggactgcagggactgacatggctgggggtggctgtcccacccgcagccctgcccaagaccctctctctctcctcccatgctctctctgtgacaaatggcctcacactgctctttgctaatggtggggtgttaggcatggaaaatggagggcacagctcttaggtggcggtggagggcggggacctcaaacaacagcccgaggcagccagatggcaaccagaggtcagtagggtgggtggctcagcagagggagcaggcaccaggctctaggccctgcagcctgaggtcagggcgtcactcaggggtccttgggggctgtcccgggtcaggatcctcctgcctccaggcgggggtagaggtggagatctctccctcctgggaaggcctgtgcttgactgagaagctaagctgactctatggccctgaagccagggcaccagggaatctggggggtgggtgccctgctcagagaccctttagtctctcctttgccagttctgtggcgggtggggtaggggtggctgtcccccaaacccttctgagcctcttctttcagacttggtccctgacagcagggaggggatgggtagtcctttcagagactctctctgggtctatctctgtctctttctgtctctctatctctgttcctatctctctcagtccttctgtctcagtcatctctatatatctctctgtatctctgcctctctctctctctttctccctcctgctgggctccccctgctcccctcttccctcctctccccctagtgactcctgcaaagctccccttccccagcagaatggggaacacagacttggctgagggcctaccgtgcccggcagcaagagaaaagtgaggctcgagcccccgacagcttctccgtggcccttccaagccccgggggatttttgcttcagttctcctctccctccgtcaattccccagctgaggccaaccttggtccctgggctctgcacctcctgcccaccctcctgcctgtatgaggacccccccatcgacctcccttgctggccctttctccggccctgcaacgggcccaagtctctcccatcccatcctcactgcctcatcctctccggcctatgtcttttttttttttttttttttttttttttttttttttgagacgaagtcttgctctgtcacccaggctggagtgcagaggcacgatcttggctcactgcaacctccacctcccaggttcaagctattctcctgcctcagcctcccgagtagctgggattcccagcccatgtccttctgatctctgcttccccactggcattgtgcaactcaacaccactccctgccccaaagctgctctgaacgggcccaccagtggaataccaactgcagaatccagggctttctcttggggcaccatcttaccagtcctctcgggtgaggctctggttgggggtaggtcagggcagggtccctggagccccgcaccatcagatctctgccccttaccaggggaaatgatgtaacttctctgaatctcagttttcccacctgtgagatgggatggttaccctggtactcctgtcacaggttattgagaggagtaacactgttcatgcttatttaaaaaattctgagaactgatctagcagagaatgaggcctcagttgatcttggctgtagttataatcatttgtgtttgccattgcttgaatctctctcctacccccccaccctgaggaccccacagtctcctctcctgggtttcctctcgcctgtctcttcatcccctctcggtctttcctgtaggctcccagctaagccaccaggtgaccaggccaggccctctgcagtccccaccatccctcctcacatctgtgtgtcctcacacccctgcccactgcaggaccaagtccacctctgccacccacacctttgccagcccctacctggaccttctgccttgccggtaccacccagaccaggggacctccctaacataggctcaataccctcctcctctgtgcacctgaccggttctgctcagggctctgggggcagccctgtcacaccttatggccttgtccatcgatctgtcagtccacatgcctgtctctgccacacaccttggagcttcatctctgtggccctggcactttctgctgcatatttgttgaatgaataatgaatgaacgaatgacttgatgcaaatcaaagtactttgcaagctataaagcgctcctccaatcaatgccacacacagtggggtattaaggagcactcaaagcctcctgcaggacttggcctcaccttgcccactgcacctgggtcgggggaaggaaacctcaatcttccagaaagttctaatccttcatctgcctcaggatcattctgggtaggaacgatgcccagcctcgccctagagatttggattcagtttagtctaaaggaggcctgggcaatggaatgtataaacccctcctccttttttccctcctcccctgccccaccaggtgactctaaggggcagctgctggaattggaggaggattgttggagccctggtctttgctccctgcccaggttcacttcttttaatttgtgccttctctgtgctagctccatgctgggtgctagaggggaagcacgcacccagggaagcatgaggctgggtctctgctttagggaagagcttagaacaggcactcaaggctacagtgacatcccagggtggagagacctctaggggtaggtgggaaggagaagatgctgaccttaaagataaccagagacctaaggccaggtacagtggctcgtgcctgctattctagcacttttgagaggccaaaggaggaggatcgcttgagattaggagaccagcctgggcaacacagggagagcccatctctaaaaacaaagccaaacaaaatacggaggttggcctggtggatggaggtagtgaacaggcagagggaaccacaggggaaaggcctggagttgagaactacagagtagcccatctaagaactttttttttttttctgagatggagtctcgctctgttgcccaggctggagtccagtggcgcaatctcagctcactgcaagctccgcctctcaggttcacgccattctcctgcctcagcctcctgagtagctgggactacaggcgccaaccaccacgcccagctaatttttttgtatttttagtagagacggggtttcaccgtgttagccaggatggtctcaatctcctgacctcgtgatccacccaccttggcctccccaagtgctgggattacaggcgtgagccaccgcgcctggccgcccatctaagaactttgagtgattcagtgaggctgtaccccaaaatccaggtgcgcaggcctggagaggtcagctgggctggggtagcggcctcaaatgccgggatcaggagattgggctttaccttgcactgggaggagccatgaatagtttcaggcaggggaggaacagggttgtgctgggtcttcctggaattgctaagacccaaaccacccctgaggcagctcaggtgaggctgggtggctgcccacctctgggagctcacaatcccagcaggagaagcctagcccaaggagggaggccaagaagacccagagccaagggggtagtggggttcctggactggctaccttcgccagacctgctcagcctccagttccctgtttagtggcattaaaggtttccgtcccccaatgtccttggcagcccagtgcatgctcaacttgtgggggagcaggaggagggcagctctgactatcttccttgcaccttgcatcttcaggaggggagctagtcagactcttagggaacaagagaaagagaagggaaggtgcatgagcattttgtgccagagctcatagaactctggctggaaaacgtagccccattttacaggggaggaaactgaggcacacagagatttgtgatttgtccctggttgtactaccaggaagtgacagagtcaggatttgaactctggtcctgctggcttcaaagcctgcgtgcttcccactgtgtgcatccctgctctgagtctgcactgagcagcccacgtgcctagtcctgctccagggagaggcaggagaggctgtgtgagagctacaaggaggctggggtctctgctcacctcagcagtcccagtaaagtaggcaggaaccatgggagagattcgagcagaggagggacaggtccaaagctgcagccagaaatcgcctgtgctccagcccctgtccccagcccctcaatgccaactccccatccttcagctgaccccgggctcattaagtgctaggaaacgccaccagcagcgggtgcagggctgagggccaagctgccggctggaacaaaagagcttgtgtttggggataggacctccccctccttcaccacggttgggggccgtggggggaagtgaggacagtcatctggggccaagaggggctgcagggctggggaaggggcttgtcagagcccggattcagatagaaagggctgaaagggggttggaagctaatgtgcctgagcgtctcagcacaaacgggccattttcagcgggcccagaaatcaaaacatcccggctgggggagagcaagctttgaacttttcctgactcgtggtcctgggggtgaagaggtcagggactgccttgaggtgggggccaggccagggtgggatgagcagccggcagcccaaagcccccttccttctgtccccatgctgagtctcagagggaaccagggctgctcagagcattcagaggagggtgcgggctgtggggggtgagaaggaagggaagccccattttcactgtctcctcactcccaactgtgggcagccaggtgtgcttctacattgcaggtctggccccacatcccctgctgcagacctccactggcgcccccgtgactctcaggatctgttcccagctctggaacaggctctccggacccctggccactggcaccctgggcagcttacctcgtcccactcctgatagccccccaatgaccactttatgcttcagccaaatctagctgttgacagctcctcaaacgcttgggctggctaagcctctacagtttccatgactctcttctgagccggaaacacctgcctcctccctacgtgcattcattcccacccccgaaacgggacaaactcctactcacatgctagtgcccttttgctcaccactgcctccagaagccttcccagcccctgtgaatgagttcttagtgcaatggtggccacagtcactgcaggatgcagctgtctccaggtgaaggctctgccctgcgggcagccctcatgtgtgtctcattcccctgtagccttaggcttgggacagaaagcttgagaccagtaaccagcgagcatttgttgaaagaaggagaaggggaaggagaaggagccacgaaaacagaacaaaacaaaacataattttagaaaacggagaagctggccggccgcggtggctcaccccttaatcccaacactttgggaggccaaggtgggtggatcacttaaggtcagcagttcaaaaccagcctggccaacatggcgaaaccccgtctttacataaaatacaaaaaaattagtcgagcgtggtggcaggcgtctgtggtgtcccagcaacttgggaggctgaggcaagagaattgcttgaacctgggaaatggattttgcagtgagttgagatcacaccgctgcactccagcctgggcaactgagtgagactctgtttaaaaaacaaaaaagaaaagggagaggccaagaaagagaaaacaaatgggtaacaggggtaggggaggagccggctcttctggccactgaggaacgtgccagaacagacagactgcacaccctgagcatcagagcaatactatttctctgtggtgagacccctggacagctcagtgccccagaggcagggtcctgggcacaggctggctttgctggcaggcccctctacagtttagccaacaaggcggggcagctgttgggggggatgggtggggggtcccaggtgggcatttagctgcccgcatagcacttcggcatcacctgccatccgtggatcccagattcctgtctctaagagccccaagagcctataggctctgtctaggccagtggttttcccgttgtgtccaaggagaagctcagaagttggcgtgtaggagacacttccttccttgaacccagcttggactagagcagctcaccagatccaatagaatacaaacattgacgtcaggcgtggtggctcatgcctgtaatcccagcactttgggaggctgaggtgggaggatcacaaggtcaagagtttgagaccagcctggccaacatggtgaaaccctgtctctactaaaaatacaaaaaatagccaggcgtggtggtgcacgcctgtaatcccagctactcgggaggctgagacaggagaatcacttgaacctggtcctgtggaggttgcagtgagttgagatcgtgccattgcactccagcctgggcgacggagtgagactctgttcaaaataaataaataaataaaaacttttttgagatagattacaggtgtgagccaccacgcccagcctcaaaataataatcataataataatacaaatgttgggcttgcctgaaaattttcatttaaatgacggttctggatcacttgagcccaggaatttgaggctgcagtgaattataatgtgatcacgccactgcactctagacagggcaacagagcaagaccctgtctctacaaaaaaaaaaaagtaaataaaatgggagttccatggctcaagtagtttaaagaacactggtctaacctcttccccttgtaaagactagaagacaaggcctagggacaaacaggtttcatcccaagtgcccagggaggacagggtgacagagctacctctagctcctggcccctcctgctggaccacacagccctctgttgaaagtataaacatatgacggaatgatcaggaatctgaaagtaggttttgttgggtaacagggaatagcaacaaaggacacttagtttctggggcaaagggtgggaagtagagaagaggaccaaagtgggaagcggggcgcagagtggctggagggggatttgtgggaggacaatcaccgtgcacttagttaattaatgatagctaggctgctgccaaagccattcaaaaccatgccgtaaatttcccagctttggacaaggcagcactaggtttatttttatttatttttacttacttttagaggtggggtctttctgcatttccccagctggagtgcagtagctattcacaggcacgatcctagccaactacagccttcaactccaggcctcaagctgtcctcctgcctcagtctgctgagtagcttggactacaggcgcgtgccactgtgcccagcagcactaggtttagaatcagaatctcagggttcaagtcccaactcctccatttatctactcactgcattgaacttggccaaatcaatgacctcttgagactcagtttcttcctcaataaaatgcggccaacaacacctctgtcccagaatggcgaggggtcaatgagagcacagagtcgaggctgaacaattcctggtgggttcaggattcttccttgcataggaacttggggaaggttcaaatcccagctctgtcccttactagatagatttgtgatttgaggcaagtttcttaacctctctgcctcagttttctcatctgcaaaatgaggataatagtagcatccacctccctcacaggatgtaatgagttgatacggattaaagcacttagaacagggctgcacgagggtttgttatcattatttggactctattaataactgcaaagattaggtcttgccaaggagagatggtagaaatggaataaaagagtgcacaagattggctgggcgcggtggctcacgcctataatcccagcactttgggaggccaaggcagacagatcgctttgagctcaggagttcgagaccagccagggcagcaagatccctgtctctacaaaaaaatacaaaaattagccagacatgtggtgcatacctgatgtcccagctactcaggaagctgaggctggaggatcacatgagaccaggaagcagaggttgcagtgagctgagatcgtgccactggactccagcctgggtgagggttagggatttaaaaaaaaaaatagaatgggttaatgaatgaatgtaagaaaaattagggttctaccaggaaccctaattacggatctaacttgacccgatcctaacccatcagtggcttccagtcattcctctgggctgggagcccaccctggctccctgtcgctgggcctctccctgcatttttctgcacacacgtagaggtaggctaccatttcgcccctagatgactttgggtgataaagaagtaacttcagcctccttgaattgaatcttctatccagaacatgtaacaaacctggaaattggaattgccctaaagctgattattctgggagggcacctcctggcattaaaactaaattagatcaaggtacctctgttattagcaaaataattccctatgattaccgaacacagccatgaatcctgatggcagatgaacttcaggtgacttacttgagacaaataactgtgcgaaaatcacaggctcatcgaatcacttctctatagcgttgcagttgggtaattatgctaatagttataagaaatcatcctttgtggtctaggattgggagggcttgagacggaaacgtaagtggcagatattacctgcttccagttggagagactgggtccaaaatgggccccttgcagggagctgcaagggagctggtttgtcccctgtctacaggggagaaacctgttatgcagcctgaattgcagtggcctggcaccttgggaggctgaggcaggcagattacttgagcccaggagttcgagaccagcttgggcaacacagcaagactcccttctttacaaaaaaataccaaaattagccaggcaaggtggtgtataccttcagtcccagctacttgggagtctgaggtgggaggatcgctttagcctgggaggtggaggctgtagtgagccatgattgtaccactgcactccagcctgggtgacaaagtaaaaaaaaaaaaaattgcagtgacctcattaagcatcccttttcagatcatcttaatacaggaaattgaatttgtccaagttccactgttgggcatggtaattccaagaagcaagttaaactgtaaaagctcaggacctctgagtcaatttgattcagcaaacatgactctgtgcccactgggtgccaggcagtgatctaggcacaggcagcgggggtgtcagcattcaagggtgtttctgatgctttcttaacagtctcttgtcccctcagtaacctgacgaaaaagacaatattgtgcccattttagagacaaggaaatgaaggctcggagaagcgaactggtgctactgctgataatcagtggagatgactacttccatccacccacagggaatgtagatctgggaggcttcctggaagagcggatttgggaaagtgcagtgtaggcagaggaaacagcttgaggaaaaaacccggaggcaggggattaaagtaggggttcaagaatggggttgaggccaggtgcagtggctcatgcctataaatcccagcactctgggaggctgaggcgggcagattgcttgagcccaggagttcaagaccagcctgaccaacatgatgaaatcctgactctactgaagagacaaaaattagccaggcgtagtggcacatgcctgtagttccagctacttgggaggctgaggtgagagaatcacctgagcctgggaggttgaggttgcagtgagccaagatctcattactgcactccagtctgagcaatcagagtgagatcctgtctcgaaaagaaaaaaaaaaaaaaaagaatagggttgagagggtagccgaaggtcaagaaacagagggcctcaaatgaccaattgagggtttggacaatggggagccaccagaggtggttgagtaaaggaggagtaagatggaacctgagaatgcctgggtgagagtgtgggagacccactggtagataaggctgcttacagggagggggccaaaaggggataaaaaatgggtagttttttcagtataagtgtgtcccaaatattgcataggatatacttacactaaaaaaaattcattgtttatatacaatttacatttacctggcatcttgtatttcatctggcaatcctacccccatctcctcacatcagtgcctagctgggttctctgcccatgatgactttcccttgtgggcacacagcctggtaaactcctatccatgcgttgaagccctgaactccttaccactgctgtggcaataattatcatgcactacggtgattactttcttaggtaattgttttactatctacccatccccttagcggcaaaccttacttctggctgcatagggaaaaaaaggtcaagaccgtgagtccttccatttcctgacctcctccccaccccaagttgcttccaacttctgcttctgtctcaagaagagccggcctctccatccctcctgtgaccttgcctgatcccttcagatcaggcacctcttgagatcagtacacctctctcactggcagccccaaaatcagacattctgctgggtcattcccaccagctgggcacctagcgagtgcttcccgtcctcctcatcccaactggggttccccaggagcaggctctgagaggtattcatgcataggagatccatcaagggctgctctctggctcaacacctgtggaagggaagggaagggaagggggaaaggggaagggtgaagggggaagggggaagggtgaagggggaagggaagggggaagggggaatggggaagagggaagggaagggaagggaagggaagggaaggaaagagaagggagcaggactgggcaggaggaggaactgagcttccatgcagtcagtgcaagcctcagcccaccctacacctggagctgggatgccccttcagagtcatcctgagctgtgccaaacttttatgaccctgggttggtcagtcactggatgtaggacaccccaggaaggaggtgtcacctctggggaggtggctgtcttcagcagaggcaacccccaagagctaagcactgagggactacttctagcagcctccccatacctaggggagtgagacctttactcctgaagaggagatccgggttgcacatcacaccccctaccccccaccaaacccaaggcattcccctccagcaaccatccaatctcttatcttccttctgacctaacccttcctgtcctcccttccctgcctcctactcactccccagatttttgtaaaactcaagagttggctctgtcccacccccggcgtgatatgatcggatctgtgctttgaaaacctgatagggagaactagtagacatggatccacatggagaggggccagtaaggtcgctcagtagccccctcaaggtctctcagtagctccctaaggccaagttgctgagcatggcatgtagggtccctcatggtgcagccctgcctcttctcctgccccctctcatggctgctcccctcacttgaggctccaataatacttgactgtaattccctgagcacgctggctgtttcatggtgccatgtttttttatgggctatttcctctttgcctggctaacttttctgtctcgcttccttaaagacacactcagaggtcatctccttggaagcctttcctggagccattcctgccccgctcccaaggctggtagcagagccgcatagctgcccacctgtgtctcagccattaccagcagtgctcagcagcatatgggagtgtcctgcttggggaccacctgatgacattgttacctgtctcttccccctgcatctgtgtctccagcacccagcccagagcctggcacaaaaggagccgaatgacattgacttaggcacgtggagaatccatggacagccgcctccccagaggtgacagctccttcctacactggtgctctacatccagtgactgaccaacccagggtcataaaagcttggcattgctcaggatgactctgaagggccatcccagctcccgatgtagggtaggctgaggcttgcactgactgcatggaagctcaattcctccttctgcccagtcctgctcccttcccttcccttcccttcccttcccttcccttcccttcccttcccttcccttcccttcccttcccttcctggggtatgagagaaactgcggaggtggaatcaaagcatctgagaatgattagactcagacagggatgtgtcccctcagaacaggtcttccctggaaacagctgttctcctgttcagtatcacctggtccttcctccatgcatagtgtctgacatcatctcattctctctgggtattgaattctcaatgcctcagaggcagaagtgaggtctgtgcatttccactacttatgctccgtgaccgtcatgccccacacgcacactagatcggagctgctttctccttctggcccctccttcccactcctcccctgtcattcatactatccctgctccagggtcttgtgggcctgggtcttcatcctatgatgcttcagtcactgcagttttgagtttcacttccatcatcaggtaaggacccaccaccccagcctatctgtgaaaagggtgttgtggttacaaaacccaggatctggaatcaaacagatggggcttgagaacaggctctgtcatctacatgctgtgtgatcttgtgcaagttgcttaaaatctgagcctcagtttcctcatctgtcaaaagggaatagatactagaaccttttcagaggcggtcgtaagaattaaatgagagagcatctggcaaagcactcaaacttgcattcatagcaacgggcagaaatgtagacatttctggcaacaaacagtatccaacaacaataaacagagcctattgatggaggtgggaaagcagacgtgccttcactcattcattcaacaaacattcattgagcacctactacatgcccttgctgagggtaggaggggatacaacaatgaagaaaaccaggcatgatccctgtgtttagggatgcccagcccgggagcatgacacatccatccagtgatcacacattgaagatgccatcaccaactgcaacggacaccataaaggaaagtgacttgagccatgggtgtgtcatgtgggaggccagggaagccttccctgaggaaatgacattaggcttccattgggagaagttaactgggccaaggaatggagaaaagtgttctgaagaggggaaactggtatgcaaaggctgtgtcgtgggaagaagcgttgtatatttgaggatctggaagttggctggagtggctggaggcagagagggatggggaagatggcaagaaatgaggctagggccaggcatggtagcttatgcctgtaatcccagcactttgagaggctaaggcgggtggatcacttgaggccaggagttcaataccagcctggccaacatagtgaaaccctgtctctaccaaaaatacaaaaattagttggttgcagtgatgcatgcctgtaattccagctactcaggaggctgaggcacaagaatcgcttgaagccaggaggtggaggttgcaatgagccgagatcgtgccactgcactccagccttgggcaacagagtgagactctgttctcctgccaagaaaaaagaaatgaggctggggagatgggtaggacctgaccacccaggatcttggaggccacatgatggcaacaagaaaccattgaagctttgaacagaagtgagggtgatatgattggatctgtgctttgaaaacctaatgaggagaactagtagatagggacccacatggagaggggccaggtggatgcatggaacaagttcagttcttagcgaagtccaggcaagagaccacagtgtctgcactgggctggagataaacatttgggaatcatctgcataaggacagtggttgaagccatggcctgggtgtagttcaagttgcctgtgcagagagtctagaaaaataagagggactcagacagtctcaaactccaagttttacagcccaggggagtcagatgaggtagccaaggaggagaagtgaccagagaactaggggacaaactgggagagtatggtaagatggaagggaacagaagtttctgtggggttaagtattgccaagagatcaggagagatggaggtggaaatgtatcctatggtgttaccaacaaggaggtcattggtgaccttcccgagagccattaggaaatactgcagatctggccaggcgccagtggctcacgcctataatcccagcactttgggaggccgaggtaggcagatcacttgagatcaggggtttgagaccagcatggccaacatggtgaaaccccatctctactgaatacaaaaattatctgggcatggtggtacgcacctgtaaccccagctacttgggaagctgaggcaggagaatcacttgaaccctggaggtggaggctgcagtgagccaagatagtgccactgcactccagcctaggtgacagagcaagactccatctcaaaaaaaaaaaagaaaaaagaaaaatggcagatcttaagctgggtcagcttcctgtctggctaggccgtttgcatgggacaaagtgccccagtggctaatgtccatgtcaccaggataatattacattgtccagagagatctgaaccaaagaagattggcacattagctcagaaaatctcattggaacccttgaagtacatgttgttcttttccagtgaccatatagccctgtcaactttatatatttgttagcttgtacaacatgtaacattagccaattcatcgtctagagtctgaaccataagcaatttgctatcctgtgtgttgccttgatggaagaactcgacaagtggacatacgtggattttgcagatatagtgcagacgatgcctttggcaaatcactccagacacatcccttggggaaggtgctgcaggctctgtcgcccctacagatggaagctgacaaggaaaagacgggtccagattggaatccctgggctacatgtgagaacagactggagggtgccagagcggatgggcagacagagaggagggtctttagttctacagtgttgtacagcgcctcactcagggggtggcacaaaggacaggaggaaagagccccagaagcactaacttcatgcatatttttgaccttctcatctcctgggccagcctccctgggtgtggttttgttcagaactggagaacgcgcctgaattttttaaataattgagacagggtcttgtctgctgcccaggctggagtgcaacggcatgatcatagcttagtgcagcatcaaactgctgggctcaagagatcatcctgcctcagccttccaagtagctgggaccacaggcatgctcaccactgtgcttggcttctcttggaattttgttgttgttgttgtatttcttgagacggagtctcactttgttgtccaggctagagtgcaatggcgtggacatgactcactatagccttgacctcctgggctcaagtgattttcccaactcagcctccctagaagctgggatcacagatgcatgctaccgtgctcggctaattgtcttttcaattttttgtagagatggggtcttgccatgttgcccaggctggtcttgaactcttgggctcaagcgatcctcctgtcctggcctcccaaagtgctgggattacagacatgagccactgtgctcagccccctggaatttttgatcagcctcccactttctttctttctttctttctttattagttttattttattttctttttcttttttttcttttttctttttttttcttttttttttttgtgacggagtctcactctgttgcccaggctggagtgcagtggcataatctcggctcactgcaacctccaccttccaggttcaagcgattctcctgcctcagcctcccgagtagctaggactacaggcatgcaccaccacacccaggtaatttttgtatatttattagagatggggtttcactattttgaccaggctggtcttaaactcctgacctcaggtgatctgcctgccttggcctcccaaagtgctgggtttacagacgtgagccaccatgcccagccctcccactttcatagtaacctgatcaagttctttccatcctcccctgtaaacaacttcctcttgaccatagtcatataattgctacctgtaccaagaaaggagccatgcattttgccactatgatctcattgaatctttataataacccttgtgataatctctagtcaatgttggctgtgtaaacccagcaacaggctcagagggatgtagtagcatgctctaggtcacacagctggcaagtgggtcagcttggatatgaatgcagcattttttttttttttttttggagatggagtcttgctctgtcgccgaggctggagggcaaatggtgcgatcttggctcactgcaaccttcacttcccaggttcaaggggttctcctgtctcagcctccctagtagctgggattacaggtgtgtgccaccatgcccacctaatttttgtattttagtagagatgaggtttcaccatgttgaccaggctggtctcgaactcctgacctcaggtgatctacccgcctcggcctcccaaagtgctgggattataggccccgagcactctttgactttgaagttcacattcccatcaagaacactcaatgaagaccaagcagtcagtccagcaggtggtggggttgctttttccttttgacagtttggaatgatcccttttggtttctgagtttttgggtcactcagtccttttcttcattcaataaaccttcctgaggccaggcctcttgcaggtggtggggctgcaaggtttgcgacctggaagagctcacagtctgctccaggacacagacccatagcaaggtgcaacaatctacaatatgataaatatagatggtggagtgggtgggttctgtgggaaccctctgctttccatgggctggaatgcctgagctggattataataggagaagtaggcactgactgggtagagatagggaggacagacattctaggaagagtaaacagtgtgtgcaaattcctggggcatgatagagcttggtggacttgggagacctggttgtatggtggtgcttgggcgggggcagtctcagctgactgggactagggtgtgaaggaccccagtgaagattgcagactgggctattcatgttcttaagatttactgagcacttcctcatgagccagtctttgtgctaggtatttcccagaaaggatgaccaggttattaaaatacggaaactgaagttcagagtaggactgggttttatgtggcctcccaccatgactctctgcaccttaaaaaaaaaaagtgatgaagaataaaacaaacactgtgtgtctcctatcctggtcaagaaataaaaccaagcatgagcatggtggcttatacctgtaatcccagcactttaggaggccgaagcaggaggatcgtttgggcccaggagtttgagaccagtgtgggcaacatagtgagaccttatctctacaacaaacaaacaaacaaacaaaaattagcccgccatggtggcgtgtgcctgtagtcctagctactcaggatgctgaggtgggagaatcccttgatcctgggaggttgaggctgcagtgagttatcattatgctactgcactccagcctggttgaaagagagaggtgctgtctcaaaaaaaaaaaaagaaaagaagaagaagaaagaaagaaagaaaaccttactaagatgtgtgaatgtgtgaagctccttcctattaaacatctccctctatccagaggtaaaaactttgcagaatggtgtatttatcattcctctgaatgtctttatacttttaccatatctgtgcattcctatggaatatatggtattctgttcggcatgtttaaagaatctatatgaaggctgggcatagcggctcatgccaccagtcacgtagtttgtggaattacaggaatagaacttgaagccagggtaggcacagtggctcacatctgtaatcccaacactttgtttgggaggctggggcgggaggatcgcttgagtccaggagtttgagaccagcctggccaacatagagagacccctctctctacaaataaaaatattaggccaggcgcggtggctcatgcctgtaatcccagcactttaggaggccgaggcaggtggatcacctgaggcggggagttcgagaccagtctgaccaacatggagaaaccctgtctctattaaaaaatacaaaataatacaaaattagctgggcatggtggcgcatgcctgtaatctcagctactcgggagactgagacaggagaatctcttgaacccaggagacagaggttgcggtgaactgagatcgtgccattgcactccagcctgggcaataagagtgaaactccatctcaaaaaaataaaaaacaaacaaacaaacaaaaaactagctgcatgtggtgccactgcacctgtggtcccagctactcagaaggctgtggtggtagtattacctgagcacaggagttcgaggccgcagtgagctatgatagcgccactgcactccatcctgggtgacagagcaagcctctgtctcaaaacaaaacaaaactatatgaatgatattatagaaatttgatgttctgcaacatgttctccctccccttatttgagatttgagattcataatgaatttctaatcatttatttttgctgcagtatagaattttgctgactaccccacaatttgtttatgcattcttcctctgatagggatggaggctgtttcaaattccttactagtattatcattattgcaatgagcaagaggttctctatgtcaagactctgggtcactggggtatgtgcacttcgacatttctagatgctgccaaattgtttcccagagtggctctacccatttccactcctgcctgcagcacaggacagttctccagactccaggtccctactgtcccacttctttgtttttgcaccaatctgacaggcatgaagtggcactttactgggattttgttttatatttctctgattactagtgagactgaccatctttgcatatgtttattggccattcatgtttctttttctgtgaattgcctgttcatatattttgcccaatctcctattgcctctttagcacattggtttgtggaaggcctttgtatattttggatattatattgtaaatatcatcttttgataaacagaagttttgaattttaattaaatgtattgatgtttttcttgatgatttatgcttttgaggtcttctttaagacatccttgactattatgagttttttttgtgtgtgtaagttttcagtacacctggaactgatcttttatgcatggtgtgaggtagggattcagctcatcttttactaatatggacattctattgctctagcaccatttatagaaaagtccacccttctcccactgacctgcagggccatctctgctacatatcaagtttccatacctgtatgggtcaatttttgcagcctctattctagtccactggccaatttatctacccttgggctaataccagatgctgtgattgtacattttggggtccttagcacctcctctctcgaattagaggagtgctagtgacttcctgagagtagaaacttgtgttcacctttgcagctctctcatcacgttttacatgaacatctacataatgcttttgtttacaaaaggatttcttgcatactatctcttggagttctaaaactccctttttgcagaagataaaactgaggcagaaggtaaaactgagaagataaaacagaggtaagatgatttgccaaggtcgcacagccagaaagtgttggattaggggttctataagatttcaaagccaccctgtgcatccatcgcatatgctccgaagacttccactgaccctggtatcggatttcactccttcctgccttcattcaacaagtagctcctgagtgatgaccgtgccagcttctggtgggtgctggggctgagaccccatttctgggaggctcttcccagtgctggagaccggtgggaagggtgagacagtagatggacattttatgggacatcgtctgcggcttggcatcagcatcaagtcgcgccaggtttcagagccaatttaaagagccccatttttggcgtgcagttgggcccaggcgctgtcttcagagaggacgctggcttccccctggaattacaggcgtcctcccgccctcccgcctcgagaggcaggaatgcgaaggatcagctttcagcagagctccggctgccgttcggggagttcaccgtgcaggcccgtccccagcggccgaattaactggttctgtctgtacgactgggagagcagctctcgctaaaaatagcgccctgcccagctcgacctgcgagccgccgttggattctgagccgggacggctcaaggagccgggagccctgcacacccctcaccccgggcctggcccgggaccgaccacggaggcggaggccgcgggcaccgcgctggccccacaggtgccgcggagggtggcaggcccgctggccgaggcactgccgaggccgtccgagatgggagctggcggtgcctccttccgcgccctcgcctgggcctccctgcccctgctggggcctccagcctgcgcgctctgcgaggacacgctctgctgcggaggtaaggccgtgcgcctccaggcgcgccctcgccctacgcgggcacttgcccggggcctgtttctcctccttggccccagatccgcgactggcggcaaggtgaggacgaacacaggcatccgcgtagggctgggaaaaggaggcaggagctctcagcaaacccacctttagctggaaaacgtcgctgtcccgccaccacggtccgaaaagcgttcgccccgctctggcctcagtgtgcctatctgggaaatgggtcaataagatagtcacgctttaatattcagtcacgcttgctgaagcgggtcgcagacgttcgcgggacgttccctccagccagctggagtcctcgggagtttctgttggtgggagtgctggggtgccttccctgtgacaccccgcactgtccccttcccaagctctagttccccccattagtccccggctcctgaggttggagatccacgcagggcgcacataaaagtttaaggggtcagcggatgcgggaagattctagcgggaaggggagctgtagggtggaagagggataagtaaagcaaagtcgcggcccactcctcggtcccgtaccctcatagcgccgaaacggaagcagaggttatctctggactcctggaggcctggggactccgggaggggagggggcgtgtggtcccgccggcatctcgggccggcaccaggctggggagcgtgtgctcggagcggagggcctcggctctgcccagtccggcctgggcggggcggtggtggggaggtcgattgaccaaacaggtgcgcccccgcccctctgctccccgcccgcgctgggtcccgggcctggcgggcggagctgtgggcggctgggcctgcgattggcagggctgggcaggccgggtggccgcgggagcccgggagccgtagagcggcggcgccgggggaggcgcggagccggccgtagcgcgctcctgcctggccagccgcctactccgcccgccccgctccactcggcccagctggcgcgaaggaaactttcctgcagccgcccggcgacaccgcgactccgccgcttcgcaaccctggccctgggccgctcaggctccggagcctttgggatggcagcgcccagcggcccggcccgcgcgtagaggtaaaagctgggggccgcggctcaggtggaggggggctcggtggtttgccgggatccgagcggcatcccgggttcgagaggatccgggggctccgatgcgaggtgttggggtaggggactgaggaatgggcggcgactttgctttatttaccccgcttttcccctacagtcccctctcccgcaaggaaatctgcgcgatgcattgagcctttaaactttcctgtgcgccctgcccagatctcgaccgccgggacccagggctggcgctgggttcttgggagagtacaatacaggggatcgcgaggaaggcgcccccagctggggcccgcgggcggcgggagttgggggtggggggtgccagcctaccgatccccaaggcttccagcggtctcccaaacttcagaccttcctcagctcaccctgggaattggtgatagggcagccaaccaaacctctttatccagagccaggcaccccctggggcacccaagttttgggtgtttttgttcaatcctggccaatcctaaattatcagggaggcgattggcagggctgggtcgttgaagtgaggtctcttttccgtttcctgggctgctctggaccccaccttccgtgaaaacaccttgggctaagcagagtgggaacagggaccaacgccacctgcttccagtgctcagcctggtgggaatgactgcagggtgttctggtctcaggatggtccactcttgagctatctggtgtgagccatatggaaactcctctccctctggccccttctgctattaaggagggaaattttaccttaattttgattgtgagtgggtgagtaggtagcttgtcaccaataaggaccaatctttaacattagtcctccttaatgttaactcctttccgtgttttactgacccaggacagaatacctaagagtaaaaaaatggaaccaaacacctagctctggagcccagggaatctgggttccaacatcagcccctgctgctcactagctgtgtatctgtgggcaggtttcctaacctctcagagctcaagggtcccgtccaagggggatatagggaggttttttcgaggtgaggcgtagaaggcgcctggctcgtaggacagccatcttaagcagccgatctataccctggagcctgtgccctcttgctgtctgagagagccagcatccttgtgcctcagtttcctctcccccagaaagttggtaaggaccagcccctcttaatcagcccttttgagaaaagtgcacagatgcacacacccacaatttcagtgggtttgtaggctcaggtttaaacagcctcacacattcttatccctgcaatgaactattcagaatgtacaaggcttctgtctatcttgatctttccccctttccccaccccttttagacacctggaggtaactattgtaaatggcaaggaagagcaaatgaactaaataaccagcatgatggggaaaagggctgacctgcagaacctggcccaaagtcaccttcaagatcacctggccctcctatccccgcattcttccttccctggtgctgtgtccccacttggtgaacatctagtcttttttgctaggatcctctagtgacggtgagttcactagacagttggtttcatgattgggaaactcttggtttcatgattgagcaacattcttcctgtttgggacagaaatctttgtctctatgacttctatccactggttctggaacaacccttggggcatttcttactgtctcaattattcactgtggtcccctggtgcctggcattctgttccgtcccttcagcattcaacacacaggcactgaggttggtaatgatcatagcactatttattgagtgtttattatatgccagaccctgccctgaggactttacacatattattttcttgcacccataaaacaaacccatgaggttgattattttcttatccttattttgcatataagaaacaggtttagagaggttaagggacttacccaagatcctacaactggtaaggggctggctgggctgtgcaccaaactcagcatctgtatctgtctttagagcacatgcttcgcttttgatccttgcttgcatacatgcctttgtgtgtgtgtgtgtgtgtgcgcgtgcgtgtgtgctcctgggactggtgtgtgccagcaatgcttttatcacaagcacctagagcacctgttaaaatgcagatccctcatctctactccaggcctgggatctccactttaaaccacccgccactcccactcccccccaacccaggccattttcctgcaggtcacagttcgaggaccatagcactaaggtactcttaggaagagaacgtggaatatagttttcaacagatctgaatttagtcttggcttcactctctggagctggttactcttcctttctagggctttctcccaacttaagatgggtatgctgttccacccactggtgggtggaatggagcaggcccttggctgacgggagccctggtgaagtttctcctgccacaagtggatgtacttgcgggcagacctgtggcacccccaagatcactggcctctgctttctaggattggtgtgccttagacgaggccctcgtgctcaggttattatattttggagacagggtctcactctgtcatccaggctggagtgtagtggtactatcatagctcactaaggcctcaaactcctgtgctccagtgatcctcccacctcagcctctttagtaactgcgactacaggcacatgccaccatgctcagccaatttttaaatttgttttgttttgttttgttttttgagatggagtctccctctgtcacccaggctggagtgcagtggcgtgatctcggctcactgcaagctccacctcctgggttcacgccattctcctgcctcagcctcccaagtagctgggactacaggcgcccgccaccacgcccggctaattttttgtatttttagtggagacagggtttcactgtgttagccaggatggccttgatctcctgacctcgtgatccgcccacctcggcctcccaaagtactgggattacaggcgtgagccaccgcgcctggccaattttttaatttttagtagagatgaagtcttgctatgttgctcaggatggtcttgatctcctaagttcctgatgctcctgcctcagcctcccaaagtgctgggattgtaggcatgagccactgtacccagcctctgctcagttttttcacccagagtggtgaggaccctggaggggttggcagaaacctctccctcccctcaacaccttcttcctccatcctcctactgtggcctctggccctcccagccagaaggtgctgggcctgcatctcgcggggagaggagcggggtggttctgttgtgcgtctatctatgttttcaatctccatcccttcccttggaagaccgctctgtgggccattgggcagctttggggaaatgtctggcccgaggctgcctggcctgggctgactcactaggagagatacagggtggaggaatcgcctgcatagaccccagctgtatcacaattctggcctaccagctgtgctgcagacagggtgcttgttctgccttggacctatttgatcctgctgaaagcacaaattattaaacacccattttatgaaagaggtcactggagtccaggaaactgcagtgacgtgtccaaagccctaatgtgtgtatgtgggcaggggagggagcggtgataagagtcaggacctaaatccaggtgccttgacaataaggcactctggccttttttgcagtcttgttcatgcctcactatttttctgccctatctggttgtggctttggtgccagagccctcacctggaagcttgaagacctgggccacgatcaggctgtgtgatcttgggcagggctggtcatctcttaaaacgttaggtttcttttctgtaaaggggctgaaggtggggctttttgtccagatctctgaggttctttcccaccttgacatttacaagttgggctctgtctgcatttcctgtctgggtttctagggagaggtattcatgatgggctcagggcatgggtgaggggttgagttgggctggagggcagagtgctccatgggaattactatgaaaggggccagaaaggctcttatgggaatggtggccagtggggccaggacacctgggggcagtccagagggggacaggtagtggaggaagcccagggaagggggaggtcacttaccttagaattacacagtgttttgcaccctgatccttgcaagaaggtgatggtgggaatgactgggggtcaagggcaggagccaagggggagcgtgggggcactagggccaaccccactgcaggccctctcagccctgggtagtcttgaccaggagacaagggggacatgtaagagccttgtctcccttccaagccatcacatgtctctcctctgggcttcctcagcctttcctgaatctgacctgaacggttctaacctctccctggggcgagcagctggctgagggggtccagctgcctgtttcccatcccaggtgggcctccagcaacccagcttcctacagtagcccttagtaaccacagcctctgctggccacttactgtcatgtgagtgacttcctgttaaccacgagatcaaagccaagctccctggcctggcaaacacggccccatgtctggctccagttttcctccctgcctcttctttctctgctcttcaggttttatgttgcctggacttggcctgtgacttccagaatgcccttttctctctgccactgcttactgcccaaattcttcctgcccctctgggtgtagcaccaatttcacctccatttgttctcattgcccccctaagggtgagccgttcctccgggcttgtagctctttcttactaactgccctgctttgcctgtcgttgtccgctgcctgtcccccgtgatgggctctgggctttagaaattgctctagtgaatgccctagtgaatgcttggaaagctttgtagagttggactagctttgaatcaggcatgatttttccactcctgctccaactgccgtgcctgcacccccctcctcaacagagtcaagtggagagcctcgcagtctgctctgggcagggctggctctagcaagggacagaagagagatgcctttggtttgcagagaacttctctgcctcatttggatttttgttttgttttgttttgtttttaattgagacacggtctccttctgtcgcccaggctggagtgcagtggcgcgatcttgactcactgcaacctccgccttccaggctcaaatgatcctcccacctcagcctcccaagtagttgggactacaggtgctcgccaccatgcccagctaatttttgtatttttttgtagagacagggtttccccatgtttcccaagctggtctcgaactcctgagctcaagtgatccacccgcctcaggctcccaaagtgttgattacaggcatgagccaccatgcccggtcccatcatttggattgttcttgatctgcttcttaaaaaaaactttattctggctgtgtggcatcaagggggaccggcctaaaagcaggttagggaaagccacctgtcagtgtcagtccccacctgcaggctgaatttcaggtctcaaatgagaatagccaaattcacctgcttctttagaattattgttggttttttttgagacagggtctcactctgtcactcatgctggagtgcagtggcatgatcttggctgactgcaacctccacctcctgggctcaagtgatcctcccaccttagcctccctagagtatctgggactacaggcgcttgccgtcatgcctggctaatttaaaaatttttcttcttgtagagatgaggtctcactatattgcgcaggctggtcttgaactcctaggctcaagcaatcctcccaccttggcctcccaaagtgctggggttgtatgcatgagccaccgcacctggcttctttagcattttcttaagagtgtttaaaaagtacttgtgaagggcctgtgggggttattgggattgtgtcgggggcccacagacatggtccccacagacatgaacatcgaggagtcacataactgttctggggttgcacagttatttgtggccagaaagtccacagaaacatctgtccctgagttcagagagggctgttgagtctcagaggccaaaagggaaagaaaaaaatgaggaccaaaaatatatactaaggttgggtgtgctggctcacgcctgtgatcccagcagtttgggaagccaaggcgggggatcacctgaggtcaggagttcaagaccagcctggtcaacatggtgaaaccccgtctgtaataaaaatacaaaaagaaaaaaaaataaagaaagaaattagccaggtgtggtggtgcatgcctgtaatcccagctactcaggaggctgaggcaggagaattgcttgaacccaagaggtggaggttgcagtgacctgagatggcaccactgcactccagcctgggtgacagagtgagattctgtctcaataataataataataataatgtatgctacagcacaaagcatttatatcacactttctggtgtgcaaggtgctttctgcagagggtcccctcccagtccccctgtgactttctgctgaggaaaccaaggctctgagaaacacagctcagctcccatggctggaaggatgcagctcaggacttccctgactcccctcactccaggtccagtgctcacgggcagggctcagagtggctgttggaaggaggctctccttattgacggctcccaattcagagtgaggatttttttttctttgacattcttgtgttgggatcattttccctgttaccatcattggatgagtgtgaactcaggcagtggggggtgagggaggtgggaccagggagaatggcagcgttctttgttttttgtttttttttttttcttgagatggagtctcgctctgttgcccaggctggagtgcagtagcgtgatctcagctcactgcaacctctgcctcctgggttcatgcagttctcctgtctcagcctcccgagtagttgggactacaggtgcatgccaccatgcctggctaattttcatatttttagtagagacagggtttcaccatattggtcaggctggtctcaaactcctgaccttaagtgatccacccacctgggcctcccaaagtgctgggattataggcatgagccaccatgcctggccggcagtgttcttatgaacgtagagaacacctgcgcagatgggtcaggtgaccaggtcagagatctctgtcctgaagtaggaagccccctgtccttgtaggtgacagtggctgatacctagtaaagactcatcttggagtgaggtctgatggatgctagggtactggagggagaggagagagattgatgatggtctggttttatgttcacatactcctatcattcctttgggtttttcttatttttttgagatggtgtcttgctctgttacccaggctggagtgcagtgccacaatcatggctcactgtagcttgaactcctgggctcaagcaatcctcccatctgagcctccaaagtagctgggactgcaggcaagcaccaccatgcccagctaatttttttattttttgtagagatggggtcttgctgtgttgtccaggctggcgaactcctggcctcaagcaatcctcccacttaagcaatcttcccactttggcctcccaaagtgctgagattacagacatgagtcaccaccccatcgttcctttgttgcttcctgtcctacttactattgccttatcagtttatctgtctctgcccctgcccctgtccttagacagaggcatcctagcacaggtgcctcatggttttcccctctgggtgaccctggagcaagaccaacctcttaagaggggaggggagggaatgtgaataagtaaataaataagcagatgaatgagggactcttctcagcatctttggtgaccctgtctgactatcactggctgtagaatgtgtgacaactgagtctaccaggcaacggctgtttgccgggagcagcaggacccagccagaagacataatggaagcaggccctggccagagcagggacctcagagcctttcccggcagagggaacgcaatcaaagctggcgctgcttccgggaggagagaattcccaaaaggctctgtcagcccctctgatagggatctgcagggtgtgtgagagatttgtttttcagccaggatgtggggagttaaaaatagacaccctaatcccttgagttcgtgtcacacttgacgctgtgcagagccctatggctccattatctcacttgagtggctcggcagcctttgacgtggggagaggttgcactgcccgctttataaatgagcgtgtggaggtgcgtgcccaatttcttacttgagactgtaccccaaattcagtggcagaacctgtctgatcctcagcccctgaggtctgtgttttatattcttaggagaagccagatgagagtcaacaggctccaggagggaagcgggttggtggaaacaataggggtagatttttaagcaaagcagcaaggatggcagggagactgagaatgaattgaggtcccagggagcaaaggctcatgatgggcttggggagcagccgaggactgtaactggttggagcaggagttgggggggtaaggtagtgatgggaataaagcagaaaagtaccatcaggaccccaaatcgaggacctagaatgctatgataaggatagtgaacataaagctgtaggcaatagggagccattgaggattacagagcacagtagcttcctgctgtaacaaccatgcattgcaatgatgtgctaactggctttgctgtaggtattactttatggtgtttgacagaatatatattttttaaaccctcagaagacacctgtccatcctgacctctccttatggaaccttgcatcgtgctagggggagcaccccgttttctgctgcctcttggtttggggaggagccccctctggggcaaagtctgtaactaggtttctcggctttttctagtttttgtttgtttgtttgtttgtttgtttgtttttgagacagcgtctcgctctgtcgcccaggctagagtgcagtggcgcaatctcggctcactgcaacctctgcatcccaggttcaagcgattctcctgcctcagcctccctggtagctgggactacaggtgtgtgccatcacggccagctatttttttgtgtgtttttagtagagacggggttttgccatgttggccgggctggtcttgaactcccgacctcaggtgctccgtccgcctcgaactcccaaagtgctgtgattacaggtgtgaggcactgcgcccagccttctagtttttaatctaggtgctcctggttgtccatctgtctgtcttccccatggtgggaggaattaagtgacagggaggaggtagtggctgaagttctagcccgacctgactcattgaaacttttacaggctgtctagtgcatctgacaccctgccactgacaagctcccagaccaccaggatcagttttctccacttctcacttccatccctcccgctttgggacccccattcggctcccaacttctccaggcatcctgcactgattgttccagcaacactgaccttttctgtacattttagtgcccatggccctctaacttgtatgtttattaactctttgctccttccctagctaggccaaggcccctggtgggcaggacaggagctaagcaagatgtaagctggacagaccattggaaatcttctggtgcgatctatccattttagaattagggggatagaggcctgggtttgcctaaaacttcatgacaagttcctggcagagctgggattcaaacctggatctccagggctatcttggtccttggctgcaacatcacccacttctcagagccaccctgcttctcagctccaagagccaagaattcccagctctgcaagaatcccagttttgcagccttggctcctcctggggctgggagccagcaacgccaagcctgcaggttcccagagagggctcctggcgtcggtgtggcttagtcacagggatgagatcactactcacctctggataggggaggatgccaaggtttgggaactttcactctgagctacttgattttgtgtatgtgtgtgtgtgtgtgtgtgtgtataagaaaaacaaaccttttggttgggactttgtacttggctcatgaactgtgggcttggggaagctgctgagccatgataagcacttgtactgtgccatctcacagcttcccaggatagtggctctgtgttaggaaggagcttggaccagagccagaacctggtgttagcatttgctctgcctcacattggctgtgtgaccctgagtacggtgcatggcctctctgggctgtaatgataatacctagcagctcacactttctgagtacttcccatggaccagccactcggctcatcagcccatttagttctcacaatagacctgtgagatcctgttttcacctctgttttgcagatgaggaaactgagtcccagagaggaggagtgacttgcctaaggtcacccagctgggaagggcagagccagggttggaatgcaggtcttcccaactccaaagcctctcgtgtcaggcactctgctgccctgccctctagctgcagggctacctcctaagggattgtggaagtgtaagtatggagaaaccaggtgtaattcagcacgtgaggggtgggaaggtgatggatgaagggtctttttctacgctgatatcgttctccatctccccactgtccttgagtagtgctgtccttgaatagtcagaggggggcgcagaggagagcaggtacagcggtatgcaggctccatgagaggaagggcgtatttgaagatggtttcacggaccgccagtcctgggcccatctctttccaccccctgtaggtcactggctttgtgaatgttgattgtaattcctttcccatcctcccctagaaggtatcttcaaggcaggggctcgctaagggatttccttttgagtggagtgaccataagatttgtttgtttgtttgtttgtttttgagacagagtctcactccatcacccatgctggagtgagtggtgcaatcttggctcactgcaacctctgcttcctgggttcaagcaattctcctgcctgagccccctgagtagctgggattacaggtgcctgccaccacgcccggctaattgtaatttttagtagaaactagattttgccatgttggccaggctggtctcgaactcctgacttcaagtgatctggctgcctcagcctcccaaagtgttgggattacaggcatgagctgccatgcctggccttgaccataggttttgattcagatttggaacagaaatctgttgatggccactgaatcctgggcttggagtaggagctaggggaagcaccaagtaactcgttcccaccccaaggaagctgagtacagcagacaggctaagggtgtgtgtgtggtctaaggtccatcagacagacctggctttgggttctggctgctctacctaccagctgtttgaccttggacaaagttatcttatttctctgatcctcagtattcttaactataaattgcggataataatacctattttttagggctgttattatattattattattttttaattttttgagacagggtctcactttgttgcccaggctggagtgcagtggtgtgatttcggctcactgcaacctctgcctcctgggttcaagtgattctcctgcctcaacctcctgagtagctaggattataggtgtgtgccaccacagtcagctaatttttgtatttttagtagagacagggtttcaccatgtttgccagggtggtctcaaactcctggcctcaagtgatccacctgcctcggcctcccaaagtgctgggattacaggcatgagccactgtgcccagcctagattaaaattatacgtgcaaagaaagaacacagtacagtgtctgcacatcataaacatttaataaatgctgcagttttgttattacttattatttgcattattattactgatggtcttcttaatgcactttatagcagtcttgggatcctctggccatacccctttccagaacttactgcctttggtgaaggtagttctgggtaggggaagatctgaattaaagagtcaatctaccagcctgggaaacatagcaaaaccctgtctctacaaaaaaaaaaaaattacctggggctggtggtgtgtgcctgtagtcccagctactctggaggctgaggtgggaggatcgcttaagtccgggaggaggttgaggctgcagcgagccggagccgtgatcgtaccactgcactcccactttggtagcagagtgagaccctgcctcaaaaaaaaattattatttttaatgtgaatgatttttctcttggagatacacagggtctcaaattggccaaaaaaggtgtctgaacatgggtttttaagggagctgctttgatgaatagagaaaggggataatagagaaaaagatttctttaaggtgcttgaaatttatcttttgcatggtatccacagtccccgtgagcttgtttctgctgtgtaagtcaccggggtgagtgtctgttgaagcaggcatgcggggtaaaggtggggcagggcggaactccaacaagtctcagctgctgctcctccctctctcccttccgagaaccgccagggtcctccttagagagagagcctgctcagcctttggggaagccacaaattggtgaagttgctgtagacagcagtgtgtgtgtgtttgtgtgttgtgtgtacgtgttggtggggggaggtaagaggtcaagtgggtttcccagaggaagaaaggctagagccaggcccaggaggacaactgctcaggtttctgcaaacaggattgcaaaatcacttttcccgagcttacccagttctccatcggagtcttgcagccaggtcagctgggagcccccaagcttggcagttaggacacttggggaggtgtggggaggggggatgtcaaatcctgcctcagtttccccatttgtcctggctattcctagagccccatttatctaggctatgctttcggacaggaaacagagggatgtggaaggagaagatgcaggtttgggataagagttgagtctgtcacttcccactgtgtgccctcaggcaggtccttctgcagctgcctgggctcctcagtgttttgaggcttcggtgaggtaatgtgtgtaaagtgcttagcacagagctggcatgaagtagtgtctgtaattataaaccaccttggccactgttgtttttagcttgggacccaccttaccccgacctgactgcccttgcctcttgccttccctggagttcctgtttgttgttgacatcctcctcaccaactagtgcagggatttttaaagtatttatatccttgctggaatttctctttgcattgtttagttaattaccaaattgaattgcggcaaataatttcacttcctttccagtgctagggcaggaagtggcccggtgccttttttttactgtgattgagatgattattgagatatttgatgatgatgatgtctccttcccctgagaggttcgcttcctcttagatcagctccactggccccataaatcaaggcagcagccacgtgcttggaacataaatcttgtcgaggatgttgatgtgtttggccacatgtggtttttggtgtttgggcaacttctcgcaaactcgcggagggatagttgaaaaggctccctttaaatacagaacaaatgacctgtgcacttattggagaagtgctgggatagttgaaaagactccttttaaatattcagaacaaatgacctatgcacttgttggagaaattctgtccaatggcatacaaattaaaaatcaaggcacagggagaagtcttcagatggcaagaaatcagtggctcttctccgcagcttgatagtgttgatggtgttggcttctgccctgtccctcatggctctagggtggagaagcagattggataaagacatggggttgaaactgatgtgctggggggcttcagatccctgccctgccacttagtagctgcaggaattaactgcggccacttaattttcctgggttctaaaacaaaggatacaagataaccggcttcataggtctatgttgtaatagttttgcttcacacaatgcctggcacatggtaagcactggtaagtaagccattacttttaactcagggatcctcatcgtgttctttacccaaagacccttcccatcctacctttctagccttgacctccttcttgcaagatgataaccaggacctaatgtgtccaggactctcccacctttgcacttctttcttttctttttttttttttttttttttgagagggagtctcgctctgttgccgaggctggagtgcaatggcatggtttcggctcactgcaacctctgcctcctaggttcaagtgattctcctgcctcagcctcccaagtagctgggattacaggcatgtgccaccatgcctggctaatttttgtattttcagtagagacggggtttcactatgttggccatgctggtctcaaactcctgatctcatgatccacctgcctcagcctcccaaagtgctgggattacaggcgtgagccactgcgcccggccccacctctgcaattctgttgtgcggtttctactatttggaacatcccctatttggtctctgcccatagaatcctttctttttctttctttctttctttcttttttttttttttgagatggagtcttgctctattgtccaggctggagtgcagtgttgcgatcttggctcacagcaacctctgcctcccaggttcaagcgattctcctgcctcagccttctgagtagctgggactataggggtgcaccaccgcgttcggctactttttgtatttttagtagagacagggtttcgtcctgttggccaggctggtcttgaactcctgacctcaggtgatccacgagcctcggcctcccaaagtgctggtattacaggtgtgagccaccgtgctgggcctcttttcctttcagaagttatctcaagcactgtgccctccatgaaatttcctatggcccctcaaccttaactgccttagtgtatccttgttacgccttatgtctgcaatagttgtcggcccaagtatgttccatggaatggtaacctggtaagatgctttgtagaaaagaaggttaagaaaaggctgctgaatactttatgtacctgttttgtatagtaccaatccatatgaacaattttaaaggttctgagaaatcctgcagtaaagaaacctgctgagatttgtttactccagaactttccaaacctctgactgtagaacactttcttcttggaatgcctattgataagctttgcgacactcctggagaggtggcgttgtagacatctatataacagtttgatgctatctcctcttataatgaaggaaaccaaagcccagagaactcagtgactagcctcaggtaaatcccagtgtctaccactccatcacctcttgggtcaattggcaggtcctttataatgagtgtccaaggctgggtggcaaggaagggctggacatggtagccaaggacctgctttcaaataactttctttctttttttttttttttgagacagtctcactttgttgcccaggccagagtgcagtggcacaatctcagctcactgcaaccttggcctccctggttcaagcgattctcctgcctcagcctcccgagtagctgggattacaggtgcgcaccaccatgcccggctaattttatatttttagtagagacagggcctcaccatattgaccaggctggtctcgaactcctggtctcaagtgatccacctcccttggcctcccaaagtgctgggattacaggtgtgagccactgtgcccggcctcaaagatcttttggccttgtcgaggtggcgagatggacatatggaatagagacagattaactgctaatcttgtgtccctgggcccatgtgtaacaggagccttgggaccctgttgtgtccctgcccaagaagggacatgagagtcaaatgtcctttgagaacccagccctgtccctgggcctgggaccccaaaattcgaccccaccttcctcccaccctgatccctggggattcctgtggccctatgtggttgcctcctgcaggatgcaggcgagggaggggcgggaaggctgcagggaagagaagagccttctgtttattgaggcacagccttctcctgcctttctgggggaaaatgctctcttttagagtcctcttttttatctgaaattctctggggagcaattacctgacagtgggaattatctgctgtctttattctagtgcctgtctgcctgagttccttcttggagtaattgattttggtaattcagagcttctgaacgtttcttaggggaaggtgtgggtgcagaggcagggggatacccacataggcgtttttaaaggcgttggcggctagcggctctgctggtggtagttggtgacagggatggaacagtgactaaaaagaatgtattttttagctttgaatttttccccacttatacggaaggtgtgtgggttgcatgggagcgctcctgactgtggaactggggcgggtttgctgaagggaagtaaggagttgaaaggcaaattgtcaggtctgatgggcttgatcactcttcgccacaggcaggtcagtcctgagtaccggccctggcccgaccctggccctcaccatcaacctttggtctgccagggagcctgggaggtggcagaaactccttggagagcctttaaagagagcagcggctcccagttggcttgacctttctgctgggcagaccgaggtactggctccagaccctgctgccccaggcactgctgtcccctgggagaagagggctggccagggcacctggcttaatagggggacagagaaggtcatgaagggtggacctcagggtgaggggcctgggtgactggagaggtttatctgttccgtgaataaaaagggagtagggtggccaggcacgctggctcatgcctgtaatcccagcactctgggaggccgaggtgagcagatcacctgaggtcaggaggtcgagaccagcctggtgaaaccctatctctactaaaagtacaaaaattagccaggcatggtggcacgcgcctgtaatcccagctactcaggaagctgaggtgggagaatgcttgaacccaggaggtggaggttgcagtgagccgagattgggccactgcactccagcctgagcaacagagcaagactctgtctcaaaaacaaaacaaaacaaaagggtgaggggagtagcgagtaaatttgctcctagaaatgctcccctagctaattccccaatttcaaatgagtgaatactctggatatgggaggaagagcttggactagaagcttcctcaggctctctcatctcaagcgttctgtgggagggacagcccaatacagcggtttccgtggagtctctcttctctgcacctcacccaagggaaaggaacctgtggggcactggtttgggtccagccccagaggcagcctgtcctttgtcatagtgaccaccctccccgctgaggtctggacactgcagctccattccatggccttcggcctggtgttacttggcattttcattcctattttacagatgaggaaatcgaggcccagggtgattggttcacaccatgagttaacagtggggcaaggcctcatacccagtctcctgatagctggtccaggattcctgtgagcctgaatggggggtcaggagctcatcagatgcccagtggaagagcggggtgcgtactcacgtgggaggggagccggtttctctggttccattgtagctcttagctggattttcaactccatggctggttacttgagtctatgtttaatcacctgctagactgagaagcccctaaaggacagggaccttttgtcacattgggatcaccttttgtggccagctcagtgcttgcatgaggtcagccagggcgctttaggtacaagacagaaggcccccctcaagctggccagagtgaaagggattttatgggctcacctacctaaaaacccaaggaggcccaaatggattacgatgggattatctgtctgtctgtctctctcttcccatttccccccagttctgggttcagtttctccactgagctgggaatggggaaaggggagtccccaagggaaatgagggtgctggccccagaagaaggagggagcagacacaggcaaaaacaacaaaagcctcataaacatacaatgtgcatgtcatgaatggtaaattcaatggatttttttttttttgaggcagagtctcactctgttgtccaggctggagtgcagtggcacaacctcggctgactgcaacctcagcctcccaggtttaagcggttctcctgcctcagcctcctgagtagctgggactacaggcgcccaccacaatgcctagctaatttttgtatttttggtagagagagggtttcgccatgttggccaggctagtctcgaactcctgacctcaggtgagcctcccaaagtgctaggattacaggcatgagtcattgtgtccggccaaattcaatggatttttgtagaaacattttttttttctcccaaaaggaattcacgctgtaggcgtgacatccaggtgcacatcagctcctataactaaacagagcaagccctgtgcattgagaaagattctgaaaccacctcttggctcagcagaaaagagcatcataatcggtttaattatttgtgcctttgccttggtggtgggggtggcggggcaggggctgtgtgtacggcatccctaatctggtcccaattttggtgttgtagaagtacttttaagagttgaaaacaattggattgaacctaaatgatgttgcaagatttccccaaagcttaaagagccaattatgtggttgggagccctttctgaccggctgtgattccatcctaaggactgacagataaattattatgtggaggccgtgatgaagggtgattgttggaaggtgtggctcttggcactctgatggctccagggagagcttcgtgtcctttgtattgttttgtttttgttttgagacaagatctcactctgttgcccaggctggaatgcagtggcgtgatctcagctcactgcaacctctgtctcccaggttcaagcaattctcatgcctcagcctcctgagtagctgggactgcaggtacgcgccaccacatcccgctaatttttgtaatttttgtggagatggggttttaccatgttgcccaggctggtcttgaactcctggcctcaagtgatcctcccatctctgcctcccaaagtgctaggattacaggcgtgagccactgagcctggccttcatatcctttaactgtgacaagagtgagctgcatggcccctgcctgcgctaacggtgtcaacacatatttattcagtgcctaccatgtatcaggcacagttttggggcagattgagataaatttatcccggattatatgtcacacttctgaaagaggagatgttggaaaaggaggtagctcttaagattttttcctagttgggacttggtaagaattgcaaatgtccttacacttgggtggagtatgttgtgatcccagtaatgatttccgggagcgcttgtaaaccacctctggtgtctgaaattccaccattagtgattcattcctttggggtaagcattgccgtttctattaatagcttaggtattaggtactaatgggatactaaatagggatctcattcatcgctaaggcctccttaggtaggaagttattctttgttttttctcccatgacaaggccctaagaagagaacccctatttgggtggagttaaactgggatacaacattgggttggtggtggaagccagagtatgtgcattataagacgtggtgcctgccccacccagagtgctaaacttagcaacagtcaaaaattgtcatcatcaaatcacttttagtggtcattgttctccaagtttggatcctgaaggcagaacaagaactaaaggtccttcccggctctgaccccctgctgcagccttccggatccagccgctcaaatgggcggctccgactcctgctgcctgggccagctgctggaggaagttgctggagccctggccaggcacccctgccctcccacccttcccagctggaggtgtggctgtttgcttccacctgtttactttctggcttctagcagctccttccacactgaaaatgccagccactgaccggtccacaaacgccgaccatccccctgctccacttgcagtggttaaaggtgtgtgtgagctctggagtctgaatgggtttagaatgaggcttgacctgctgagtaactgagctgctctttgctgacattcccatctgtaaaatgggataacagtgctaaccccagtaggttcttggaagtatcagtgaggtagctaatacatatcaggtccctggttaaaggcctggcttataaaaggagctcaatatatgtaaactttgatattatgttattgcttggggccttggccagccaccctgggggggtcctgcccctccagctgccctctcttgccttcccagacactgtgctcttccggtggctcagatgtttctctattgagacttctctgttgacaccgcttgaccctctgaggtcctaacccgggtaccctcctcacctaccagctctcacctgggagccccacccatgcccagggcattaacaacccctgaacctgggctactcccaacacagactgtaaacctcccctgagctcagatggagagaagtgcttttcactggctgctctaaaagcacatcaaccaatccaacatgaaaggcccttcctttctcctaacaaccacttcctctctcgcattcacctgctcccccaggtcccaactttcctctttgaggggaagaccgcactggccagcccctgggacagggaaccacacccaggtgtttccttccttcccttccctttttcctacctgcaagtctggtggttccccttgggcaccatctcctgcaccccatccctgccctcactgcccattaggggacagcccagccacagccccttctggtgcagcttcctgttttctccatgctgcctccagggggagtccctggaccttggtctgaggggtccctcccttgctcaaggtataatcaagtccctgcttgagggactccctattttccctgagatataatccagacttctcagctcggttttcagggcccttcttccaaattccagtaggatcctccttgccaacagttccttcctatgtgctcaggagctcagctgactgaacaacccactccatggcctctacctgttagactgccttgcctgtgtttctcaaagttcccctgcctggtgtgccttcccctcagcccggtgcctgcctgtggatctgatcacattcacaaagcctgcaagggatgtaagtcctcgtgcagtccagtcccctgtctcccatcagaatatcatggctgtttgtatttctttttttccttttttttttttttttttgagaccagtctcattccgttacccaggctggagtgcaatgacacaatcttggctcactgcaacctccacctcccaggttcaagcatttttcaagcaattctcctgcctccgcctcccaagtaggtgggattataagagcatgccaccacacctggctaattttttttttttcgtatttttagtagacatggggtttcaccatattggccaggctggtctcgaactcctgacctcaagtgatctgcctgccttggcctcccaaagtgttgggattacagatgtgagccaccatgcctgaccctgtttgtgtttctttttcttttttctttcttttttttttttttttttttttgagatggagtctcgctctgtcgcccaggctggagtgcagtggcgcgatctcagctcactgcaacctctgcctcctgggctcaagcgattctcctgcctcagcctcctgagtagctgggactacaggcgtgtgccaccacgctcggctaattttttgtatttttagcagagatggagtttcaccgtgttggccacgatggtctcgatttcctgaccttgtgatctgcctgcctcggcctgccaaagctttgggattacaggcgtgagccaccgcacccggccccgtttgtgtttcttaccctccccttggctccttccatagaagcaatactttttgcagtctgggaatctctggggtctacaagagggggatcttgccttctaggaaaactgcctctcaggggcaagatggctgcctccagaagtgtgtgctttgaggaggccaggatggggacctccaatacctgacacagggcagaattctattccttgtgactcactgtctcgaaggttacgtgggttttgtcagatacgctgggctccatggccgggagccctccactgccctcgtgtcggggctctgctttcctgtctctctctcgggaggtaagatttccacttctcagggctggggctgccgggtggattgagcaatggtgtgggtgaaagcaaaacagaagtacacaaactaataattaacagatgtcaattgttaatagctgaaaaataccaccaccaccccaccccctgcccccaggagggaggagagcaaatggtcacttgatcccttggaggagattatttcacagccagcttggggcaggtttggccaagacagtgacaagtactgtggggtatatgggcaagggggatgggaatagtgccattgccagggccactgggctttgacttactttgattcccttgtttaatgctcacagccttaagagtcaagggcagaggcattcctgagaatgagcatgtgggtgcctgggggtgtgcacgtggggcaccctgggtcctatctgccgagtctgagccttgcgccatctctcttaagcaagtgagatgcttacttaagagagcaattttgctctctttctcacctcagttttgcagatgacattggcttgacatgcctgaggtcagccccagattgccaagccggggtcctcgctgtgacacggcatggccagtccctaccctagacccaggtggcagccccaccagatttaacatccaggggtggtgcagggccagtggggactttacctagcttgagaggcctcctctttgaggcagggcaaccccaagggtgggttttaagctttcaggtttaagagttcagttttgttgttgttgttgttcttttggtggggggaatagggtcttgcccttttgcccaggctggagtgcaatggtatgttcactgctcactgcagccttgacctcctgggttcaagtgatcctcccacctcagcctccagagtagctgggactacaagcatgcaccaccacacctgactaattttggtattttttgtagagatgggggtctggctatgttgcccaggctggtcttgaactgctgggcctcaagcggtccacccacctggcctctcaaagtgctgggattacaagcatgaaccaccatgcctggccagggttaaggttgttttgttttgttttgttttgtttttgagatggagtcttgctctattgcccaggttggagtgcagtggtgtgatctcagctcattgccacctccgcctcctgggtccaagtgattctcctgtctcagcatccttagtagctgggattacaggcacatgccaccatgcctggctaatttttgtatttttagtagagatggggttttgccatattgaccaggcgggttaaggttttgagtttacttcacatctgtaagctgcttctctccttcctttgcctccatgtttgtacattttctaatgagagaaaccatccatttgttctctcacctgccttgggcccagcccagttggttctgtctggaccgcagttcccacccctcagccccaagacttggaggtaccttagattcactcctctcctagtgccaccatctcactacctacctgtgcacctgttggccctggctcaggtgtcaccttctccatgaagcagcttttccaggcagagtctatggttgtctgtgccacggacccagcggggctgcccagaggcaggagctggtgttgttcctggtgtccccaggactgaccaggttaacacctggcagcttgtaggagtcacagaggttcgtggcaaggaggaaggcatgcacctgaggagcagggtggagtggtggctgagattgctgaaatagcctacggccaaatccagaccatgccacttacaaaccagccttggacaagtcagatcacttctctgaggctcagtttgctcatctgtaagatggggaggtaaaaatacagtcatgtgccacataatgatatttcggtcaaggacagaccaataaggtccttaagatttaacaccatatttttactgtatttttctgtgtttacatacatgaatatttacaattgtattgcaattgcctacagtattcagtacagtaacatgctgtacaggcttgtatcctgggagcagcaggctacccaccatctagcctaggcgtgcagtaggctacaccatctaggtttgtgcaagtgtactctatgatgttcacacaacaacaaaatcgcctaatgatgcatttctcaggacatatctccatcattatgtaacacacaactgtacctaccttctggaattactgagaaagttaaaagacaggaacgtacatgaagcatttaacacagtgccaggaacgtaagtctcaataagtattcatttctgttgtggggatttagggggctgcgagaagagcacgctgctataaacaggccttcctgggccgggatctcggaggctaagcactcgcactgcctgccccgtccagggcatggatgaggggctgagatggggagggaggggccctgctttggcagtcagcccctctgtgacgtgtccacataacatccataggaagttattgtttttccccatattttacagaggaggaagtagaggctcagagagagaggctcagagaggtgaagtcattcacccctgtcacacagctgggagctgcagtgccaacatagatgctaccaaagtggctgggctttttttttttttttttgagacagagtcactcttgtcgcccaggctggagtgcagtggtgtgatcttggctcactgaagcctctgcctcctgggtttaagcgattcttgcgcctcagcccccgagtagctgagactacaggtgcgcaccatcatacctggtgaactctttttttttttaaattttaatttttacctttttagtagagacaggattttgctatgttagccaggctggtctcaaacttcggacctcaggtgatctgcctgccccggcctcccagagtgctgggattataggcgtgagccaccacgcctggccaatggctgggctttgaatctccctttggcagtgaggtttgggttgcagtgagtaggttttggagtttgggctgatgggatggcaggatcaggagggctttctgctttttttttttttttcccaatgatgccagttctgaactgttgcttcctggggcaccacaggcagggagtctgggccagtctggccttcagccctatttgctgtgacctgtatggtgtgtgtttattttaatatgtgatctagttgtctccattgaacgatcaggattttacatccaaatctggtagcttcttgtaaacttgatcttccggccatcgtgggcccacattccaataggacagtgtgggctggagtgtgttccccatttagcctgcctggccaagcctgcttctctcctttcctttccctcctggctcacattggcatttgcgtttgtgattcctgagccaagtgggctacagggctggggcacacgtggggtatgggccctgggagccccctctgaggagctccctactaagaagggcaggcagaattatgattcaaggcaagatgagtggccccagagagatgtctagacagtgcttggggctttcagaaatgttaatgtgttcagaggagggcatccagtgacttggcacacgtttaatgagctcttgccttgtgcctggcactgggcatccctggaggctgcagagatatattcaggacacagactgtcctcagagagcctgtgtttccgggggtgagggcatccaaaatgggctttcatggagcaggatatttgtgttggtaaaaatgaagatgtgaggcactctgggcagacgagatagtgtagaccaaacttcagacgagaaacctttttttttttttttttgagatggagttttgctctattgaccaggctggagttcagtggtgcgatcttggctcactgcaacctccacctcccgggttcaagtgattctcttgcctcagcctcccgagtagctgggattacaggcatctgccaccatgcccagctaatttttatagttttagtagagacagggtttcaccatgttggctaggctggtctcaaactcctgatctcaggtgatccgcctgcctcagcctcccaaagtgctgggattacaggtgtgagccaccgcgcccagccagaagagaaaccttgacagcaccccctggtttgagctttcggagagtggctcttgctcaagaatgacgaaggcacaggaagattcaacctggagaagcactgactttggaggaaaaggttctcttgtgttttgaatttctaaagacttttaatctattttttaaaaaatagcctttattttttagatcagttttaggttcacagcaaaattgagcagaaagtacgagatcccatctactctctgtgctcacacaagcacagcctcccccaccatcaacatcctgcaccaaaatctgcttcttagtctataaaaatggcatgtcatgattttgtttattaaaaataaaatcaaatattatagactgaaaactaagccttttttcttcacccctactcaacacacacacacacacacactcacacacacacacacacacacacacacaagcatatgtaagaatctatccacccaggagatcatcccacatatcctgaagtatccgatgcatcttcacctcgaagtccacggtgtcggtatacacatttccacctcgcgctgcagaacggtcacacaggattccattttcaggagagactataatttattcaaccaggccccctgtgatggacacagacgttgtttacagttttggtgctttttttttttttgtatgctgcttcaaaccggagtgcataaacatccttgtacatctgttcttacacgcttgtgagagtttatctgaaggatagcatgtagaaggagaatctatgaatttaaaatggacgtttatggatttttaacttttgatccatgttgcctactcactctctgcaaagactgtggctgtgtactctcctggcagcaggatgtgagagtcggtgggtcatgatcttcctgtgtatgaagagcggggctgggctagggctggggcagagttggggtgggcccctggcagcagagtctagccaatgcgtgggaggcatttggagggcatttttctcagtgctgccttgcactttcatgcacatgtatatatccatagaataatatgattctgtttaaatttcttttttaaagtcatgtatcgttctgcaacttgcttctttcgttcagtaagatatttggacacatttttctagttcagctgtagaattccacctcactgtttctatctgctgcgtagaactttctgcagtgtgagattgacttagccacccctccgtgggggttctgcttcagggaacatcctttgtgggtctcgtcaggcttgggtgccagcatccctctgtctgcaggaagcacatttattaggaaagtggtcattgctaagaacgacactgctgttattcctgccatgcacctggagcagaggttgtggttcttgccttggccttgggcttgggcctggcacttctctgagttttctcaagctccatgtgggtgcagtgaatctgctgactttgttcctggagctgagtggagatgctggctcagggcttctcctagctcagagagtggctgtgatgtgattcctagccccccttagtcatcctagcagactggattaggtgggccccccccatcctagtgatcctgaggcagatgcccccctgcccaggtgtgaacagactctgcctctgggtggaagattggcacaagccatgggatcacccatttatcttctagcgagatcttcctccaggtttaaaagagaccctgtagggcacctggtcctggctatgggtgtggtggttggaggtgataaggaaagaacttaggggctgctggtggccactgctgacagcttctgctaagggtgggaggcactggaagacttttgaatctgcagagtgtgggcaatcagggaaggcttcccggaagaggtgggactgggcccagtgggagttttagaatgaagaggcagtgtctctgggctccaaggcatcccctcggcaggggcaggggagggaaagcggggcatgcagagggcctggcaaaccttctttagagaggctctttggctacctgtggttgcaggatgaccacttgatgtccagaaagctactaaaggggagatttggaactggacagactgggctcaaaccctgactctgttgttaccagctgtgccagtcacttaccctctctgagcctcagttacctggtctgtaaaatgtgatgataacagttccttcttcacagggcaagtgggacggtggcttgagctcctgtttggagaactgttggcaccgacctgcaaaaggtgacaggtgtggtcacacctgaaggtaacccaatcacttgcgcctggagtgatggctagagttggccatggtgtctgggtgaggccagagacacttgcctagtagaaccccccagactcagtgatggacccaaggtgctggtgaaggcgacagaaatgatgcgatagattccctttcgctcttgggtcccaccccaggggcccacctcggggccctacctgcaaaaagcagtccctcagggacattggacaggtgaagaggctttgagggcatgacccaagttggaaggcgccctggagtacctggggagaaggaaagcctggccggctgatggcagagggtggtgggggtgacagccaagcttcaggcttggtgcttctctcagaaaatgccaccatagatgatgtccccaagcagcattgggtgtgtcctcatggcgccctttcttcctgggtaattaatggtgctctcatccccctgagagggtggtggtgggtatggcgggctggccgggcaggcgccgggcagacagtcagagcccactccagtcctcctcatccatttattacctgtcagctttgctctttctgaacataaaataagtgcctgggaggcggccagggcccctgaagccccgagctgggctgtctggggcactctggctccagggagtcattccctggaggcttctgctaagctcaccccactgaggggcttcagataagctgggacaaccaggctgtgggcacaggctgggttcctctgtgatgtgactgaggcaggtgggtggagatgcaggactggagaaggtcagggcctcggcagccagctagaggccagaatttgggttctgagacaaatcctcctcttttccctcaaacccccgcctctcagccagggcttcttaaccagggcttccgggacccagtgagtctcaggatggactccagagtgtccaagaactggaataggaaaaaaagaatcccactgttattttcaagaaccattaattagaattacaaatggtaattcctgcaattataaatgtagatgatcaaccacagtggcattagccattctatgatgttgcagaaatcataggaattgcagaaattctcatgtcctattattgtggacctgataataggacatgagatacccagttgtcatgggtatcctaaaataacatttttgttcaccgtacttcaaaattacaatagttattagccccagatcttgttctctaaggcattaataaagaagcacatatattgctatagcattaaaaatatttcgggaggtggaggcaggcagatcacaaggtcaggagtttgagaccagcatggccaacatggtgaaaccctgtctctactaaaaacacaaaaaattagccaggcatggtggcaggtgcctgtaagcccagctacttgggaggctgaggcaggagaattgcttgagcctgggaggtagaggttgtagtgagccaagactgtgccactgcactccagcctggtcaacagagcaagactccatctcataaaaaaattttttttttttttgataaccaggcatgcgccaccacacccggctaatttttgtatttttatttattaatttttaatttttatatatatttttgaatggagtcttgctctgttgcccaggctggagtgcagtgatgcaatcttggctcactgcaacctccgcctcccgggttcaagcaattctcctgcctcagcctcccgagtcgctgggattacaggtgtgcaccactacacccagctaattttggtatttttagtagagacagggtttcaccatgttggccaggctggtctcgaactcctgacattgggcaatccactcggcttggcctcccaaagtgctgggattacaggcatgagccaccatgcccggcctgttttatgtatttaaaaacatttttctgagagggggtccttagaccttactagagcccaaagggcccatggcatctaagaaaggtaaagggctcctgctgaggcccagggaggggccctcacaggctgggggctaccccatgctgacagggatgaggtgtctgactgtcaaatggactgaagtctgcactgggcaaggctgctctttgtacccatctctgtgctggcctttgggggacagcagctcctggtgagagaggaccttgcctcaaggagctcctggcctggttgcgggagggggcaaggcacacagacagctgaacagctccctgcactgtcaggagttcagaggaggagagagaagtcacttccaccactgggacctgattgaccatcctgggaaggcttcatggaggaggtggcattggatttgggccttgaaaattttgacgtaagagacaggggaaagcaggtcaggctgagagggaccagactaagcaaagaaatggagtccagaaggctggggcatgagtggtgcccagggaggagcagggttcaactggagggtacgggagagagcagagggaggtgggaatggaagtcctgaatgcaaggcaaagaagcttgcggcccgacgcggtggctcacacctgtaatcccagaactctgggaggccgaggctggcggataacaaggtcaagagatcgagaccatcctggcccaaatggtgaaaccccgtctctactaaaaatacaacaattagctgggcgtggtggcatgtgcctgtagccccagctacttgggaggctgagacaggagaatcgcttgaacccgggaggtggaggttgcagtgagctgagattgtgccactgcactccagcctggctacagggcaagactccgtctaaaaaaaaaaaaaaaaaaaaaaaaaagaagcttgcactctgctgttggcccagggaaccgtggcagggctttcagcagggagcagggcaggtttgggtttgaggacagaccccctggttggtgtgtggagagacgatgggagaggatgggcgggaggctgggtggccatcgttgacaccttgcagtcatctgatggggaatgtggagagctgaactgagcccagggtcctcgtggggagagacaggggccgtcccagccatggaatgaggtggaaggtcaggaggctcagacctctggggctgggactgaccgcctgggtttgaattgtggcctctgcgggttactagctgcgtggcctcgggcgtgtttgttacgcttgcgaattaatttgctcatctaagacgcacggtgatagcagcacctgtctcgcagagttgctgtgggcgtaaaatgtgacaagggatttaaagctcagcacagttcctggcacagagtaagctctggacacgccatagctctggttgtttattaccggtgataaaacagatgggtcctggtgacccagtggactggaggagatgcagggacaaacgcggccaagtctgaagtttcagatcaggaccaaagcccgggtctctgcagctggtatctgagcacagaccaggtctccaggtgctctcttccctgctgaccctaagggctggggccaggacaccccctcccctgccctcacctcctctgcccagctttcccttagcaaggcctcctctggcccctccagcatagactcccaccccccaggaagggtcaaacacaaactccatctcattccaacacctggtgccgtctaaccccgttcttttcctccaggagttcccagggtcgggaaggtgcagtgaatgagacaggcctcagagagtgacactgggagctccacttgggtttctaagtctcagagcaggaagtgtctagaccagcgtcccactgtgagtgagcgctggagcctccctgaagaggaatgcggtgggcaaggtggtgtgacaaaggtggggtctttgaacgtgggattttgcaggagcagcttcacctctgggcctgctcacactggggctgatacttggggtcctggaattccatatgcactttcccctagaccctttcggggggctccccaaccctgctcagcttccctctctcccagactgaggggttccagctgctccgggcagtgggagcccactgatgccggagaataaatttgctgttttgtagagcatgtggatgcatatttggggggcttaatcttcttaataaattgttctcaaattgtgcactattaaactcctgaaaaattcatgagcacgctgggaatagagacctcatcgggaaggtttgacatgaacaatacaataaacgcagcttctaaattgggtcagggaagccttcgaggcccagagagaggacattcccgcttgaccctccccaggcctataaattaatcatgtgcacaaagagggccttgttctctcttgtcagagccaggggttgtgtctttgcccactgaccccaccccccctaccaaaccacctctgctgcaaacagagtgcctggtgaggccgttcagcgtctgtgctttgttattcctgtgtctccaaagcaaggtgggtgtacgtttcagcaagagagatgtaggttagataggaggaagaacttcctggctgactgtggggtggtgtgaaatcctggaatgggctgctctgggaactcgaggagactcttttcattaggcttttaagacctggcaggctctatcccccttggtgctctcagaccattgcccagagacagcagtgaccaggacagacattgccccagggtttggccacaggagctggcctggatgtgcctcattctggaccgttgtgggagatttaaggctcagctaaggggacatcaggacagcatcctccaggcccaaaccctcaccatagtctaagtacatggcatttggataagggaagtcaagttaggtctctgccatgggtctggggctgctgctctcttcctcaacaccctcagcctcttggagtcctattcaaaggcttggcccagatgccacctcctctgtgaagcctttcttgatttctccctgccctgtcagtcaaaattagttacttcctcccttgtggtccctctgccttgggcccttgttcgagactctctgtggaagcctatgtgtcccaccagactgtcagctctctgaggacagggactgtgtcagagccctctcaggacacaaagggacacagttcttgaagggtcctccagagaccatgccatgacttgcattggttttcacatgccaactcctaggaagggtcccctatgcaccccggggtaggagctgaatggcctggcttcccaatgacaacatgggaatcctgtgcttttaagacaggagtagggccagaaagaggagagatggaggaggcagaggccccggccggccacacttgaccccgcctttactctcttagttctgacatttcacaagcctttgtttttttctgaatctgctcaaagtccttcaaccctgcaggtctttggaggagggtgaaatggccacccttagtgtacacaggagccccaccctgagccactgtggccccaggtgtccccttgtgcctagaaagcagcctcactccagcacaagcctgggcaggtgcagcctcggtgcgcagtttggaaggggtgacgcgcaggtctgagaatgggtgggcagtgggggtggagttcactgtcagcgccaaagaggaagtggggaggccctcgtgggagtgtggaagaggagcacctttctctggggagagcacttccgggagatgtaactgggtagcctacccagacccctggccctggtggtctagcctctaaaggaagcagatgatagcaataggagaaggcagtggacagccccattggtcctgcccccaccccagccaccacctgtggctaggctgggaggaagctgctcttccactcccaccctcaccccgtgggctcggctgctccctgctgacttgcacctcagaggcacccccagccccctcagccagaacagccaacaccaggcaggtttgatgcctgataccatggggccctgtgtgccagtgcggcccacccagcctcagacctgtgtatatgtgtgtgtgtgtgcgcgtgcgtgtgtatgtgtgtgtgcatgtgcgtgtatgtctatgtgcgaaggggaagcttggcagagggtggctatggagtggagggggctggagaggccaggcctccgtgtggccggtcaatgcctcaggaggtcagcaggtggagaaagagagccgtgtgtggggtcaaggagaccctggggctgttcattggacagcactaattcaatgcctaaaaataacctcggacctggtagggcacttcagaaatttccaggctctttcagaccccccacaaactcatttcagtctccaacatcttgtgaggaagttaattccatccttattttaccaccaggagcaccaagttctagagtaaatctgtgaagggctcacagttagttggtggtagagctgaaactggaactctggtctctctggccataggttcagggccacctcctgtggacctactgtgtgcttagccccgtgcagggcctgggcatggaaacggagtgaaggaggcactggctttgctgccaacatggcctgtctgcagggaagaaggccacctgagagagaggttaggaagcaccagggcaaccacaggaaggaggggcgctgagatgggagcgaggccttggacaagaaaggatatccagagctagagagggtggggcttgagggtggaggccattcaaacacaaagcactctgggtgaagacaagacagtggggagcgggttttggcccagccccacgcagagccttaaagacgcagccatgggcatcccctgcagggcctggcaggcagtctgcccaggagagtcacatttgtgggaccctgctgcagaggaccttcccaagggacagtcccctgtttagatgtcttttttgggggggggtctgggggatggagtcttgctctgtctccccaggctggagtgcagtggcacgatctcggctcactgcaacctctgcctcccaggttcaagtgattctcgtgtctcagcctcttgagtagctgggactacaggtacatgccaccatgcccagctaattttttgtatttttttttagtagagatgggttttgccatgttgcccaggctggtttcgagttcctgagctcaggcaaaccacctgcctcggcctcccaaagtgctaggattacaggcgtgagccacggtgcccagcctcagatgtcttttgggggtggaaccagggctgcactgcagaggtcacccccctacccctggccctgtcactctccatcctcttcctcctggccagacctcctgctctggcctgcttttattctccttttagcataagatggcaaagtgactgagaagaaggaaacaatcaaaggaagagaagtggttgccacggaaactataaagtggaagcagaaactttcaggagcaggagggaggagggaagcagacctggtggctgggtgggaggagaggcgggaggcctggcctgggctagcctggagtgcccctacgcccagttctcgctgctctccccagctgagcaacgctgggatctgtgctctcgggagcaggagggccgtctggtttctcccaagtctgggcaggaggtggctggtacgagagtgaggtaagcagcttggcctgtgggtgcatggggctgaggaggagccctgtcttctgcccagatccccacattgttctgaaccgccagtcccatgtcagcctggaggagtctttgcatgtctttacaccacgtcttgattcctccgttctaacaagccaaaatgacacggtgcaggactgggcagtttaccaggcagcttcctgagtgcagtctcattcaagtcttgtgacagttctgggaggatagtattcagattctacagagtggggagtttgggcccagagaggttagggaacttgccctaggtcacagagctgagaacccccaggggtaggatttatcccctggactgtcagatcctaaagccttgagctctcttttccttctggacactttgttttgtaatgcagggctctgcatgaagccatgagttctctgtagcctccagccccttctcatccttcattccagtaagactttcccccagggagctgctatttgcttcctggaggagcctagggaaatttagtgtctctgaggcttgatttccccatctgcaaaatgggcataatagcaccttttccctctgaaggcttttgtgaggatgcaatgagacaattcaagtcaagcactgggtgcagtgcctggcacagaggatacccttgaactctctgctggctgagcctagcaagcacccgtggagtgggcagggctggggcaacctccctatatttcagagaagccacttcgtccgtgaaacggttccgatgggttcctgccttgctcggggaattggaaaggtagattgagatcatggctgtggagccttgaaaccactgagtctggtgggggaagaagcagggtctcccctgctgtaaaactggccactagagctccagtggacattgagacgtctcagccaatggtctctctgttggaggaagggaggggagagggattgggaccctgcccagttagcccctgagtaggaggctcagacctgctgaaggtttgggtctgaaatgaccccttggaattccgcgttgcctgcccccgaattgcagccaagctttagatttctcccgggagaggcccagccagtcaaatgtattattaaatggcagagaggccgagcgctgcatgtgaaagataatgggggaatttatatgatgggctataaatcacagaatgagaagccctgcaacctgtggggaggaaaattaagaagtcctgagcagtgacttgtttggggtgggggcggaaggcatttggccctgttttgctgtgagcctggcaggttcatgatgcacgaggcccaggggtccgaggggctctgatgtgcacacttcctatgtactcaatggtgacacccccctccccccattggcagctgctgtgtgacaatgccaagctgggcactgggttatgacctcagggagagcagtgtgccaggagagacagatgtgagatgaatcatcaaaaaatatgcagtcggccctccgaatctatgggttctgcatctgtggattcaaccaaccaaggattgaagatagaaaaaaattgcatctgtactgaacatgtacagactttttcttgtcatcattacctaaacaatacaactatctccatagcatttacattgtattagctataagtattctagagatgatttaaagtatacaggagggtatgcatatgctatattttaatgtcagggacttgagcgtgcttggattttggtatctgattggattttggtatcctggatccaatacccctgggataccgagagacgcctgtatggcactgcacaaagcagtgggctccctggaggaaaggcgcagggagctcagagagagtgttgcaggagggctgtggaggaggcggtgaattgagagaggggagtggtggtttttctggaaaggaagagtgaatgcgagtcagccaggtggctcaagagagctgtggcagggaaggtgagccagaaagagtggccaaaggccagcagggccagggcagctagggcaggggctgtgtttcagatttcactctggctgttttatggagaaccacactgaggaggcagcggaggatttggggggacagttcggggggatggaggtccccaaaggtagagatggcgatgccctggttctgggagatgtcaatgaaggtgatgaggtggacagcctcaagctggaatttggagctctgaagagcccatttcacagagcaggctccaagtctacaaagccagccccatgtcctgtatcctaggaggtgggaatcatgggagcaaagacacaaaggaaagaagcagtgaagggctgggggccagggtggttggggaagggataggagtagggtgtggtaagagggaagataggagtagggctggggccatatccactgaccactatcctaggctaggactagagtcaaggctgtgtgggattgaatcctgtctctgccactaatcaactcttgtgcctgtaaaatgggagagtaacaggattcactgcttttggtcattagaaggacttgctgaattgacactgcctgacaaaggggaagcactgaattgggattaagtatgcactgagtggccttgggcaactctgccctctctgagctttgctttcttctagcaggtctctgcaaaccctctaggccaaagtcctctaatctccctgtgctagcagtgtgcagctcccgagggtggtcagagcacagcggcaagctggctgtattgcctcagatgggaccgtgtccctctctgccctgtaaggggataccatgcctatcagagctgtaaggggatattttaatcagcccaggacctgctgaggtcagagggcatagggaccagaacaaagaatgccagtcacggctgctgcctggccctagatgacctgctgggccccagaatccagaccacatggggagcctgcggagggaggtggaagctgggggcctcactgtgggtcaggcactgttcaaactgggtgttctccattttgggcctcagtttgcccatctgtaccatgaggtttataacccctccctgcctgcagcacatggggtgctgaaaaaaaggaacaggctgcagtttggacaaagcagattcaggtctttattgggggctgtggtctcaaagcctgagagagagcaacaggtgggcgagtgaggctcagtgcggcccacggatgacctgctttggaatcacctgtgggaccactgcccgctgatgaaaaatgcagactcctgggctgttccccagactggctaacttagactctgcccggtgggcccaagtgtctgcactttaacccacatcccaggggactggaatgtctcgaagtccaagatctgaagttctgggcatccccttccttgcatcaggggaacaggggcccagagggcatggggtcggctggcccaagttgcttaggagactggaatcctatgccatgccactcaggggtccttcctgtgcatcgccccaggagccctgggagtcctgggtgatgcctggggcaaggggtactttatcctagggctccatagcccagcagggggcagcgcagatcagcacctgctgagggctccccgctgctgtgtgggcctgggctgggtagtgcggatctagaaagagctcactgttccggagaggtaggtgtgggcctgggtgggaagacgggcctgtgtgtgcatgggagcctgtgtcaggggggcgacaatgagagagagagcaccaggaggacacaagaaatgcgacatcagagaaagcaggcccagaacattgtgaaacttccttacagcttcccgggacagaggctgcaggggaagaggagagggcatctgttgcccaagctgcctccctaggactgtcagtgggattggggtgacttcaggcctccccacctccccccacaccatgtcctctgggcttttaaatgaggatcaatcagaggtcagcccctccccaagttcagcatcagagtcaggagggactaggggctgggctacaggctaaactccagccccaactctccaactggcccttccttactttgcctgctacagcttcctctgctgctgggaacctgtgggcaggcctacggcgtggggtggggccagtcctgagcctctggacctctgacttgagagtgggctgaccactagatctcttgaggccttctgcagttcccagttgtgggaaggcagcttcactttcatactttctcagggcaatggggggctggtttggtagtgagctccctgtcaccaaaggtatgctagacaagactaggtgaatttttcttcctcttaagcctttggtgacaggctaaagggtgggtcctgggccatcccctctttataccccatctgtctgttaatcattaattgccaagagagctcctcctgggatggggtgactccttggctatgggggatgctgatatccaggatgaccttgaacttgtttttcttggccccaaactttctgctacttcctgtttgagcaggtgcagaaattataggggcccaacccttccttgttttcctggtagaatttccagacaaaatgctcttcccaggatgggggcagagctgggattgttctcactcccaaggggatttgaggaatgaggatggcagaagctccatttaattcccacctacctggtcttaggatgctagctatgggctaggtgggatcctcaggaaaggccagtaaatgtgagaaccgtggctctggcagtgcttgcctctcctctaacaccagctatggctcccatttatgttccagattggacacagaggctctgagtgtcaatacccaatggccttgaacacccacccaggccaaccccattttgtaggaggggaggctggggctgtgagccagaggagccttgttcaaaggcacacagcaaagtgaaggcatttattcatccattcattcattcaccgagtgcaatctctgtgccagttccttcacggtcaggatttgcaccctggcctgctgaccatcctcagctgccactcaaaaataaactttccagcctgccatccatgtgtcacaccaggcctcaagaggtaggtcacttgttcctggtcccacagccagcctgcctgcctgcctgcctgcctgcctgcctaccttccttctttccttcttccttcctctttctttcttttctttctttctttttctttctttcttttctttctttctttctgtccatttctttccctttctttctttctttctttctttctttctttctttctttctttctctctttctttcctttctttctttctctctctctctttctttctttctttctttcctttctctctctctctctctctctctctctctctctctctttctttctttctttctttctttctttctttctttctttctttctttctttctcactttctttttttttgacagggtcttcctctgttgcccaggctggagtagagtgacacgatcatagctcactgtagcctcaacctccctggctcaagcaatcctctcacctcatcctcccaagtagctgggactacaggcacacaccaccatgcctggctaattattattattgagactgagtctcactctgtcgcccaggctggagtgcagtcgtgcaatctcagctcactgcaacctctgcctcccgggctcaagcaattctcgtgtgtcggcttccagatgggatttcaccattgctggccaggctggtctcaaactcctgatctcaggtgatccacccacctcagcctcccaaagtgctgcaattacaggcgtgagccaccacacctggcttttttttctttttttttttttttttgtagagacagggtctcactgtgttgccagggctggtctcaaactcctgggctcaagtgatcttcctctcttggccttccaaagtgctggaaccacagcttcttttctattaaaaaaaaaaaaaaaaaaaagaacaggggctttgagcccagctcccttcatgcacctcgttcatcacacatttattgagtgctattctatgcactgggcatatggctgtgaactggactcacaaggttcctgtcctcattaaagtctggggaaacaaattaatgaacatctgaatacacagattagatagtttcaggaagcgctatgtggaagaaaataaaacagggcaatgggatatcatggagagattggggcaaaggcacttgagataaggggtccagggaaggtctctgagggtgtgatatttgagctgaggcctgaatgacaggaaggagctgtccatctgaagatctggggtttgtgggaatgaggcagcaggaactggagatgcaaacgccctgaggtgggaccacgtttggcacattcagagattgaaaagttatcaagctgagtccagaactatcttagccagtggctcctcaagaaagccactagaaagctcttttaagaatatagattccttggccctacccatcaaaatctggattcagggatgctgggagtggggccctggaatctgtttctgaatgctcccaatgtagttaatggcatccagtccagccccacacctgtaagcctgccatatggagccatccccttctttcattttttgcagagggaggatcagagaggcaccgtgacttattcaaggttgcacagccacacagtgacaaatctaagcctcaagcccagatctcccaccagagttctgcccttaccacttctcttcttcccctctggagaagctgcctgggcctcaccccaacttggttctatctccctgtctattctccctgatctcacccctcacatagcctgctccccagtcctcactgtatcctctgctccagcctcaccatcctacccactgtctccagtacatgctttgttcatttccacctctggggcttttctcatgctgtctctccctccaagaatatacttttctgctcgctatgcagtcaactcctactcagccgtctagctccatgccagtgtctcctcctccaggcagtcttccaggacttctctcttctccaaattctctcagtgctgactccaggtcagataggctcagccacttttttcgaatgttgccatcatctctcccactgttgctaagagcctgctctgggctgggagctgtactgatcagctctggactgtcctctcaaccaatccacaaattagtgagaaaagaaatagccaaggctaggcatggtggctcaaacctataatcccagtgctttgggacaataaggtgggagaatcacttaaggccaggagttcgagaccagtctgagcatcatggcaagactgtgtctctaccaaaaagttaaaaaattagccaggcatggtggcacacacgcctgtagtcctagctgctcgggaggctgaggcaggagggtcacatgagcccaggcattcgaggtcgcagtgagctataatcccaccactgcatttcagcctgggcaacagagcgagaccttgtctaaaaaagaagaagaagaggaggaggaagaagaggaagaagaggaagaggaaggggaaggggaagaggaaggaaacaaggaaggaaggagaaaggagggaaggaaggaaagagaaagaaggaaagaaagaaaagaaaggaaagaaaggctgggcgcagtggctcatgcctgtaatcccagcacttggggaggctgaggcaggtggatcacctgaggtcaggcgttcgagaccagcctggccaacatggcgaaaccccgtctctactaaaaatacaaaaattagccaggcgtggtgacacacgcctgtaatcccagttactcaagaggctgaggcaggagaattgtttgaacctgggaggcggaggttgcagtgagctgagatcgagccattgcacttcagcctgggcttgctgagactccatctcaaaaaaaaataaaaaataaaaaaagagagagagagaaagagagaaaagaaaagaaaaagaaaagagccaggaggggaagctgcttgtcagtttatacgcaaggctttgatccactatgttatttgactcttccacaacctcacaaaatattcatatacccctttataccttaggaaatggaggcacagagaggtgaggcagtgatctggggtcacacagtgaagaggggaaggctcatcactccaaatcccccacctgaatgggggcttcctaggagctgactacagggcccgttcagctgtcctcctctgtggtctctgcaggagttgagcaaggccctcccctggaacccaggccagtgccagccatgaaatggttcacagatgaccaggcaggcctgcttgagaagggagggggctccctgacctcacactgggaccatatgccaccccctctggtttcccagtgggtgcggagctgtctgggcccttactgaagggggaggaagaagcccagagacctggaacctcagccccaggcctgggccagggagaaaggaggggctgtgggcgtcactggggcccagggcccacctggagcttggcagcgtttctgggtcagggcagggagaggaagtacacagagagagtggctccaggcttggccatctgggctgaaatgccggctgctagggttggggtgaggaaggagggctggggctggggcctggagagtggattagtctcccctgggccacaggattggagccctcaacttcagggcagccagtatggaggggaagcccagggctcctgtgggcagaaggcagcaggcattctgggagaggtggtccaggctctcgacggagagaggtggtcttggcggctgtatttgggttccaaggtggaacccaccctaatccccagccccatgtgaccttgggtgagtcgctccctcccttggtctcacttccccatcttcaggaagggatgctgccccaccctgactgctctgtgctgggatgagagagccaaccagaccctcagtgattgcagagttgatgccagatcccagtttgccatgggttagggagggtcctctgggtaagcagctgattttgagggcctcagcttcccccgttcatcagtttctctcaaggttccttctacctcggacattccggggctttatgacaggctgtcgacgtgtacgagggagacgtgcatgtcctcttctctgggcttctggaggactggaggggacctgtaggtggccctttggggaatggggagatttttagatcctgatggaatctctgggaggtgagctgaacagagctgtctcatctccatttaacacgtggaaacctgagacccagaggtatcacacggtgaccccctcttagagttccggcctgtcccgagggctctgccctcggcccagccctgggtgacttgattggaaaaacactcacactccccgaggctctgtctctgtgtgttcaaatgtccacgcttgactggtcccccacttccgcctgtgttgagaggggcagagccatccaagcctggggtcatcttgtccctgactgcaccgttttctgcaaacgatgtcattaaatatatcggtggcttttgggaggaagtctggggggcggtggcagtggtggtcgcctggctagcctggagtgctttagtgtgacctcttggggcttgtctatgcttttccctgaatggggtgacctggccccagcctcccccatcttcctagtgaagatcctgctcctggtccagccttattcccggatgaacagtggatgcaggaagtcgtcattgcctgccagacaggccacctcctggggcagaggccatgaccttaaccacaagtgtcccgccaccccccccaccccgaccctctgtcccccccacccccacccctgcccagagctccagagactgaaaggttgagactgtcctgggaggcggatgtgtgcaggcctgcctggctggggacttccccggtcaccaccacccaccctcatcccaacaggaaacctgacaggtctgagccttccagacacccattgtgtggggcctagtgtgggctccgatgcttcccctgtcaggactcctgtcgcccctagcctcctcctgtcccttgacaaagctggctattaaagaaagttctagactgtttccactcccccgtctctgcattccgtactgctcaaccttatgatcgttgctcctttcagccccctgggttcaaatcctgcctcctagtgcaagccctgtgactttagggaactcacctaccctctctctgcctcttgacatttcttctggaaaaagaaataaccatctgcctcctaggattattctgaaattaaatgagatgatgtgggtagaatgctgagaacaggatctgggacagtgcatgctagatgcagttcagctaccatgattaggattaaacccaaactccaccctcaaacaaacctcttgaggtcaaacttgtaaccctcctctgttaagaagccttgggtttctgtggtgccccacgcatgagcatctccccttccctgggggaggctggtgtttgaagataactggttgtggttgctgttatcatcccccctgtacagaatggcccatcaatgaaggctgtgctcttctgttttgtgcttagctgcagaaatgggtgatctgtcttaagattggaggaaacactatgctttatgggcaatttaaggcttttcaaaggtaattttggcaatatgcttttttttctctcttttctcactgacttcaaccctgacaccgcagagggactcaagactgccttgggctagcctccctcccctgcatctggtgcccctgctgacccaccctggcctggcccatgatgtacctggactttcagcccagctctgatgctacccactgcttcttttccagcagggatgctgatggttttctgcctagaggggaattttttgggtccatccctccctggtcttcacaagtagcctcctgtgtccccattattcaaactgactagtggggtataccaggagccaggaggggggtgtctctccttggagtcagagtagacttttttaaggagggggtgcttcaatttgcaattgcaaaaatgtatatatacacacacatatatatacataaacacacatatatacgtatatatacccatatatacacatatatatacatacatatacatatatattatatatatacatacatatacgtattatatatatatacgggtatatatgtatatatatgatggaatactactccgccatacaaaggaatgaattaatggcattcccagaaacctggatgggaattggagaatattattctaagtgaagtaactcaggaaaggaaaaccaaacatcatatattctcactcataagtgggagctaagctatgaggatgcaaaggcagaaaaatgacacaatggactttggggactcagggaacgggtggaaagggggtgaaggataaaagactacaaattgggtttagtgtatcccaagttactgctcgggatatgggtgcaccaaaatctcacaaatcaccactgaagaacttactcatgtaaccaaatgccaactgttccccaaaaacctatggaaataaaaaatttaaaaaataaaaaactgaggggatgcttgagctgggtcctgaagggtaagcaggaatgcaccaggtgggtgcagagggaagaccttggtggcagcggtccaggtcccaccaacagggcgaagactggtggtgggaaagagtgtctggaggatgaccaagggggctgaaatgggttggggtgcaagcgggaggtggtcgctttttgacacagcttggtctctgagagttcgccttgggaggcttttgaggggagggtaaaggtgctggtggtggggttaggtcagatctgatttagccagtcctagtacccacacccctacttactaaacttgcatgtttccaggccccatccagacccactgaattgagcgtcttgagggaaactcagaaatatgcctgttcactgagtgaaggtgatttgggggctgcagccctgtccccgctaaagcagcacatgggagaggtgggagctgggcctattcaggagcccctctggaggtgggagaataagaccagacctttagccctgtaggtactgaggctctcatgttggcagggctggaaagtccgatctgttggtctgtcacaggaagcagtggtagcaatggtggtggtgggcactggaagcagggcttctcctgttcagagagagaaagccacaggggcgccggcgggaggtgggagcagatggggggccagtttcccagcaggattgattccaggtcccctgctgggctgtacagggagcggcctttaactgccctgttcctgggccaggaagaaggaaaaggagcctgggctctttctctcctagctcctgccctgcccccttcccactcagtacccggagagtacctgccccaggcccgtggagatgctcggctcagctggttggcgatgcccattcccatcccaagggtagaaatgcacaagcttcctccatttcactagctgaccctccttcctccacaaggcagatggattgggggtccatacgttctccctataggtagggaaactaaggcacagagaaggacttgaaaagctgaagtggggagaccatgccagacctttggagcccagctgtgcttacagatgaggtcctgagttccaagttactgccccctctcccctccacacacactcctcagacttcctgttgggggcccaggctaagaccacttgcccacaccactgataacagtgagttgattgtgagcctcccgtcccctccagggagggctggaacctggctgatcagagggttcctgctttgggaaacaaaatgggccagatgaactcaggccctgggagcaggaccgttgcccccgtcctgagtaggacttcctgggagtccctcacccccagaacccgtggacctggctacggaggttagtcatgcctggaagtgccaagatgtggacaggtggtgctcagaaccccacctacgtgaggaggcactgaactgggttctggcagtttggccagaggaggatgcatgctaacaaggcccccagcttgcctggggactgagtgactgtgtgtgcgctctgtccaggggcttctttttagagacgttcctgcaccatgtctgctgttgaaaggagatagggcaatgcctccaagcttgtctgacctgcagcctaccggctgcatgtggcccaggatggctttgaatgctgcccaacacaaattcataaactttcttaaagcatgatgaggtttttttgtgtgtgtggtttttttgtttgtttgtttgttttagctcatcagctatggttagtgtgagtatattttatgtgtggcctgacaattcttcttcttccagtgtggcccagggaagccaaaagattgggcacccctggcctaacccaaaggaggctaagggtgtcctcttgggcaccctggttttccatcttcctgtgggattggccagtattcagggaagaggggaccagggcagctgatagctctggactcctcagactgagtttgctggagtaacacccctcctgcccctcccccctggtcagggaaggcgcctggcttccagctgtgagacaggctccgcaggactagggaccctccccgctggctgagagcgctagggagggggcttcccctgtgaggtgcaaaacccggcctggatttctgcccagacggccccgcccactccagggccccaccttccccactgttctggaggaagatcccctagccggcctcaggcacttgcggtgactcacaccccccacccctaagtctgaatgttgagagccccaggctaagaccacttgcctctgccactttccatgtgactgaggcaagacctccttgccaaggcctcagtttccccctctgtacttcaaaggaggcagctcaggcaggtgtcttaataatttaaacgacgaatattgctaaagagataaggggcggggagagagagagatcactgtgggccatggttagggaagggtggaggagctgggtcctgaaagggtggactttggtcgggtggagaaaatagccaagaaggcagtccctgctggcagcacagcaaagagaagtgagaattagggggagcagaggtgaggctggaggggactttggttggggcaagattatttggggtccaaataacaaggatgtttagacgtattgccattgtgctctggggagccacggaaagctcttgagctgaggagtgacttggagaaagtttttcagccaatgcaatagagggagttggtacctttccttctgccaccctgagtttctggtgcctacggtagggtagggattgttctgccctgccttcagtgctttgagtgcttgaaacagacaccgtaattttaattacataaaaatgatacgtgtatcagacgggacaacctttaaaacgtaaagaagaggcaagtatcctgcatcacaggggagtctttcaacctggctgggccagggcctgcggagcagtgagggtcgtttctcagcccagcgagcctggggcaggaacggaccctaattgaaggtgaccgtccccaagcatgcgtcctaccccgggctccggagagcgcacaagcaggtgtgcaccgtctacccgcgctggcgggattgggtgcctggtgcgccctcaggtcgacggtcgaaccctcgggggcgggggtgggagccagaaccctcgggacgacccgtctggggtcccggggaaactccgggccgcctcgccccgccgattccaggccgggatttctcccgcactgactttccgggccggtgccagcccggcctccgggtccccagcccccgccgcggggccggctgctcggggagcgggagggggcaggaggcggaggaggagtttgagcgactttgtggggcagccagggcctcggcggccgctcgggcgagcgcgggagaacgcgtgggcgcccgccgggctgtccggagcggccgatggggcccgtgtgagcgcgcccaggcccggcccggtgcccggcgggcggcagcatgtccgcgggcggcagcgccaggaagagcaccgggaggtcctcctactactaccggctgctgaggcggccccggctgcagcgacagaggagccgctcccgcagccggacccggcctgccaggggtaggcgccaccccgacccctgacccctagaccctcctaaggccactaagccacctgatgccctgggatgctagggaccgggatcctccttccagccatttgccgggggtttcctcatccgccccttcctgagtctgccggaccccccattcccccagcttctgcttagtcctcctctcgccgggggaagccgaggctctagggtctcctcttaagccagggacagggagaggggagcctggaatctttctccgcatctcagatcagacctcctaccccactgtgcctcagtttactcagcagccgggcaataaagtaacccagggtggatctgagctttcccacaccttgccttcccagcccaggccgcggacttctttcttccctttccaggaacttaacgggctccccacctcttgggtgctaggacaagtgggtggacctcagggaaggaaccgtgacccctcgagcgggtgggcgccagctcctttgcaaagtttctctccatcaagctcaggaggcaggacgagacggagggggaggtgcgagcagcattttctttttccagtaacaggatcctcggctggaaatgcgtgtgatcccgggggctgcgtttgggcgggtggtggccgggacttccttccctggctgagtaggagggagggaagcccctgggaggaggaggccttcaaaggggctctggggaggctggagtcctaggcagaggttcaggcccaccgagggtgcccgtggggtggaagggaggagaaagacggcgccttagcagggacctgggccgagttgacaccatcaggttatcttgaaagtgggaagccgggccctgtgccaacaaatgccatgcagggaatctggtagaccaagaggggccacattcccaccctgcaggctgccgttgtgtgacctgggctgagctgcctctgaacttcagttttcttgtcggtgtgagggtaaatgaagcaggcaggtagtgttcggttgcttccaccagaatggggaagacttttcccacagtcaggtctgagtagcactgtgcagtccagggcttcctcaggaagtagtgagttccctgtgcacagaagggttcaagctgaggctaagtgtgtgcacaggtgtgtgctggtagttcagtcctcaagggtctctcaaagcctgcaatccccccactcctgcctttcctgaagtcttagtaagtacagaattaacagtactaagttacttagtaagtacagaattaacagtactaagcctttagtactccttggagggagtactaagcctttagtactccttggagggagtactaagcctttagtactccttggagggagtactaagcctttagtactccttggagggagtactaaagacctggggaaggctttatctcagtggttcaggttttggttcttctatctctgtccttctatttaattctgtacttgctaagacctggagaaaggcttagtactgttaattctgtacttactcccttcccctggacttggtctgggagaccgggaatctgggctcaagctttgtgactttgggcaagtcatttcccctttctgagcttagttttcctggttgtaaaatggacctgccgtatgtggaggattcagtgaagaaactgagaaatgggagctttgaaaatgcccagtactgttcagaccaccctggggcctctccttctgcacccacctcacgtcacctcacccacccgcccctcctttgcctcagaaatgccctgtgtgaccttttcctcttctcacctcagcccagttccatccctgactgtaatgggagtctcgctcctgttcagctgacctcctgctcagctgaccaggcaggggataatcaatgtgtcaggggctgtcacctgagccccagctcccagaccccacatacacaggatcactgcttgtgtcccagcttgaaggagctcacggcctgcagagcggggaggagactgtctctgaacagaagttatatctggggagatcagggagagcttcacagaggaggtgacatttggatgggatctcacaaaatggatagggtttcccttcgcagagggagtaattgagtcagatctgggttcaagtctcagctgtgcacacaactattctacagccagttacctctccaagcctcagtgaccttgtgtggtcaatggggctagcagtgacagggtcatgtgagggccagaagccagtgcctgggactaaggctgcagctgagggtgagctactgtcttctctctggacagaatgaacagactgcgcagtcagggagaaggaaaacggcttgggtattgagaatagagttcctcctgggtttggggaggggagtggattgggaagggggctgggtgagtgggtggggaagagcaggcaacagtagtttggatttgataaagggccttgaactttgggaggccaaggcaggaggaatccttgagcccaggagttcaagaccagcctgggcaacatagcaagaccctgtctcaatattgtttttgtttgtttgtttgtttgtttttttaaaaaaagaaggcctggagtgatgaggagttagttacagctgcagccagggtgtagggtggaggctggaggcaccctgtcctcctcctccttggtgggaggcagctagggcagccattgccctccctccactaaagcctcagacgcctgactctaccccagagccacaaccaccacctgagggcagggccccacccagggagaaactcaggctgaggaagccaccctgtggcctttgagccagtcccttctgaccttgaacttcagcctccccatccacatgggggcttggtcccatggtgtggtagcatcggacctcagaggagtgggtggtgcctagcatctcagcctggatcagactcttgcccccacaccctttctggcctctggcactagcagggaaggaaaatgaccaagaactcaggctgtgtatttgttcagaaacagaaaaatgcaaggaagagttggttgctgccaggttctgcaggtggccaggctgggggaagggagcagggctttgtccctggtagggctgtgagtgagggacagtatctgcagtctccctagtttgaccaataagggacttaggttcttcccttttctgggcttcagtttccccatctgaaggatgggcagagtgagacctgctgtggtggggggtagagcacgaagctggagggtagctggaggtggggtagaaacagtgaccttcggagggtgagggccatttgcattttcccactgtgtccctaactccacttgaaggctgggcatgtcccatggatttggggggatcctttccccagaagggtatcatcagcaaggtgcctccccacctagtcacaccaaaatcaagaaaagttttgtctctgacccctgtgtttccccagggctgctaggagaaacagaaattttcctctagccctggataaagttctgacccattcattcagccagtcagctcctcttaagcacctactatgtgctgggcttcagcttgggtgcaggggcacatggagatgaatcacatgtgctcccagcccttgccaagcccccagtctgttggggaggccagcttgttggggtgcactagggcacaagtctctttctaggggacagagcagtggttagtgggaggcaggggctgtagttccagctcagccgcggactggttgcatgactgggcacatcatagggcctcagtttccccatctgtcgaggggggttaatcttgctctcctgcctcttggaatgcctatacccatagccatgaggggttttgattatgttgttcatgttttcatctgagtttttctaggggtccagccacctgccaggccctggctgggagctgggggttttgcagatgtttttctcttgagatggtcaggtcctcctccgtgcctgtacacacccctcttgcatgcctctgtatcttgcccgcgtggtgggagaggatggtttcatacaactggttcctaaccaagagaacagttaggtaaggacctgtgtgccaccatggggggtgggtaacttctcaggggaccctggctttttttttttttgagacggagttttgcttttgttacccaggctggagtgcaatggcgcgatctcagctcaccgcaacctctgcctcccgggttcaagcgattctcctgcctcagcctcccgagtagctgggattacaggcatgcaccaccacacccggctaattttgtattttcagtagagacggggtttctccatgttggtcaggctggtctcgaactcccagcctcaggtgatacacccgcctcggcctcccaaagtgctgggattacaggcatgagccaccgtgcctggctgggaccctggctttgataaggtctgcaagaggcctctggggcaacagcttggacttcatgagttgggcgagcctgagaacagccctgaggtgggggggttttgtggttccccagttttcaaatgttccctgcaagggccctaggcctggctctctgcctccaccttggatgacacctgtgaaatcattatgcccttttctgccttgtctcttcttctgtttctgccaagacacaatctttcatttggggcttggccctagcctttccagtccctcctctcccttacatacctcaaggattggggagctcactccctctcaggttgtgtaatgagggtgaaaatggctcctttttgttacggctcctgtgtgctgcgtgcctgctccatgcctggcaatgagctcaactctgaacttgccttgtcttatgcagtgttcagaacaacactgtgagatggatactgatactatcctcatttcataggtgaggagactgtagcccagagaatgaaagctttgcccaaagccacacagctcagaaatggtggagcccagctctgcccacctccaggtcctgagattcaccttgcgatatccgtgggcaggcagacctttctaaggtcaggccctggctttgagaaggccacctcccttcacagccaatgacttcactgggtgttcatggcaattgtctctcacagtcttggtcaaagcttgggagggaggcaggggagtggccccgttggcatctggttgcctcctccacctgcctgggatagctcaggtgggacctccccggcctgcccctgccccctggatcctgctgtcattcatgacctgccaaccatgccctttcccagggcatgcgacaggtctcagggcctcagccatgtttctccaccaaagcccttagtgctgagggttcagagtcccctggtgtgaggtccctggagcctggcagacacctgaggcctaatccccagagctctctaggtcctcgaaggaggccacaggccccagtgaatctgctggaatgtcagcctcttgcccttgcctttgtccttcctgacccaccctcatcatctttaataatcaggaagagaacagctccctttcaccaagctgaatgtgtgcccggccccatgccaagagctccccctgattacctcatgtctcatctcagttctccaatcctcctagcaggtaggggttattgttgtcactttcctttaccaggtgggaaacggagctctgggtgtgatatttcctctgcattttcctgtcggggtggtgaaataactggtttgaacccagtccactggactcgaaagctcatgctcagaagccccagggctccctctaactttcttggttgctgcaactcagagagcgctggaatggacccagggcatgctcctcatctcagcggttcaggttttcattcttctatctccatccttctatttaattctgtacttactaagacctgggggtacagggaggggcttggagcctatttgcccagctgctgaatggggaggttggagagatggatacttatggctccagtaccaggagccaactgtttcccttgacaactggggaaactgaggcccacagagccaaggccacttgcccgtggttacctaaagatgttaacgagaaatccgggtctggaactcagatccctttgtatcctgtttcggtgttggtgtagtttgttgctttccctaagatgagcccagatagggaaactgaagtgcctgggctcctggttgggtcttctgcggggagagaatggcgattcaactcccgtgtactgttgaacttgacacaaacacgctcacatcccaggctgcatacgtgttttgctttagaaatgacatgaagccttttgactatttttaagagaaaggcaatggctgtgatatttcccctgcacctccctctcggggccacttggttaaatgtcaggaaagggagagtatttcctggtcaggaacattcagagcttgctgggagctgaagttttgttttccattaagtaggtattcggggagtctatttccctctgcctcctctgtttccctggaagcttgcgcttgacagttgcagggaggaggggtttgagaatgagcagccgagatgcccacgtatcgcgtgcccgctctaggagtggcggggtggctatttttagccatcccgattcagtagaggcatttcagcgtttgttcaatatttaattatccatctgaaattggcccatgtggccttcagtttggaagcagctctctgtgctgtgatttcccagttgcataaataaggaagcaagggaatctcaatagccctccaaataataataacgagaaaaaaaagtagactcgatactcagcaaagacaggcttggttcctcggtctagacagaccacctgtatgttagcagagaagcaccaccgaggacgcccatcacgcccttggaaatgcggcggtgctcagtctccgaatctcagatccacaactgcctgggttttattggggatgggttttcctcccttcgccaggttcctgtgttgactttgacagctgctgggtacctgagaggtggtttggggattttgcttttggaagccttgttagcttttatttccctcttctcttctccctgacagacaggagagtactatcggcatctgggctgtgctatttctttttccttggcctttggaggcgatgtgccgacatagttgtgaaatgaaaaaaggcagagcacagggagggagatgttggggccatgaggctctgccttccttccccaagcccctggctgatgagggagagaggggagaagaggagagagtggggcccaagggtgctgggcagtcggagatgactccttcctactgtcctgcttggcatggagatttgtggactttgggttcggagactggaaaccaataaattggtaatctggaataagcttggtttttctatccatttacacctctattctggggacacagagtttggcctaggagcgtgtacagagtcctgactaggtcataaatgctgtgtgactgcagacaagtcactgaacatctctgggctcagaagcacatgtaacagatagatatgatgcagcatagggtgtcattataggccaggagaattgtcattattagctgttcacccaaagtctgaggggttgcttgcaaatcagttagggctgatctagaaagaaaacgtttgggaggccgaggtgggcggatcacgaggtcaggagatcgagaccatcctggctaacacggtgaaaccccgtctctactaaaaatacaaaaaaattagccgggcgtggtggcaggctcctgtagtcccagctacttgggaggctgaggcaggagaatggcatgaacccgggaggctgagcttgcagtgagccgagatcgcgccactgcactccagcctgggtgacagagcgagattccgtctcaaaaaaagaaaaaagaaaagaaaaagaaagaaaacgtgatgccagtggggactggacccacctaggtggtttctcggcatccctaccctgagaggctgccacaggtctcactggtacttgttcagagcagcagagctttagcgagccacctagtatgtgtgacctgggtgccaggggctgccacagcagatatagccagcccccgccctcgggagctcagaggccaaggggaagagtcttggcataaggttagcagatggtgtgactggaaaggtaggcagggccttgagtggtgagcaaagaggggagaacagcccctggcagaccactgggaatcaaaggaaggattttgaaaataacaggaatgataacagtgatctccatgtcttgagcacttacacagcaccaggggttcttctaagtcctttacatgcatcctgccttaaatcatcattctcccaggtggtgttatcagctccactttctagatgagaaaactgaggctcagactggttaagtgacttgctgagcatcacccagctactgagtggcagagtccaggatgtttaaccctcactatacttaccagagctgtgatttaggaaaagaactcttaacaaccctcaagctagactggtatggtgcagggagaagaaagtgggaagagggagcagggaggccagtccgcttcctggggaattttgaaggaggccggcaggtgcaggatgggggaaggcagagggcaggtggagaggagctgggaagtttggaagggctgacacaggagagaggatgccgccatctgagggccagtgctgggctcctgccacgatctctccctggcctgcggtgaaatgaggactgtaagggcattgcagcgagtttcccataacatccatttcacttcagtaacccattttgatgcctcttttttattctgagatgatggtctttggattctttggggttagaacattccttttatgcaatacataaatgtctagtatgcaccatactaaatggtgttcttttttttaaacatctatatttggcaagaaaagaagtcagtggttctgtgtggcccaccctcatattatgctacttcatagttttcatttatagacattgaactagttcctggaattctcacaggatggtaggctgacacccacgaaggagaagtccaggggtcgtccttacagcgagaggagtgggagctggtggtgggataaggtggtgggataaggcccttggaaaggcgtgaagaagcgggaggatgagggtcattgagggctggggtgggggatgcccggcaggctgtggacatggctgatgggcctgccttggatgctgatgctgcaggggttttggcacaagactgggcaaggggcttttcagggagcagcttcaggagaaggcgagaaaggtgctggagcctgcaggggatcgattatttgggggagaggaggtgtggggtgcagaataggacaggattggagaagtttggtgaaaatgggggtgcaagagaagcttggatttcccattaactgtcaatacagtcatggttccacctggtatctagaaacctgttcacaattgtaggtttagcagcacacagggtggggtaagtgtctctccccatcaggagcagcctctgaactctcctgggaccctgagcttcagggaacccaggctgtggcccccctcccccactttggcaatgctgtctgcagagggaagggccggttttactagcacagggagtgctccggctcctgtgtgtcggggaaattctggaagaggctctcttccagaagttatggaaggtccccgggagacagaccaccagtttgggccaaacccctccatctacatgaaacaacaacaacaacaataataatgtttacggccaggcaccatggtttatgcctgtaatcccaacactttgggaggccaaggcgggaggatcacttgaggccagaagcttgagaccagcctgggcaaatagtgagaccccatctctacagaaaattttaaaattttttgttgtggtggcacaggcctgtggtgttaactgtttaaaaggttgagggtggaggattgcctgggccaaggacttccaggttgtgatgacctatgatcgcaccactgcactccgccctgggcaacagagtaagaccctgtctcgaaaaaaaaaaacaaaaaaacccaactcctaagattacaaaaagcagtaaatatctattacagaacagaagaaaataaaaatcacctttaatccagcacccaccaataagctctgggatcactggggggttatttccagcccttccccttcttttctttaagtttttgaaaattctaaaatattctaaagtagaacagaaaagcatagaaaataatattgcagacacccacctctcaggttgaacaaaccttaacattgccatacctgcctctcttctcttttctttctatctttcttagaaatagaaatgattcaggtccagaaggagtcaggacagtgtggtctactggccaaacccagcccctcatctgtttctgtatgacttgtgagccaagaatagtttttacatttttaaagggttggaacaaaaagtcagaagaaggagaacatagggagttatatgaaattcaaatttcaatgcccataaataaagttttattggaacacagccatgttcattcatttgtgtattgtctatagctgctttcacgctacaatggcagagttgaatagctgagacagagaccatatggacttgtaagcctgaaatatttgctatctggccttttatggaaagtttgctgacgcccaagatacagctaaagccacctactctctctccaggcataactggccacctaaaggtggtgggtatcctgcctacatgtgctttctgcttttacatagaagcctatgcttccaagtgtgtcgaattgcattgtgtgtttaaaaatggatatggtgaaattgcacatggcagagaggagcaaacacatatggacaccctgagacctccttagtttcctgaactccagcagcacagagtaaatgccagctctctgccagccctggaatgggccctgcagatgcagagaaaagaatcgtgggaagaaaactccagaagaaaaaatggggaaagtgacactgccgactcaaattactagaaatcctcagaaagtaaaaaaggaaaaagaaactcagggttgagagaagactttgggccggtgaattcatccttggagtgttcaggaaatccagagatttttggaaggctgggaattctttggaagtgaggcgtgtctggagataaggaataggaagcatgggctgtcaaaagcaattgttagggagctcaagtagagaagcaaaaggaaaacctggggacaaggtcgacagatgctgaaaaccttgtaggatttatactaggctacaccagactattaacgcggccaaccagagaccaacaagggagcaaacccttgcactgtccttgcggaagggccctacccagcatcctgggatgtaactgggaaggatgtgtctcattagcacctctgccccacctctggaataccagctccaagccaaacacgtcccctctgagcagctgctgtgccctgcccccgagtgctctatgttgaggatcctccgggcaggaatggtgggctggatgctgagccctctacagttgtccccatgtccctctcccaccagactccactccccagcagcagtgggcaacctcctctgattctgaaccacctcctgagcttacagaccattggaactcgatcccagttccctttaggagacagcaggctatcatagttccatggcctcaggacactgtacctgtaccacctccaaactcaacatcataaaaccaaaacgtgaaatcaacatccctcatctctttctgccaggtagctgggactgagctgggccctggggacatagagagaggccaagggccaggcgcgaactcagcttcctgagtcacttgggagcactgtcttctcactcatctctgcacagtgccattcctttcccacattggggcaacccttagattcagagatatccgggcttgaatcctgttttcaacgtttcctagctgtgtggtcatggtttgaacttcagtttcctccgattaaaggtggagctgatgtttcttaattcaggagtcgattttaggataaaaatacaaatacgtggcacagtcattatctctcttagatctgtttctccacatttcctggtgatccatttttattacatagagacaactagttgttttttagaactatttgttgaaaaacatatcttttccagcatcaatttacctcggcactgtttttgaaaatcaattgcccatgtatgtatgggtctatttctagactctattctgttccattgatctgtatgtctatccttatgctaatactacactgttttgtaaattagctatgtttcaagatcaaagtacttcttgagaccaggtaatgtaagtcccccaacctgtttcttctttctcaactttgtttggctgtctaggtcctttggtttgccatctaaatttaaaattcatcttgtcagtgtcctcaaaatttttattttggattttgattgggattacgttgactctatggatcagtttggggagaaatgtcaactaagcaatactgagttttccaagccttgaatgtagtatatctctttatttagatccttaatgtctctcagcagagtttctgagttattagtctcttatgtgttaaatttattaagtatattttggtgctcttggctaatcactgaagtggctgagattttactttacttgcagctaacaagttaaacaagtagtttcatgagtgctggcggaagacacgagacccctgggtcagagacaaaggactctatgatccatggcgtagcagatggaataagcttcaggtttatatcagttccccttcccgctaacttcctagtgctattgtagaacataaaatcatctatgctagaacataaaatcatgatctattctagaacataaaatgatcttctttgtagctttcccaaattataacctcatgtcccctacaggatcttatatacagtctgagtcaactgttctagaggctaaaaattacacaaaggactgaaattcagttttgctttagtatcaaatcattaaattagaactttggagataagttaaaatttgacttccaagttgtcaaatacagaaaggtaaagaaagtttcaaaatgatatggaaaagccagtatgtacacacttaaaaccttatgcctgtttatatttgttagaaaaaataagcctgttatttcatatagccatgttgttctaatttaataatatagatttcaaataaacatgggttggacatggtggctcatgcttgtaatcccagcactttggaaggccaaggctggaaggaggattgctggaggccaggagtcggagaccaccctggccaacatagtgagaccccgtctctaatgaaaataaataaagaaaagaacaaaagtgcagaacattactaaggtggaaatttggggggaaaatagtttacagttaatgaatgaaatgaaaaataagatgaattaaataatacatgtggatatttaggttttgataatcatggttccctctggagtgctataattagaatttatataccctaaagaagtattactgatgtacttagtacctatactaaaggtaaaatacacagagtgtggagtgactgtatgaaaggataacatgtgtacagatgtgaaaacatctccaagctatattatgaaagaagcaaccaaggtatcctatatttttgtggttttcaagctctatcgcatatgtcttttgataaaaggtgcattatggagaaagagcaaagcttaccttatatgggaataagtgtggtatttctaaaaggaagctcttctcttttattaagccatttgtagatttgaaagaggagagatgggagcccttgaaattccatagtcctgaatcagacgatgatctgaacctgtatctctctatctttactttaatgtaactagaatatgttgagcctggatccatggatgtattagtgcctgtggctgctgtaacaaattaccacaaacttgtaactcaaagcaacagaaagttattgtcttacagttctgggggacagaagtctgaaatcattttcgctgggctaaaatcaaggtgtcagcagggctgtattccttcttgaggctctggagaagaatccatttccttgcttttgccagcttctggaagttgcctggttccttgtctcatagccccatgtcactcccacctctgcttccatcatcgcattgctttctctgacctgcctatctccttcttgtaaagacccttgtgattattttaggcccacccaggtaatccaagataatctcctcatctcgacatccttaaattaatcacatctgcaaagtcccttttgccatagaaggtgacatatcacaggttctagggattaggacgcatggttccttggggaacattattgtgcgtagcacaggtgggtaaggtttagtaacctccaagcaacacctctcctccctgtcccagagaggcgtgcctaaaggctgagctagaaaaagtgtgcagtggtatgttctcaatcataagtgagagttgaacaatgagaacatgtggacacagggaggggaagatcacagggaggggaagatcacacgccggggcctgtcggcgggttggggggccaggggagggagagcatgaggacaaatacctaatgcatgtggggcttaaaacctagacgacaggttgatgggtgcagcaaaccaccatgtcacatgtatacctatgtaacaaacctgcacgttctgcacatgtatcccagaactaaaagtaaaattaaaaagaaaaagtgtgcagtgggagccaggagagctgccaatttatcaatgcattattttagcaaactctttatttggcttcatcccctatccccagccccaacacacacacacacacacacacacacacacacacacacacacacacacaacactcttaaatagacgtacacagaggcataagctggacagctcttcgtctggaaagttctaacaatctgaagattccatgacttgttgcatggtgtgttttgtttgttttcgagacagagtcttgctctgtcacccaggctggagtgcagtggtgccatcttggctcactgcaacctctgcctcccgggttcaagcaattttcctgcctcagcctcctgagtagctgggattacaggtgtgcaccaccacgcctgactaactttttgtctttttagtagagaccaggttttgccatgttggccaggctggtctcgaacccctgacctcaaatgatccacccaccttggcctcccaaagtgctggggaaaagcactttggggtaaattacaggcgtgagccaccacgcctggcctgcatggtgttttttacctttggcttcctgctcagttcacctggcccctccctcggggagcactagccagttcactttccacgtgggagctatgtttccccacccacaggtatgttcctgattcctgatctttggacttctctgatccactttttctttctttctttttcttttttttagacagagtttcactcttgttgcccaggctggagagcagtggcgggatctcagctcactgcaacctctgcctgccaggttcaaatgattctcctgcctcagcctcctgagtagttgggattacagttgtgcgtcaccacacccagctaatttttcatctttttttttttaatacagatggagttttgccatgttggccaggctggtcttgaactcctgacctcaagtgatctgcccacctcggcctcccaaagtgttgggattacaggcgtgagccaccacgcccagccagatccactttttctaactggccatttgtattagtctgttttcacgctgctgataaagacatacccaagactgggaagaaaaagaggtgtaattggatttacggttccatgtggctggggaggactcagaatcatggcgggaggtgaaaggcacttcttacatggtggtggaaagagaaaatgagagagatgcaaaaccagaaacccctgataaacccatcagacctcatgagacttattcactaccaccagaacgctatggggaaaccgcccccatgatctaaattatctcccaccgggttcctcccacaacatgtgcgaattatgggagtacaattcaagatgacatttgagtgggaacacagagccaaaccatatcaccatttgagctgttgttgatttttttttttttttgagatggagtcttgctttgtcgctaggctgtagtgcagtggcacgatctccactcactgcaacctctgcctcccgggttcaagtggcacgatctccactcactgcaacctctgcctcccgggttcaagtgattctcctgcctcagcctcccaagtggctaggatgacacgcatgcattaccacacctggctaaatttttaacttttcttagagatggtggtctcgctgtgttacccaggctggtcttgaactcctggcctcaagcagccttcctgcctcggcctcccaaagtgctgggattacaggtgtgagccactgcacccaggctgttgtggattttaatttgttttgttttgttttctgattttgtattttctcttccttctattcttttctcttcagatgtattcatcgagtacaatttgtgctgagtcatatcacctatttatattttaattttactattagttttgggaagtcttaattatttttcattcaggaaattgtacagtcatctgtttccattcatagcccgtccccttctccaaagagaacgtctgataacaagtttttggctactgtgtaatatgatatttttctatgtaagtgcatgcacatgtaaacaaagtaaaacatcatattaatcacatagacagcaagtgtatttcagcttaaagggtccatagtaagccttactttttttttttttttttttttttttggagacagagccttgctttgtcacccaggctggagttcagtggtgggatcttggctcactgcaacctccacctcccaggttcaagcaattctcgtgcgtcagcctcccaagtagctaggtttacaggcatccaccaccatgcccagctaatttttgtatttttagtagagacagggttttgccatgctggccaggctgagtgttggccaggctgatctcgaactcctggcctcaagcaatccgcccaccttggcctcccaaagtgctgggattacaggcgtgagctaccgcgcccagccagccttactttttattttgaaataattatagattgacaagcaattgcaaaaccagtacagagaagtcccaagaacccagttttctctgatggttgcatcttacataactataggacggatcctccagctgcagttgccctctagccaaagacccaccaagagtacacctctagttgaataagttgcatttattactcattgcagtgagggagagcacgcaccatggggcatctcagaaagtgtgtgttaggaagaacctagtataggatttgggttttggttgggtgacttgggggaggtcgaagggagtgggattcacactagatgaattgcatctgctgtcagaaggcagaggcaagtctataactgtgtagcttgagtcctatctctagggagaggaggctggcattgggggctaaagctgtgactggtaaagtagcagcagtcactgctttcagccaagagagggtgatgattggtattttgtgggtggcacagtgaccttgtctttatgggttacttcaacaaaaattaggtagtgaccttgttttgtctcacttcatcatggcctcagagtaaccttgtctgaggttgtgtcttttgcgattatgtctaaaaggagaataacgtggtatagccgtgaatgccaagccagcttcccgatgtcaggggcttttattccagatctttcgtgtacattggtaccatgcctgcgtatagttctctgccatttcatcatgtatgtagatttgagtaaccaccactgcaatcagcatccaggactattccatcaccacgaagatgtcgcttgtgctccccctttaacatcacatccacctgcctgccccaccaccatccctaacccctggcaaccactaatccgttttccatctctattgctttatccctttgagaatgccacgtacatggaatcatacactatgtgaccttttgatactggctttcctcgctcagcataatgcccaggagatccatccaagttgtcgtgtgtatcaatagtgtgtttcttttttagggctaagtagtattccatactgtgtgtatttgttttctatgactgctgtaacaagttaaaacttagcggcttaaacaacacaggtttttaatcttacaaccctgcaagccctctggcatgggtcttgccagaccaaaatcaaggtgtcagcaggctgcgttcttttctaaaggctctagggaaaaacccatttcattgctaattccttgctaggggaattcaattccaagtggttgtaagactaaggtttctgttttcttgctggctatcagctgagggctgttcccagtttctagatcaaggccatccacattccttggctcgtgaccacctctgtctgtgtcaaagctggcaacagcagatggagttcctctcaggcttagaatttctcctgcctctttcctcatcacatttctctgactcaccttcttgcttccctcttccacatttaagaatgcatatcatttggccgggcacagtgggtcacggctgtgatccaagcactttgggaggccgaggctggcggatcacttgaagtcaggagttcaggaccagcctagccaaaatggtgaagccccatctctactaaaaatacaaaaattaggccgggcgtggtggctgaggcctgtaatccaagcactttgggaggccgaggcaggaggatcgcgaggtcaagagatcgagaccatcctggccaacatggtgaaaccccgtctctactaaaaatacaaaaattagctgagcatggtggcacacacctgtagtcccagctactcgggatgctgaggcaggagaaccgcttgaacctgggaggtggtgattgcagtgagccgagatcgtgccactgcactgcagcctggcaacagagtgagactccgtctaaaaaaaacaaaaaacaaaacaaaacaaagaacaaaaattagccgggcatggtggtgcatgcctgtaatcccagctactcagaaggctgaggcaagagaattgcttgaacccaggaggcgaaggttgcagtgagctgagattgcaccactgcattccagcctgggcgactgacctagactccatctcaaaacaacaacaacaacaaattcttatcattagattattctcacctcgataattcaggatgatttcccatctcaaaatccttaacctcaaccacatctgccaagttccttttgccatgtaaggcaacatattcacaggttctgggaattaagagtgtggacttctttgggggaccatcattctgccttactcattctggatgtaacacagtttgtttaaccattcatctatagaaggatgtttggttgtttccagttttggggctattaaaaataaaggtgctgtgaacattcttgtaaaaaaaaatggtatataagtggattacacaccatttccttttgcaactgatttttttcactcgacatcatatttctgagttgtattcatgttgatctctatagctctaggtcctttgtagtgccattgtgttccatgtgaatagtgtcctcccttccttgctgtgtaatgttctattgaatgactgttcccctattggtggacatttaggttgcttctaactttttgctgctacaaagagtgctgcggtcagtatctttgtgcagatctccacgtgtgcaggatgaagcagttttcttgactggatgagtaggagggaaggttctggccctagcacatatgtgttgtcggttcctactggctattgtgtaattgttcttcaagcccttttcactccatcagcagtgatgaaagtgttctgtgcatctctgccaacatttggagtcgcagttctttttaatttctagactggtttctttttcatttcttttacttagtttcttttaaattctggactggtctaggacctttccaaaaggtatgaaatggcatctgagacttttaatttgcattttcccgatcactgccgaggacacagggacaccccagtccagcacctccttgttctacactcttgctgacttcttttctcctgacgttagcgttaagaggttgctgcctctacctgcctttaagtattaagatctgggcgatgcaacccgacaactgaaatttggtgtcttgtctgaaattacaggatgttcctcaggccgccgtgtttccatgggaacaagtaacagtcatccttcatgattaggtggtaaccatggcaaccaagccagcagcatttgaatgaaactgattttattttatttattttttgcaaacacatgaaggttaaaatgcatttctccagctgtggcttccaagaataggaagacagcctggtaaatggagaccctttccacctcctagaggaaaggggatccaggatcagctggtcccatggcctaattttgcagactaggtgaccgagaggtcacatagaagtcatgcaatgagtttgagccgaggaggaaagactgctggatcatgctcgaaggtctggggcgcactcttaagagatcggctgggtctcccttcccgtgatctaaccctaggaatgccactttcatactgtgtgatcttagcagattcacttcacctctctgggtttctactggcaccagctgtggtgctagacctatgggaccatgaggccaggcctcccagtgtctgtttgcccaaattagaaaagatttgctgcaaaatgaaaggccaaaggcagcatgctggggcctaggaccccgaggctgaatccccagggtccagagttagaactcagggtcagttccctgccttcttttcctgtgtaaaataatagagggtgtgtgtgtgtttttacttggttccaaggactggagatgaccactgctcttactccctgactcattggattgatgaaatcagctcagagagagaaaggggcagccatggagtcacacagcagagtcagggttgaatccaggctcctggtgtcagcttggctcctcacccaaccccatgctccatgtcccctccatcttctctggggctggaagtgtgggtttgggggcagtttaagggactttcggcatatactcttgcttcttccctggaggacttttagaggtagtcacttttgcttctcagaacttcagtttctccatctggaaaatggaactcactatagagctgcccaggttgtcctgtgggattacatttgaaagggtccagaacatgcattctcagcaggggcgagattgcccctaagtgggcaaaaagttggttcttgggctagaagatgaaaaaaaacctttctgtacaaagcccagtatacacacagtacataaaagatactgtatgtctgtgatattaaaattttatggaggggaaattaggaaaaaagtgtctaagaagacttttaagggagagcgacaatgaaaaaacattgagaaacgtgggtccagaacccagcgatccatgtcttcattaactttgtgtttagagcttacggcaggtggctggctccgtggggaaggtgtgtggggtgtcaggtcaggagagagcctggcctggcccagactctgccctcgatgttcagtgtgaccacgggcacatcacagctcctctcagggcctggtttccccatctgtgggtaaaggaggtcccatcagctccatgggtgactcccaggcagttgagctcccacctggtggatcagttcagggtctggagaaaagcaggtggtgcctcagactatggtgattagaggagcgtttaatagaggggctgcttatgaaggcgtgggcaggcctcgggaaccacggggcagtgcaggaccccaaagctagggacagcgggggctgcttccctgaggccccatggaggaggggagagcgtggttgctgggaggcaaaggtccagaagatagggtcatcccgatggtggctgggaccttccgtggaggaggcaggcagcccagatgactctccctcctcccctcatctcttgccagggttcctctttggccaaaccacatggaagttgagggtctagaagctcagatcataaagtctatacaggccagtgccctggagcagaaggcagtgcacagagacgtggagaatggaactaggggccacacaggagatacctgggaaggtgccccaggtttccctccagtttcgtatggagtgcaggccttgccctgggtgtgggctgggagactggagaggtcagggaggagagccagccgccctgtgcaggagggagagtgggcccctatcctccggccacctgggatccttgcggccttcctagcttctcaggtggaggggtgtagccagggcttctgaatggaagttaaagacttctgggagcactctttgctatagacctgttgttgagggatcacacacacatttctttgcttctggtctcagcttcatcatctgtcgaatgggagattggaccaagcaacctctgagagcttcctggcccagacccaggaggcaagaggcaggattctgggcatcagtgttggtctcagtggaaagacatcctcaccgggcacccagtgttctaccagggcactccatgcacctcttgcctggagtggtgagggcccacctacccaggaaagtgtaaagctgtggccagggtggtgtgtgtgtgtgtgtgtggtgtgtgtgtgtgtatgtgtcaggagagggagggtagttcctggaagctccagctgcttttgtcctggtgatcccaagacccctgtggggcagcctgactctgccaaccaggttccataactgcagtgggtaccccgtgtttgttggtttgatggaggcatcttgactaagcactgcagggtgcctggctctgggtgggggtgggaaacagacaacccatcttcctgctgagtcgccaagtagcaagtctgcagggctgactgatgtgcggggttgtgagtcatccttcctaaagtgatctgggcgcccccagcattgccccagagctcaaaggatgacagttcccgcaggaggccattccagggaagagaattctagggagggggagagcataggtaaaggtgtggaggtgggacattcctgcatcgtggcaggtacagcaaagagggttagcaagaacagaagccagagagtgtgtgaggtagaatggctttcggtgccaaggtgaggagtcccttctttctgagggcattgagggcattagaagcagtcgggcttagggtcctgactgtgcctggcactgcccatctcccacttctaccgctttccctagaaaggtggctgaacccgggggtctgcctctggctaaggtttgcatcctgagactaagccctgagtacctcctatgcgttggccccttggctgggtgttgggacccatgggacttaaggctgaaggagccatggactcggtccagacacactggaccctcattcctgttgtggtgctcagtagccctgtgaccttgggctggtgactgcaccctgagcctcagcttctgctctggtcattggtagcttggctgagtatagcagatgggacacaggttatgggtgacagcctcccagagggaggtggcatgtgctgtcacagaggacaggagggtgctccaggtgggtggtgcgaaggggtgagagatgaaggcagacaggaaagcatgggaagaattttcctagcaaaacctccagaaagagtggttatcccctgactgtgactagagagattgtggaggaggaggtccaaggaaagttctaagcaggaagcaccgtgcgggaacagcaagggccttaagagacggcgccaggctgaggatgagccatgtgggaagggagcttttctggaagaggcgcctggggctggatggtctggacctggtgtcaatgcctgccccaggcctgcctggaggtcagcgggcctgaaccagtctcaggacagctttgcctgcttggccatgagccaaggctcaggatgaagcctgtgcttctgtggactcctgtccatgtgactgtgtggagggaatggcctggaaagcacacagtgccccagcatcctgttctgccttctggaaagcctgctccttgtgtgaaccccatgtcatctgtcctgtgtgtgtgtgcgcacgtcccctgctcagtaggtacctggggtgggtctgggagtgtacacattggagtatctgcatgaatataaacatgcacatgtgtttgtctgggcattaccgtctcactccacacccctgtgtgttcacacctaccagggaaacctctgccctgtccttcttctcccttgcgagtcaacaggtctttcccaggcaccccccacgcaccaggctccatgcagggtgctggggaggtggagatgcaaccagcttaggcgtaggtgttaggagttctgcagacgcacacacacacacacactcacacacacacgcacacacactgcaaatgagagcgttgataggagactcaggtctagttattgctgtaggagccaaaagcgaggcaagagctggaagtagagggggtcacccaggacctcctccagggcctgcaggatggaccaggctggggaaggggagcaggaagggagtcctctgttgggggccacctctggagcaatggcaaagaggcagctggtgccacgctgttgtgggggaaccagtgaggaaagtggccaggttggcaggttggacagactcaggaggttttatgtaggtgtgctaaggccatgactaaaagttttcaatgagctgtcaccatttaagagtcagaatacttcatattttgaaaaacccagattatcagcctctcttgaaccatggcagctatggctgccctgagcccctccttgtgatgtagcagtaaccaattagcgccgagtggctggctgctttcctagattctggatttcctgctggcctctgtaggcctcccaagtttaaagcctctggaaaataactggaagccagaagtcacagattctcatgtttgaaaaaacgtgggggctgacatagtggctgagccctgtaatcccagcactttgggaggccaaggtgggaggatcgcttgaggccaggagtttgagaccagcttgggcaacaaaggaaacccccatctctacaattttttttaaaaaaattagataggtgtgttggggtgtgcctgtggtcccagctacttgggaggctgaggcaggaggattgctcgagcctaggagttctaggctggttgagtatgattgcatcactgcactccagcctgagcgaaagagtgagaccctgactctaaaacaaacagaaaacttgagaagtcatccaagctccccaagtgtggcatcccaggagatggctcagttatctgtctgcttatatgcctccagtgacagggagcccactacattacaaggagtgggggttttggggaacctttccccccgcttttttttgagacagagtctcactctgctgcccaggctggagtgcagtggcacgatcttgggtcactgcaactttcgcctcccgggttcaagtgattctcccacctcagcctcccgagtagctaggactacaggcacacaacaccacacctggctaatttttgtattgtcagtagagacagggtttcaccatgttgaccaggctggtttcgaactcctgacctcaggtgatcctcccgcctcggccttccaaagtgctgggatcacaggtgtgagccactgtgccaggcctttttcccccctttttaaaaaattgcgataaaatatgtaaaacataaaagttatcattttaactagttttaagtgtacaattcagtggcatgaagtccatttgtaatgttctgcaaccatcaccactatccattcctaaaactcttcatcaccctttacagaaactctgtaccattaagcaataactccttgttcccctctctcatcagcctctgctaacttcaaatctgctttctgtctctacgaattggcctcttctagatagttcatataaatgggatcatacaaaatatgtccttttgggttactcagcgtaatgttttcaaggtccatccacattacagcttaaatcagaacttcattcctttttagagcagaatggtattcctttgcatgtcagtaccatgtgtgtgtgtccattcttctgctgatggacccttgggtttccaccatttggctgttgtgaacatttgcatacaggtatttgagtacttgttttcaattattttgggttatacccaggagtggaattgctgggtcatgtggtacttgtatttttaatttttggaggaactgccagacttttccatagtgcctggaccattttctagggaccggtttgtctgttgtcctgactgggatgggagtggcaggaggccctagctgtgtggccttggctgttcttgttcaacctctctctcctcctctgttggcagagtcgcctcaagaaaggccgggctctcggcgcagcctgcctggcagcctttccgagaagagccccagcatggagccctcggccgccacgccgttccgggtcacggtaactatctctgcgtcaccaacaccgccactgccaccaccatcaccacctcgcccggggtgctgctctgtgaccccacggccccccttcctggagcctcatggacccggagagcatccggcctcccttgctctaggtatccgatccctcagctgctcccatctccgtggctcagccctggtcccgggggccacatggggggtcccatcctgagagggagggggcaggtggaggacagacagcaccgaaggctatggggcccagcgctgagctggcccggaaagagaagaggctcttgttagtttagataaatgtacccttgagggcgcacacacactgtgcttctgcaaccccgaaaagatgcactatttttgtttccatatattttaacacctctcatggcataccataatttaaatctttcttggtggtacataaaataatgctatatattataactgatgatggcttagaaccgacaaaacacagaatatatatcatagctattgaactgagtggtccccacaagcacacagactttttaaaaattacaaacctaaacaactttatggaaacagaacccaatgacccttaacgtctgactgttcatacccttctgcatttgtgcatgtacacacacacacacacacacacacacacacacacacacaccagagttctgggtcccttcactccctcgttcaggagcattactgtgtgtacctctctccagggctgtgccaggcaccagaaacgcagcgatgacatagacacattcctttctccacggagctcaggtctgtaggtcaggtggatgttggatggtttgttcatccattcattcactcatcagttattctggcatgcctgctgtgtgcaagcagaggaaagaaggttctgggtggcaggaacagagagtgtgcaggcctggctgtcactggatagcatcatataggggctccaggggagctggaagtgattggctattcacagtgggttgggagggggtcccacgggagctggcttttgagctgcatcttgaagggtccgtagaaaatggctaggcaaggacagagagagagagagagggacttccggggagggagaacagcagttgcaaaggtatggaggcaccctagaaatttcctctgcttgccatagggctggctcctcatcccttgggcatcagctcagatatcagctcctgaccacaccacctcaaggaagccctcttgcttttccgccatcacagcagcctgctcttctgtttcctaatacttagtgtcagcatgagaatgtgagctcataaggtcaggggctgatgtgtttgtggcatgcagaactgcttggtggagctggagttgaggggatctggaggacagtgtaggaggtgaggctgggaggcctggccgagtcaaggtcacgtggaacctccagtaccaggccaaagggatggggctttccccagggccactgattctctccactgccagtatgttataaaaatgccttaaaaactagcttattgtccttctttaagatttcagtccactgggccagggcagggcctgggaacctgcattttaacaagctttccccaggaggtgattctgagtccccagctgggggttgagcccatgggcaatgaggaggaagcctgcgctgagacgattcagggtcatggccctgagtttggccagggggtctcaggaagctggtctccagcctgcagggagcgcttggaggctgggacaagggtgacccccatcagctggagcgaagaccaagttctgatctctctggatccctggggccacagcaggcagggtgggccttcagggggaccctagggaacgatgactaataataattagtaatagtagccacctccattgatgaagtgcctactgtgtgccaggcactgggctcactgtcctacatccctgatctcttttttttttctttttttttttttttttgagacagaatcttgctttgtcgcccaggctggagtgcagtggtgtgatcttggctcactgcaacctctgcctcccgggttcaaatagttctcccacctcagccccccgagtagctgggattacaggagcctgccaccacccccagctattttttgtatttttagtagagacggggtttcaccatgttggccaggctagtcttgaactcctgacctcaggtgatcctaccacctcggcctctcaaagtgctgggattacaggcatgagccaccacgcccagcctacctgatctctcttcatccaggagacacacctacagctgaaacattggttaccccatttcccaggtgaggaaacaggttccgagaggtaaagtcacttgctgcccaagctccaactgctactaagtggcggaaccaagattcgaccccaggtctctgtgactccagggcatgaggcacacccatcctcaggctaggaggcggatccattgccccacacccccccagaaccccatcagcatcgcttttccggctatttccctttctgagttgctctaataggggtattatcacaccttaaagtttttataatttgcagctctttaagtgacagctaggatcagtgttttccctgtagtggtgtcttcattctgtctcccagggtagaaaccaccttcagtcagagccagccttgggaacctcgagctgcctgggactcaactcgcagtcccacctgcccggttagggtctgcaggatggagagcgtgttcaaggtggtcgttttgcccacttctcatggcaaccctctaggggaggcaccattagtgtgcccatttcacaggtgaggaaactgaggttcagaggtgaaattctttagctggtgtcactcagctcctgagtcaggactgccggacatctacgttttgtgtcctttcctgggcaccttggtccttaagagatgtgatttgagattctcttctgggctgggtgctgggagctgaggggactggagaactcagaggtggggatctgggttcaaatcccagatcttccatgacccatgtgatttcagtagccactgagcctctccgagccttgtgttcttgacagtaaaatctggaatgacagactttgcttggactgtggacttggtgaatgtggtcgcccaagtctgacccatggtaggtgcttcatggatgaaatccatcattaacatccaaatcgggtttccatttttggctgtaaaacatcagtaaagatctaggagggttggagtacaggcagaggacaaggtgtttgggggaaggtcagtggtgagcctggcctgggccttggggacagtccctcacacagaccctgtgcagggccagaagcaccctcctccctcccctagcccgtagcacacacttgctcacttacaggctcccaaaagctatgtcctcacgtgctcagctgacttttgctctgtgtagaccctcgagggaacccaggaaacatggttttgcctcggggaggcaggggagatgccacaggatgtactggaataactgccaccttcactgccatttcaaacccagatggcaggctgtcagcatctcttacaggggtgctccgcagggagaatcaatgagtcacggtgtaaggtctacaaggctcagcctgtccaccttctccatggaaactgaggcctgggaagggcttgtcagaggtcaccacccagctgacagcagttcaggagcctgggttgtttacaccatcacatgccacccctcctcattttgtgagtcagccgaggacctgcagccactctgtagggcattgaaggctcagtgctagtcctgcccctgcctcttgtagactgtatgaccctgggagagcctcagtttccccttttgtgaaatgtgggggatggactttgtaaggcagcgtacagttcaggcataaataggtgcttaaatgttctggtgcagtagctaagagaatgggctctagagagttccccgacccaggtttcaggccctgcacagcctcataccagctttgtggcttgctcaggagtggaacttttctgcctatctgggacaactccctccctcctatagggagagttggggggtaggggagtggctctccaggaccacacagtgctacgaggctggcatgtgccctgcaagttatagggggccctgaatgaggatgggggaaggggcctgggagtagatgaccagagaggcttcctgtgcatctgtggccatcagctctcaggctcctgagattcaaacccaggtctgtctgctctgtgccagtagtgtctcctggaagggaaggagggaagggtggcaggcagcaagctggggccctggatctgcatagaccaatggtcagactgggtctgggggctttgcatgtgcccacccagcttccccaggccctggaccccttagcagcaacagcatgctgttctttctctcctgccactccatggcagaggagccgtggtttgatttgggaggcaaagagctgatgactcttcctggtctccccacgagctccttagcctgctcccttccccagccccaaacttccctgttgcgggctgggtccttcctccctccctccttcctctgcccccacccccctcccatcaaccttgaggatggctggcaggcctggggtgtgggaggtggcagaggctcagggaaacttgacagccaattgattcctcctcgggaagttgaaagtggagagtcgtgtttgaaggtttagctgaaattaggtctcagggctattttttgcgagatggagaaggagaagtgtcagggaggggaaggcccaggggtctggcagaaactgcagataaactcaacattgggttgattatggatgcttctaggagcaggtctttggtttctttcaacaactcacttttattggtgcttggttgtgcacaccctgcataggatgctgtgacagaacaaggaacagttatctctggccaggaaggacagggaagaattcttaaagaagggactcttggggctgggctttgaggagtgtataggagttcgtcaggaaccaagggagaagagtatttcagttagtgaagtgaatagaaggaaacaagctaatggccctgtgtgattggagtgctggatgggttcagggcctggagagaagagtgagagaccttggtgggtgagctaaagcctttggactttcccctgcaggatacaagaaccacagtggatgatggctgtgagtggagctagcagtagacctctgagctgtggacctcaggttttccagctgctcaccccttttctcactcctgtagcctccctgcaccctccccatgtttcagctgtctttctgtcacacaaactcaagaaacaggcatgtgaacacaaacatgcaagctagtgggtgaccctcccgcccatgtcaccatggaaaggctgttggaaattaactggttcaacccttccctatacagaggagggactgagaatcatagacgggagggtcctttcctgaggtcacacagcatgtctagggtagggcctggagttgagcccaggtctctgtccctctcccccgcatccagtggtcctcaccccttactccttcctgtcctctcctcccagcacctggatatcagccaccccgtctgagctgagcccttctcccagcccccatcacatttcctgggaggaatgggtgttctttggtccaactgccctcggagccccacgacagctccttcccgctcatctgcacactgccccctcctggccaccaggccccagccccagctgtagagggacccgaagtttgggctgcgggctgcctgaaggaggaatgcatgacttcaggtccaggagggggcattctctgctccctgcagagccggccccgctgccccccatttgtgccccttccaagctacggaggctccgggtggctgttggggtggggaacagaaaagccagccaggctcacagatcagacaagccagatctgtcccagggtatatggggaaactgaggcctggagaggagcagcttgcccaggatacttgctggggctccctccactggcccaggctgctgtgggtccatctcagatggtcgttcacttgggacatatttatgtttgtggcccatcaaccagtggagggatgtcagccacgtggtcctggctgtaacagggcggtagtgctggacccctgggtggggtcccaccatgggcgccccagttttctccttgaagtatgaggaatttgcttagttctgctctgtgagtcagtctcctgacccagcatccggcgtgtattcagcggatgggcggggtggtggaagagcaaaccctgccccctccgccccctccaccctcactccctccatccctgcccttcacggaggctgattggtattaaactattcaaacccaaaaggaacattaccgtcattttggtctgtgtctgccttccgcggggggcatcccccttttctgcagagggagtgttggaaggtgggactcaggagttgtccggggtggccagggtggggcaaggatgttcttcggggcaggagtctggggacagggggtcttggagcctcctgaatccaagaccaggctagtctgaggcctgggacagaggtgggactgctgcagtattggtagggttgggaggctgtcgccccaccccattaatacacaggaaggtggtttcatcagctccattttacagttgaggatcccaggcttagggaggagagaggcctggcctcagcaggtctccagctggtgggtggtaggggcaggagcccagctctcgtctgcgagccttgctgcggtgtgaacgaacttactttcttctctccttttgcctttctttattctttctttcgataaatttgccatcatcaccaactatgtgtcagggcctatgccagtcattgaggatacaaagaggatgaaaacgtagttgctacctgcagaaatacagaagggccagccggggcttggtgaagtaatttccaggcaggtgaaggggaaaggacattccaggcaaaggccaggacatgggaaacagcatgagcaaatgacagcaggaactgagcgcagtttgggggctgaaatgtgaggaagtggctggaatggaagcgacaagagatccacggcagtgaacagagcagatgggatctaaggccatattaacaggagtatgaggtcctcagcaagggaggtgaggtgggccagagtaggccagagcagacatggagtgcagcatacttgaccaggctaggagagtctggagctccttcagtgggcagagaccaagactgggtggggatccagcatggggttggggggacaagcaaattgcttttctcaagcaggttctcaggagcctgttccaacccccccaacatctgtgctcagaatgcccttgggcaggggtagggggaagagcccacttcaaggatccctggaatcttctgcctcatcctggcaagtggcagctggcttgggcagtgtgagtgaggaggatggaagtgaagggaacaagccagcctctgtaccccctcctcttcctgccctggggacttccaaatacatcagaaggccatccctgtaaattccatttccccagccctgcacttaagcctgttgggcagcatggaatcagatgaactggttcccgttaaggtgtaaaggccaccaccccagtccctgccaggttcagtaactggcgagtggaatgctctctgtgggggcctttcttcctctcttcacacccactcagggtcttggggtacagtgctggcctctcccagggatagtccccccaacccagggatgaagcaggattagaatcttggccactgctcccttctgtaggatggctcaggcaagttgccccactctctttccctgtctgtaaatgggcaggaacccctccccacagagtggctgtgagggctcagtgcctggcacaaggcagcattccccacacctgttccctttgcttgtgtgaggggtgcacctccaccccacatttcctccagagccccaggtaactgggcagacccctcccacttccatacccttccgtcacggccccaaagcaacatcacccctgactgaacttctagggctcagccctggcagtagaaggtggagaggggctggaggggttcctaggggaccagagaccaagttcttaggtggtgagttcagatggagatggaggtgtctgcgcagggtggtttcctgccagttgggggcagcagagggtagcaagtggacttctgggtggctcctcccagtgagtgttgaagtcccaggggtttgtgtgtcaggggccacagggagctggcccaacaaggtgttagctggctaaacaaggtgtagaacatactgctgggggctgggagcagctcagatccgggagcacctgtcaatggctgggcctggcatgactggctgtgccagctgggcctaggttgaccagaaagccaggggttctgaaaggggaccctggtcagggacactggatggaacaaggtctggggctgggacagctgtccaccaagagaaagggcacagggtgaggtggaccagcatgtgatctgtcaggcagggctgctgcactgtggtcaccaggctggggccaacagacactcagtcactgccaccctttgatgggttataggcacctgttccacctaccactgctttgagagggggtaaggcgggcattgtgggagaggcagggtggtggtcagagcttgcactccaagtcccactggcctgggttcgaatcccagctctaccacctctgctgtctgtacgatgggggattttgaatcctgttctgcatagtactctgagtcaggccctgtgctgagcactttctaagtattgtctcatttaatccttacaactcgaggctcagataacacaaatctcactcatagaaggtgacaaaatcaaggcagatggggagtgaagagatagctgagggtggctcctctcatgggcctggatcttgaagttctcacagcgcctggaccatagcatgcagcccagtctttgctagtcagtgctgtttttctcttcatcttacggacgaggatgttgaggcccagagaggggaggtgcattgtcctgggccacacggcttgcagggacagagctgagatttggacccaggcctccccatctctctgccttatcttgtcctgcccctactttgagcaggcctggccctaggggtcagacacccctgggataggagagaactgctctcctcttgtcatcctgccctgtggccctgcaggtcctcccctttcctgggaggtgggggagcctgcatgtcaggggcaaggctcagacgccttcattttcccacctcctcatgctacaaaaatgaaacgatcaagtggtattttggtgggattacagacataattatatctgagttgtcaagcggcaattgttgtttccaaagccaggaggccctctgtggaggtggcagcagtgacatctgtttctaacacaaggctctgcatcgggatgagtaacttctcctgtggaattgcttaaagaacgtctaaaacgagctgagcttgttactcccctgctccagcaccttagatggctcccagcagggtgggggatccagctccccggcctggcattcaagccccccaggctgtcccagcttccacgcctttgtgtgggcggatccttctacccacaattcctccccatctctctctgtctccagagctcactagtgccatccagggctctgtccaggttgcagaacaccccatctgtacacgctccctcacggactctgtgacttcatgatccatcacttctgtctctcccaccagacggtggtcaccttctcaaggacagggactgtttctgatttgtctgaactcccagcactggggcaaggactcacctgtggcaggctcatgaggggcttgcggaatgaaggtgcacgagacagagagagacagggagtaaacgaattaaatggagtaagcgcagggtgagcagggaagagggtgagccgtgacctctccacttctgccagcccccacacttctgccagcccccacactgggtgtctgaggccagagtggtcccctgccttgggaggacaggtcaagacaagtgacccagcccaccagaggccagcaaggacaccagcccttgccttgaaaagtgccggacgtggtggctcatgcctgtaatcccagcattttgggaggttgaggtgggtggatcacctgaggtcaggagttctagaccagcatggtcaacatggtgaaaccctgtctctattaaaaacacaaaaaattagccgggcgtggtagcgcatgcctgtaaccccagctactatggaggctgaggcaggagaatagcttgaacctgggaggtggaggttgcagcgagctgagatcgcgccactacactctagcctgggtggcagagtgaaattccatctaaaaaaaaaaaaaaaagaaactgaccttgactccaccccatacccatgggccttctgaggccaggactcccaggtgaaccttggcccgcagatggtaaatcacccaggagaaatagcctataaaatcctctcctaaaatggtgcattttgtattctgtagtgaaaagggcttttaaaagcactgcttactcaggtggatttatggagtttcccccacccctccctcccactagtgtttactggtcctcagtcctggagctccctggggtcctgttttttccttggtggctcttggtccagggagagaaacaagatagcatctctttcctgccttgctgccttggggccccccgggccagctgggtgcctggaagtgcaggggaatcctacccaacagaagctccctgtggcccagcgcaaacctgaaagtcccaccattagtgcccatttgtccccgggagactccccccccatgtgttgtcacctgcaaatgggtcaccagggaggcacaacaaagctggaaagaattcagagatcagctagactaatccccgcattgtacagcagggaaactgagtcacagagcagcttaggtgctggctcaacgcctcagtctggtaatggaattacatgagagctttagctctggagcagcctgtctgctgtgttgaacccagctctgccgcttcctgaccgtgcggtgctgtgcaaattagttgccctttctgaacttctgttctcccatctgcacactgggttgtgagaattaaagagaagtcatgggaagctctaatacagtgcctgaagcttagacagggcttactaaacacatctgactaattctcagcagcgtgttggaagagccctcattagtattaatagcagagctgggttttgaccccagacttatagactccaaacgtggttttcttgccactcatgcagtgcacagagcacaggataggggagttttgctggggaatgagcactaaagtcagcaagccccgggaggactggctgggacctcagtgataggacgtgcaggcaggcggagatagtatagaccctgctgcaggggtgtaacctcctggtggaatcggcttccttgcagccacgaggccctgggtatccaactccccaccccttagccagggctggctgagagcttaaagagctgatgaggtgtttgtagccatccagacctctgggacaggcttattatgctaaggcaagtgtcagctggaggatctatgggacaatgagtcactccctggctgctctgggttgtcacatcccaagctgagaccttgggaatgcgtaactggtttctgttcgctgatgcccgcctaatcctgggcactggcaggtaccaggagggctctgctgacgtcctcagctcccctcccagcttcacctttaccctcttcaaatctgggctcccctctttttcctccgttagactctcagtgttccttagggttcccctttacttgggtgtcctctgccctggggaagggattacaagcccaggctcaggtggtggtgtataacttggaggctggagggacctgtgataactccaggggcctcccagggcagccagactccccgctgtcctacctctacacctctgcttatgctgtgagtctgcctggaatgcctttatgtggctatcctgccccagccaatctcagcaagcccacctgctgtcccaccttcaatgtttctaaaatgctgtcaaaagctgcctcctccagcaagtctgcccagattgctcccaagtgaaatccttttaaaaagccccacagagcactttatctttttccttttatatcattaaatatttgtgaattcattcaagaaatattgagagaatacctgccaggcgtccagcactggagacccaggttgccatggcccctgctctggaggctttacagtccagtatggggtgggggaggcactaaacaaacacacttataattacaactgtggtaagtctacagggagacctggcctagtgtggggacatccggggaggcctctaagagaaagactgaggaggtacctgaagggtgtggagagtcttccttcccaggcaggaggaacagcccaggcccttctggctaacggctgggctggtctctggtggtcaaaggaagtgatagcagtgagccgagatcgcgccactgcactccagcctgaggacagtgagagactccatgtcaaaaaaaaaaaaaaaaactatgaccatgaaagtgatcatgaccgcaatgatagcagttcgtatttattgtatgcagggaaatgggctaagtttcttccatgcgtgatctcattgaatcttcacaactacctcgtccccattttacagaagaggacacaggcatagaaggttaagtcatgagcccaaggccccagagccattaagtggtggaatcccctgctcccaccttcttccggaggaaggatgaaaattatttacattttacctggggattcctagagattgaattacccttaggacctaaagaggtgtgtcaaacagtggaatttcagctgtactgatgggcaggagaaatgtttagggcaggaagcttcagctcttgccagggaacagaactccaaaagtcacaggttctgggagctgtaagctgtaaaaacgagctttgagtgtgagagaagcaaacaaattgtccaaagtgaagccctgcgagaaaagcagggggagttatcttggaagccgttaagagctgttttcttgccttggtcctgagatctgggctcctaactctggagcttcctgggccacttgcccttcctgtcctggttgtgaatgtgagcacgtgagggccagcgtgtttagcttgtgtgtctgcacaattctgctggtgcctgatgatagctgagtacatgtgtatatttattggcttatttcagtgtatttgtatgttagcttgtatgtttcatggctgtgtatgtgtgtattcgtgtgtgtgctgatcaatgtgtatgtgtttgtgtgtgtctgtatgtgtggtggcactggggtacttgtatgcttacacatacatttctttgtgggatgcctttcctgtgtgcatttgtatgcatgcctgtccttgaacttgtgtatgtttctggccctgtatatttctctatgagaacatgtttaagtgtgtctttccaggcagtattttaactcaacagtgaccctagagtgtcagggtccagcctcttcctggggcttccctgaaggctctcaaggcctatgaattggttttctttgtttgacttaagtagtctggctaccttctccaggcggaatatgtggcgatctcactggtatgagattgtagaggattctgtgggcatagggtggcctgtgagtaggtggccaccaggaagtcaccaacttaatcccagcttaaggtgcctcccctctttcgcctgtcacagtgtctgacattccattagtgagtcattctccagctgggactctctttgatggtgcatacccttgaggggaggaggccagagaagcccggcagcctgctgagggtagagaccggggaacagggaaggggagggcaggaggaatgacgcatctgaaggatttgggcaaagccagagaattccctgatgccattagtgcctagcttggggcggcccaggcaccctggccctggcagctgctctgactttatagaatcatcaaatatcagcgctggaaaggagcttggtgatcacccagtctagcccctagtgttgtagatgggaagactgtggcccagaaagaggaagtgtgggcagactgggaggttcttgaagcgtggatgctgaagatgcaaagagcactgggcaaggagcaggggacccaggttctaatggctccgcctggtgacgctgggcaggtcccactgccctctgggcctcagatgtctcctcagtgtcactggcctggctgccctctgtgggccctcctgactctcactctgtgactctggaagcaggacccccaccacccccagcccttttctagtgcccccaccagcctgccgcggtgtcaggtcggcctgccagctcatgcacccagcatctctcccctcctggagccgagagaggtggcaggatctggatgggatcttctcctccctttcctgtttatttagatgtgcttttggcattcgggcaaagccccagaaagatattgagagacatgcctgtcaaaacagtctcccttctccaaggctctctctttggggatgggccttagaaactgccatgggaggagccgggccttggcggagggagggcccacagggttctgcctccatcctgagtactgtcttggggttccccagtgggcagctgagagcttaacgggtgacaaagttctgccaggcccacatgcccatctgcagcagcccaggtcagtctgttgaaaggggagagggtgatgaagacaggcctggaggaagaatgcaaggacaaatagatgctgggcttgggggaaggaacccgcccttgattgagcacctactatgtgctaggcatgttgctcagtgcttcgtattcagttgagaagcagtgcctttgagaccattggtgacgtggggctcccgggtgtccaggtggcggtgctgaaatgcagatccctggttccctaggggctgcctcctcggctgggagtgtggcacagacaaggacagcactgggcaaggttcccctccctgggggtgggaagcctccaggtcttcactgggagcccctgtgggacagctctgcactcagggagtgagcgggcctccctttcttccctcccgccttggctttggtccttgaggcctagtacagtgcctggggctgagtgtggggaggatgatcagagctgtccatctgtttccctatatgggggagtccccacgctgcccatcccaggggccagaactctcttggttacagtcccagctctgccactttcagcaggtgacttaacttctctgagcctgcattcccccacccggaaatccaaaacatcctgaattctgaagctcttatcctcccaaggattcctgataacaggcattgggcgctcctaggcatcctctcctagggtgggagtgattcgtcagaacagaagcttgattgctggtaatatatcatcatcatcatgtggaattcattgaaatgagtgaatgaagaaatcacgtgtcttgaattctgaaaggcctttgagacagtcgttcaggaccttctggagaagcagcagggttgtgggccagatgtcaggatggtggtgtagctctactcctggggtagtagagctgcttaagaacttgggtccttccagccaaagaccccccaggcctctgacccccactcaaactgccctgtgctttgctcagtgatatgatggaagcctagggcctaggggatcagctggcataggaagggtgtccagatgggcaatgggccatccacagagaggggcgggggctacacagctatccacgcccagccgtcagggaatgagctgggggggtggcaccaggcagcagccttgtgcagcagccttgtgcaaaagccctggggccttggttgacctcagcgtcgtggcacagctgcctgacaagtagatggggacatgggctgctttaatagaggcagagtgccccatctggggagggagccgcgggtccctgcagactgtgtaggctgcttgctgagctttagacatcagtccttgctccagtgaatgaaagctgaggcctccacctgagcagccctgcctgccccgtgcactttgggcatcgggagtctcagtgaggttgctttaggaaaaaaaaaaagtgcttgtttaagagagttcaaaactaccaaactggatgacattctgcggctccagaatcattttgcaagcatgttcattcatgtccctgtccccctgccgggcggcccacagcctccttggagagcccagactgactcccacccttggttgtcatttatccatttgggcaaaaagaggtggtggtgctcagccaacatcagtattggttgcaataaacctactactctgtgtagttgcttaatagttactgtctttctggcgacattgtacctcatttcatccttcccaggtcccataaagtaggtatcatcatcagtttattttacacatagggacactgaggttcagagaggtccagtaatcggcccacagcttgtctgaatgaagatttgaggccaagcgatgtgagggggctagagctgcccagtgggaatggtcagcaagcgtgggctcctgtggtccagcgccatctgcaggagaagtgggatacagccaggccttagtgggtgtggctagggggtcatagtctgtccctaggcaagggagtgattatggggaccacctataatctttgcagatgagctaggcccgacacatgtcactacaaacggagtgtttttaacagtcctgtacatgtatatgggaattgcacatggcttttgttgagcacttactgtcggctacactctgagcctagagctttatcagtttttcgtttttgtttttgttttttgtttttttgagatggaatcttgttttgttgcccaggccgaagtgcagtggccaaacttggctcactgcagcctccacctcctgggttcatgcaattctcctgcctcagcctcccgagtagctgggattacaggctcgtgccaccacgcccggctaatttttgtatttttagtagagacggggttttgccatcttggccaggctggtcttgaactcctgacctcaggtgatccacccgcctcagcctcccaaagtgctgggattacaggcgtgagccaccatgcctggcaactttatccacttttatctgccaatttaatcctcactgcagccccccacccacttcagagagaggcaaggggccttagctgtcttctcttgcagtgaggggtctgtggagctgggtttgacttggttcttagccactgggctgtcagtgggctccactgcggtcccggaaagtgggtatcaagaaccctgtttgactgaatgatttgcccactgcccctcaattaaaggttgtcttgggtctagaataagagtttctgacttgaagaccagtcagcccctcttcccaagttaggggctgtagctgcctccagaaatcaagtcccaggagctgcctctgaagggacagcagaaaaggtttgcctcccttcatctggcgaagagggagaggacgcccttggccctccacccccatgaaggagagcaacaagctgtgtggctgggcagagcagagcagaggactggagtccacggtccttgattaaccttgctttgtgatcttggggaagggccttccctactctggtccccagtcaccctgtaatacagcctttgcatctgagtccccttctggcagtggctttccaagatgatgagtatttgttaagtctgtcatatgcagggtcctgagctgagttctctgggggacacaggtctctaggtggatgtgtgatgtgatcggtgggtgggtcaacgggaacactctctgttccctggaagaatctcttttcccatgatctgagctccctgacctcttgaatatccatatactgctcactccataatgttcatggctatcttggccactgtgtctagcacataatggctctcattaaggtgaaagagtgaatatgacagggtattaggagtccccaaggtcattgtcagtttgggtgggggagttaccattctgagtaggctttaaggaggaggctgcttgtcagaggaacattaagtagagtcacagggggtggagtggggaagaggaagtggcacatgtgcatcaaacctcctagacgggagaaaacttttttgtttaaactcagaaataggataaagccatcaatattgctccagaatgagctacataaattgtgaaacatgcttctttgttcttcatacctcaagattgcaaaaattgtgaaattttcatcagtgtagaaaataaaaaccaagaaaaggtacaagcccattgggataacttgcttgaccacaacccctgggagaagagaacccatccaaattagccaggtgcagccccctctcctatagctggcaagaggcagagtttgggagagctcagagctcacgcagaggtgcaggcctctgcctccatgccatgtgtcctggagagcctagtgctctcctgacctgccaccgtttggggtccctctgcattaagcattgccttgtctatgggtcatgcctctggagaagggtccctcctgcagcccctaatacctaagagatatttgtggcggctgattagaataccctgatggataattccaggctgcagaggtgagaggcatttggactccactgcctgggatggccttctggtgaggtatcatttcagctgggccttgaaggacacgcagaatcccaacaggtggccacaggggtatgtctcctgtggatatgaatggctgaggaaggaggaaaaggcagaaggagaaagataggaaaagggaaatcttgaaagctcttgaattagccaggcccggaagctgggtgtccttgggtaagtcactttacctgtctgagcaagcttcttcatttgcagcaaatgtttttctgtcattttctgtctgtgcgggtgacatgagatgacttgtacagcccatgtttgaccttgtcatgttgaagatggacagatacagcccagggcctgtgccaaacatccactgctcctcttgaacacagagagggctgccaaactgaccctttattttgtgatggatggaatgtggtatttggattatgtacattaacctcaaattaaattaatatcccacttgccacctggaattgagactggggtgggtgagcccccagaacacccccctctttagaggactccccctcctccagttttcctctccctcaagctgcctgtagtttccaagcccggcaggacacaggctgtgtcccctggggcccccacatctatcccgtcacctgtaaagggaagattggtttgacctgtgtgtattgaacgcctgtctcctctgtctctgccattagaccaggagctcttgggatgggggaggtgggggattaagctctgttttcagtcagtgcaacctgttaggtggataaatggcgtgaataaggttccccaaatcttgaagcttttaatggggatactcagcaaacccttcagcccctcgggcccctccctgagctgagcactagggatcccgtcccgcaaggtggttgtccttgctggggtacatacaacggttccggggaggggccccaccctgacatcaagctactgccgctctgggaaggaaagtcgcccggaatcggggtctaagtggccagggcactgccaggcgcaggccagccggcgcctcagccgaccacgcgcccgctctcatcggtaccaccgagggctggagagcagcgacctcgcagcggaggaaggcgctttgtcaatccccgacggggtgggggggcgtggattcctccaggtgggtgtggggggtgtgacctcgcacggggaggacaagctcggaggcggcagggaggtgagcggggcggccggccctggcggtccccgggggtctccgcccctccgcagccccgccccctcgtcccggtactccccctcgccccggcgcccggggggctcgggcagcctcggccgcggtcggcgcggctcggctcggcgtcgccaaggcaacagcggcttagggggcgggggcgacgtggcgggcggggtgggctgggccgcgctgcgcgggccgggccgtcggcgctcggtcggcgggcgggcggcgcgggccgcgagctgctggggccgagcccgagcccggcccgccctcggccgcgcggccgcccagcaagggtgcgggtcccgcgcgggtcccggcccgccgccgccgcgctaaccccgcctccccttccccctcttgtccccccgtgcgcagggcttcctcagccgccgcctcaagggctccatcaagcgcaccaagagccagcccaagctggaccgcaaccacagcttccgccacatcctgccggggttccggagcgccgccgccgccgccgcggacaatgagaggtgagcccgccgccgccgcccggtcccccgcgccgccgccccgggctgcgcccctgaggacgcggggacaaagcgcgagcccggcccggggcgagccacacggcggtggggggaccccacgccgcccgccgggaacttatggggccacctcggccggactagggggcccgaggggaggaccctgtgcctccctccggggttaggtgagtagaagagaggagagcagagggtgcccgcggcggcccgggcgaggccgggcgcgaagtcccctcgcagggaagtcctgcctcgcctgtccgaggtgggcattgtttcccgggccgtgcggtgcccgaaccggggacggaagtggggcctctgccgccaggacccatccccctgccttgggagcccctgggtatcagatacaaaaggcattttcggccgggtttggccgagaccgggcgctgcccgtggtgaggggaagggtgaacatctggaggggaggagcagggggctgggccacttagggggcacatctgctctaagtagggcgcgtgctccactgggggctggcgctagcagagcgggcagtgcccaggccctgagctgggggcacagcctgaggctggggagccagggccatctcctctccagcctaggcagctgcttctctccttccctcacctctccactctcaggggtgtctcctgctttctgtttccttctcctgggccagccgggagcaggtgtggaaattccgcggggaggtggctggtggggcagaaggggagagggaggaggaggtggttcaacctgccgggagacgctggccagggagcaggcttcagctcgcaagggcaagccatcctgtcctccagggggcactgggcggacacagcctctcagggcccaggtcctcctcgagtggtgccagccacaggcacctttccacttaggcacaggcatggtgatggattccagtgccagttagaacatgtccctgcccagcctgtggaggtgaaagtacgggcaggcaccgaggagccttttcagcattcagcccgaacgtctcagaccactggcatctgccttcgtagggctgtgtccgtgttggcactccctgtaggggaggcgtaggtagcatgaaaatgtctctcccctcccccttggttctagcgggcagaggagtacaagttacagcccaactcctgcccaaggttgagtgactgtttaactgacccctagcatcttcctggagagtaacacttccacctcccagtagaatggctagacgtttaatttccatcgtcccagagccgcgctctccagtgcatcctcaccactgcctgcagctggtttcctgccccagctgccaagcccagcctgaggcgggaccctcagcctttctctgatggccctggtgccccaggggaccaggcgtgccctggcaggaagatgcagccaggccagagctcagcgctgggtgcagtcactgcgtctttgaaaatctcgcttcccatctttgttattgtctgggcggcaggccacccggtttgctgccttcctccctccaccgggcccctgccttcggctgtcttccccaggaacatgcccttctccgcgctttccttggcgggggtcaggaccctctgcacccgcatgcgggggcttgtgtacgtaccccgttttgtgtgcatgtggtggttgtccggggagcaggagagacaacaggcagtccggcttctgagtgtgtctgctctcccgggagcaggcggcatgcatgtcatgtttacctccttacagcgggaagcctgtacctagaagccggcaagtgctggctggccaccctagccagaggtcggggcatggccaagacgacctcgtgcgggtcctgccccacttggcctcaggtcagccttgccacatgctgaaggggcgcagagtgggggttgggagtgaaactacaagcctgtttctggaaacagtaggaaacggtagcggttggagcagaatgtcactggcagcggtgtggaattgtcttattaattttctataaacaaaatatggcttggtggcctctctggcacaggaagggagcctagatttcccatggacaggcagaaagactgggtttgaaatctctctacccagccttggagctgaaataggctttcccaggactggggtctcctgatttgctgctttgcttaggaacagattcgtcggctgctgctgggatggatgggcagaaatttctctggggctgtccctggagtcatcctatttggagttcagtgagtaaaaacaactatggtgaccccgcccgccccccagctcatggccaaacctggatgagtggagcagtgcctctccctgctctgatgtggtgtggttgtgatgttgaaggctgggagggcaggatgggctgtctttggcttggtttagcagcaaggaagggttgtgtcctggctccatgggacccccactggctgccatgcctctggctggggagagggtaagtgccaagacgctagcctcagtgagtgggtgggacacgagtgggaaggacggtgggggcttctagggtgtcgagcgggagtcctggtccccatggccttcccgtgtagatgagcggcacagggcactctggggcggccacttgagttctgactttggatgaatctatctggtttatatggctgctgaagaggctttgttgaatgctgtctgcgtgctccgcaagctgctgtgttggggaggtggtttttttgcgctggaattctctcatctggaggttggaaaccagttggttctgtgctgggatttttttggctccctggaaaaggagtcggtttcaggggtggggatgccgaacctggctggttgggattgagggttgctatctggttgtgaggctggggtcaggccaggcagtgcttggttggcacagctgggctctgggggctgggggctgtaggacaggcttgagccttcggacttattcttctgaaacggcctcaggggaggttgccagctggtctccacagtctctgggtccctcagacactcatttcttcttcagaagctttggcagtaagcaccaaggacaggtgatcatttctcctgggtaacaaacacatgctgcttggagcgctttccaggtgaaaggtgtgccggcaaaagcattttcattttgcacactggaaatgctgctgcttcatttacagggctgttttaatgttggtaaaagtgatatagaggatgtggttctgtcagcccagaggataatttccaagtcattcatttatttattaatgttactgaggagctaggagggtcagttggcaatattatgctttcctcattccttctctctcctgatgctgtttctgggtgactctagccctccacacctgctgggaatatgcttcctttggcatgctacctgtctaaacttaccacagtagttactctaaagtgtctgtacccccatcaagctcttcccagtcatcctggtgcggagcttagctcataaatgcaggcagctctggggcaggtaggcaaggctgctatgtgtggagttagggatcgattcccccttccagagtatgtgtgtgctggctggcgttcccacacctgaaagttactaatggtggaattccaagtgataagggactagggaaggagatacagtacttggatgttggggatggcagcttccagggaccctcacctggacctgggtaggcaggaatcaattctgccccttgtggtgagacagtccctggaggagggagagtgaggaaggttgatgaggaacaggggaaatggaagttagggtctattttcctgctttagttgctgacagtaagtgcaggcaggactgggcacccaagtctggtgtttcttgcccttgttccctcccctactatagacagggagggcctggtcctttttttggggactagtctgtctagtgtggtgatgtcaagatgatagtgcagtttagacaattgccaggagtcatgggatgtatgtgatctttggatttgaagccaagcattcctggggcaagtcacgtaaccttttgcagcctcagtttgctcatctgcagaatgggcatcatgataatcatgttgttgaagacattaacattaatacatttagcacacttttcatagaaattttctggttcagtgctgttttcttagcatttaacactgggtcttgcacatttcttaaatgtttctaaaatttaattaaataatgtgtgaaagaggttagattaatatgtcataggttttcagttaatattggtagggttaagtcacctcgtcttggtaagcctcagttttctcatccacagtgtgggaataataagcaatcatgtggcctcatcctgaggttcaagagataatagatgttgctgtgcctggtaaggtgattcgagcttaagatgggtcattattgccttaaacttaagaaacagccattattacctagagcacaggatgttttcctagggattcctgcttacacctgggaaagcaaagctctcatgtgtgttttaataatcagttttaaaagttcattgttccatcttccgtttgggtcatacttgtttttaatcatttaggcatttaggttatgtctaggttttctttattaaaaatgacactgggatttaaatccttgaatatttatctttgcctacatttctgatttttcccaaaggataaagtcttagaaacagaattactaggtctaaaaatatgaagagtttgagatttttcttagaaaaatgtcacccaccaaaatcctgtaataattcatacccctccccagtgatttttgagagtgcttacctgtttcctcacacccttcaaaacattggatgtcatcattaaagcagtctttatcgtttggataggcagaaaaagggcatttttttgttatttgcattcatttgcttgttggtgatcgaatagtgctttcctgagtttcatggccagtggcagtgcttcttttgagacttgtctattcctgtcctttgcctgagtgttctgacaagcctcttgcaggattcttggttgccctgtttggtcttcctcagctctgagaggtcccatgtaggtggatcctacacgttaaatgagcctctgccttccaagaggtatgacaaggaattcattaattacctgtaaggaaggctcacctggctgtcctctcctcctccccctcccttcttctttccaccttcctcccgtcctctcctctccataaggaaatcaggtttaattcctaatcctatcattcataaggatgccctgtatttacacagcactttaagaggtcttctgccctgtagggtaggtaggcagtgaaagggctgctctatggccaggaaaactgaggcacacagtcaaaggcatggagctggggcctatgcagaagccaggcattggaaccagatcccctctcaactgcagcattgtacttgagccccatgggcacctttgggggcagggctgaccggcccaggagcacatgattctgagtctcatctctagagaggaaggggagagccacagaatacgacctggacgtatagaagaatcaatttattttttgctttctcatttttattactctcctttagatctggagctcccttgtgtaccttcccaagatctgagctgggcaatgtttttaggaacggtggaaattagctagtgagaatgggatcagcaaggctggggtttcaaaggctggagaagcctttctttgcacaagcatatgtttgtctgtgtacgtcttttgtatgtgttgcaagtgtgcacctgtcctcatgaagatgtgtgtacattatatgttaatgtccttatacatgtctgtgcatttaattgagttaatacaggtgaagtatttggaacagtgcctggtacatcatatggggtgagactgtataaagttgctgttttgggaggccaaatacaggcaattgcatatgattcaatctatgtgttcaggttaagtgttggctactattgttattatcgtgtgttttcttcttgggtatgcatctgccagttgtttgtacatgtctgtgtacgtataccctgttgtgcccatgtgtatagtgtgttctgtgagcactcacgtgcatacttgtgtgcatgtgtgcactttctgtctgggtgcatggacactgagctggccggtgtgtgaataagctccccaccttcttggggagaacttcccagagagcaactctttgcctcccctctcaccttcggttaccaggcagagcccaggcccaggtgccaggcctgacaggtgccatgggactgctttcattctcctccaggtagccctgcctatttccaggccccatattagaatatgcaaatcgactctttaatggaattcctttgcaaaatattacttgaaccagtaagttaattaccaggctctaattaatggctattttagaaggccacagaacaaaactggaggagatcataagagaccaaaaaggcaagagggaaaagcatccagctcccccagtcggcttggtgactccttccagggtggcagggtgtgcttagcttctctctgctctgagctgccagtccgctcccttgtgatgattggctgtaggtgagtgaatgctccccttgcacgaagaacctctggtggttctagtctcttggccatcagtgcatccatctgcgaggtgtgtccagggcagcatctgcctggggatggggtgagaatgtgtggatagcaagcctgggctgaggtggggctgcaccaacctcagagcagccgggtgacatgcccaaggcttgggctgtgggagggacagtcactggccactctgttttcccacccctccaggggcctgtgggctatcgctgcagggaagccaccccccagtcagagcctgggagcctgaggcagcttctcacagccaactctccaccaagggcccaactccctcccctccacttctctctgagttcgcggtggagtcacctgtggcccatgtgtgatgtgagagcttgcttgcacaccccttccttgggctcttggtcaggccctgcctctgtgtgactatgggcaagccgtggttcctctctgcccctccttccactcatccatcaagaggagtgattgtacctgcccacctacctcaaagggctggctggaaactcgcaggagattttagtgatggaaatgataggggagtttcccctcccagctggggcatgcctgtgttaccatcccctcctgagatagaggtcgtctctgtcctctgtgagcatgtggctgtcctcccttgtgtatacaggccatgccacctaccacctgggcatgcacacatgcacgtccttgtggaagccaccagcgtgcagcagatatcccctctgggccacaggggcgatggggtgaaaacctacgggagggagagggaaacagggtccatccccacccacaaaggttcctggcaccctgcctgagaattgggggaggggtaagaagtgatcccaaggctggaggtcaggccccatcttgagggttgcccaaggagtaagacctcccttcctcccctccctgtgttggcttaggaggcctgcgttctgcagacccctagggttatccccttgtagacctcagctgatgacagtgccttggcggtgggctgcttggaggcactaacagagcactttgcgccctgtgccagaggcatttagagttggcctgtgaataactgagtgtgcttaaattttttaagagggatggactgactggtgggcagcctgagactgtactttttagaggttgcgcaaaaggcagcctgagaaggtttttgccacctccacccttctgccgcccccctcagttttcccatctctcaggtggggctagtggtacattactgcatcagatgctctgccgagtgagttactccttagcacaatgagatcccacctccacttttcagtgggcagcccccacgggggaccagagcagcccttctccctactgtcccagttaaccatcacctcctgcctgtcgccctaacttttctggaacaagcagggcccttgttttcaggctgggcctgattgtaaaagagtgcactggggagagatagagatggcaccagggtagcatgggccctaatttgatgcgacgttgtcatgggaagttttcataccaagggcagtgaattagtgtagtgtctccctgtgcccaatgactaaggggaagttaatttcatgctctgcctttttgacattcataatcagaacgttgtattgcagctgcagattgttagcaggtgaaggatgtgtgagcctcaacaattactgtttctggcttgggaggagattgattaatagattgttcccagccccaccccctctgcttcttactcccgtttgtgctttctttccctctttccaacttcaccacatttcgtcaggaaactaagtggctatgactaaatccctactcttgtactagaaacccagggcagaggaggacctgtatgaggaggaattgcctaggacacctgataaaatgcagattcttggactccaccccagaccttctgaattataccctctgggtggggtggtcttgcttccccaaagtttgctccttttgcagaggggcaggcattgtgccccagctgtgtgctagtgacttgcctaagcacttcctgtgctgtattcttactgatttctcatagcaagagggctttttgtttcccatttcacaggtgtagaaactgaaacccgatgtgtgagtggcccaaagtcacacactggaggaaacccagtaaccaggcaagtccattccctggttgatgtcaagatcccaccagtagcatgtcatgtcctttctcattaaggctgtgatgccttttgaaataaaccctctccctcctcagagaagtagcagtagcccccttctgtgcttgcactaggctcccattgtgaaaagctcctgcacaccagtgccctgggtctcctgagggtgcttggaacagtcagggcattcatgactgatctgcattttgcagctgtggtgggtgacgctcagagaggtgaaggggcagaggcaaggggagctggaacttgtctcctaactccaggtccagtgctcagcccacctgtgccaccaaggcctgctcttctcactgacttcctggttgcaggtggggaaactgaggttcagggaagtgtacccatttacttaggattgagcgagcagcagtaatgcaattcaaggtccgccaagtcaaattccacaggacaggactagtcagcattttaggagtggatcttgtacccttggctcccgcctgagaatggaagtcttccagaccccttggaaggtctcggctcagggaagagaatgactgtctttggagagactaggccaggtggggtgggctgcactcccaactaaggaggccaggcacctgctagggtagtgggaggtgatgggggatctgcgcctgtgaggtgggcagctggaatctgaacctagggctgccttactctaaaaccccgtcccccacaccgccagttgccatggaggttaatagcaggcgttcctgagtcagtctcccagagctggtccaaggcccagctccaccaactgcttccctctgagcttgagattctctatttcagtaaagcaaaaacaaaaacagaaactagtgtctcggggcccaggattcctggcacagggctggcccagtctttcctgggctttggtttactgcattcaggtcatgaagcccctggagctgctggagaatggagccatcgtagcggggcgggggacggagatgcctttcatcctgctctgttcatggcaagctgcttctgatgctgtgatagccccacccactgccccacccactgcccgtgagtggccactcaggatgggccaggctctgtgcctggtgctttctcgtgcatttgctcagctcattcttactatagccctttgaaggatacgtgctattactgtccccattttacagagaagaaaattgagtcacagagagactgagcagcttgttgaagtcctacagctcataagtggcagagctgggtttcaaacccaggcggttggctttattatgtaaggccccctgtcaagcaccgttctacatagcctgtgctcatgtgctctgtttcacattacatgttctgtcagtgatcacactgataaaccacctggtcacttaagaagcacccgtgtggcaggcattatgcatggtatgtgcatcatctctgattttcttgactaccctcattttatccttcccccattttacaggtgaggaaactggccttagagtataaaatcacatagccaggattagcctcaggttacctttagaatctagatctctttgtatccacagccagggccctctctagtatattagctgacatggctgggcacatcctatgcgccaggccctgctctctacacttcactgagctgaactcacttcaccctcacagcagcccgtgagatatatactgttgcagtccctggttcacagccaaggaagcgtgagttgcatggccagaaatggcagagctgggattaaacccaagccgtctggctcccacatcagtgtttttaaccaccccacagtactgccctctccctatcttacaggtgaggaatttgaggttccaagaggtaaaagtcacttgccctgagtcggacagcaggtgagtggcatagacaggatttgcatccaggtctttctagaatgtttttctgtctcccaggtgagagaatgtggctgctgccaggcggtttggaagtatgtcccaagggcacccggggctctgctgggggctgctgtgggtgcccaagtcctgaggtggtaggggtggcagtggaggcaggccttaagaaagagtcatcaggatgtgagggcaggctcggctcagtgactgcccctcctatttgcaacttatcacttattctcaagcgtctttttctgtggctcccccagggttctgggctcccacacctcttttcacctgggcagagctgatgagctgtggctgcgtttggatctgttgacttataatgctgggtgaggtggggcaggtacaagaaggggtcgtggctaggctaagtggccttccatagcacttcccttcctccaaggtcagaagaacatagaggtgacttccatcactacccaggagggtgaaggcaaacagggtgatgatgatggtggccagggactcccccaccagcctctgctcaggatctgtgggaagatgggtgaagctggcgctgaaatccccagccaccccaggcagtactacagcagactcaccaagggagttgcctattgtgctgcaggccacactgccctggtgtcaccaccttctgtggactggatgtgacgtagggaagtggtagtgccagggccagatgttctgcccggagcccatccagcctgcctgaggtggtcttgctcagttgccctaggatcataaagtccacgaatttgatggttgtttatgaggatagtgaaaacctattccagagagtttcagaattaaggaaaaatggagctggcagagaacttagtcttagagtctgtacaagccaggggtgcacttgaaaggccttgttgtctttcgtacctctgctgcttattgttcagagcacccataggagtgttttcccgaactgggttccatggaacacattcttaaagatgttaatgggcgtttgcgatgagagaattccatagtccaaacaggactggggagcagtctgtccagagtttctcaaactcagtgtcagaggttcttggaggtgagacttgatgttttactccagtggggtgattgtgtgctcaaatacattttacatcctcaaattttgcttcctcattcttgggaaatcatttgtgacccaggagatgaaaggccctgagaggtcctgcaatgaagaagtcagttttgctttgtttaatccagggtttcctgtcccccaaccccaggagcagctgttaacatctgtggagcagttgtattttgcagaacattatttggtaaacattcttttgaggtgttatgtctcctcagaagcatgttttggaggaaactctggaagtgttccctgcccttagtacctgcaggagtaagccttgaatgatggcattgctggctcagcaacaggtagtgggtcatatgtatttgaaaaaagtcatcctaggtcctcaatatcattcctcaaagcagctaccagctctcctgtgtgtgggatggggcctggctctggtcagagagccctctgtggggaggtggtttgtctgggaccagcctaggcctagggtgtaggggtttattcccctttttgcaggctgggtggcgtccatgtacctggcagcttgggctctgggcctccccatccccctctagactccctctgcagaaggcagtggtcaggcagaggctgcccacagatttgcataattgcaccgtctcctgaataattaataaagctctgtccttgctgggagcaaagtctgcaccgttatggatgggtttgccatggataggtttgccggagctcttccaggggagccgatggttcctggactcctctgcttttcctggcatggagcccccagagagaggagagggcactgggttgggggctggctctggtgtgtccacatggctcccatagcatgataaagggcaggtgaggggtagtgtgtgctttcttccaggatccacacatgggttttctagcacacagatggtttaggattcttattcttcttgctttctgtggtcccactaaccctttttctctgaagtgtgatcagctgttgtggggcttagccctcttttctggcagcccaaagggagcaatgcttatgcagcaggtaagagcaatgagggccagttttcagacaagtaggggagggggaggtgtttctgcttggggcccttcttcaatccctcccagtttctgggcttgttaaagttggaggtagcctgggagtgattcctatttgagatttctaaatcccttttgatggtgtttcattgacgtgaattttccctctgacgcatggccttgtctccctttcatgctagaaaggagagtaaggggtgggcctgcccccaacatgtggttgacattggggaaagtcctagagtctcgccacgccatgagtactcttgaaaggccttgctccaaaccttctgtaggagtatttcttaaatgggttctactgaacatattcttacagatgttaatgggtacttgggatgagggaattccacagtccaaacaggtccagtgaaccaagtcagtcagtttctttaatgcatggctccttagaggctttaatgtgccagcgtgtgtctgagcccctgggagggcgtacaggatgctctgcttcccatccacaccggcactccagagtgttggcacatctccagcaatggggagctctttccacctggagcggcccctgcccttggaggacagtgccaactcttgtaaacttccccctttgtggagcttccccaggcagcatttatgtggcaccttgtcattccccacatggccctcacaccagctaggaaggtggcagggcagggattattccattttatagataaggtaactgaggcccagagcgggtaattgtctcacccaggggcacatagagttgatatttaaacccacgtctgccagctgggccttcagctctttcctcttggccaccaagaaaccatttgctccctggatagatgtcagtatgttggctggggtggggccttaggacctgttgctctgacagtgcccttcccagcttgcttggagtgtctagagggtggaggcaggagtgagtgaaagccttccttcagggtttccaagctgtggggcctggctttggagccatttgtagacaggggcctaaaaccgccagatgcctgcttatcacaccattcccgactctcacccttttccttctcctgccctcttgttgtagggtgggaatgtttgaggtgccccagaaactgggtatgcactcaactttggccagtagtggtggtgcaggggtgaaggagcagggcagggggttccagctggcttgtctttctccaggccttcctgagagttactggacaagcttggtggatggccaggggagcctggggtgaatttgttcacagcagctgggcttagaggctgcaccggggctgagatgtgacttcaggactcaggccaactgttttatatctcaaaaatcttgggttataccatacaccatgaaaggtactgcattgccacacctgacacttccattctggtcccaaagcaagccacacgggggctctctgatgaacagaatcctgctctgctgacacatggacccagatccagatccgacgccctgacttcctccatgatctgggacaagtcacctaatctctgaacctctgtctcctcatttttaaatgggcaccatgattgtggtgcctacctcccagggttttgaggtctacatgggatcatgttacatggtaatttgatcatattctgtcatcacacacatgtactcacattctcacacaccatgcttttgcttttttgtttgagatcccacaacctgccagcacatccaacccagtcttcccagggtccacctcatcatatatatagcaagagatggcccaagacacatgaagtgatgtttgtgctgacatttctcccacttagaaaatcaatattctgtggtctgcctaattgctctgttgctgctaaatgagtcattatggagggaaaatagcaaatgcattgtgagattaatgggagaaaatggttggcaaatgactttggtttgcttcggaaactctgagaaggtgttactacgtgaaatctgcagagccatgcaaggccgagtcctgagcagcagggagacaggcaggcagctattggcgctgtgagcctcccttttagggcggggcaccgattcaaatattatagaggctggactcaggagttactgagtgatgaagtcaggagccaacaatgggacaggtgctctgacaacctggtctcaaagaagaggatactcttcagttagagccagttacatgccaggcatggtgctaagctgagggatgtaatggtgagcaaaaccagccccagctcctcccctagtggaggacacaggctgaagtgcaattgtcctacaggtgactgtgtaattgcaattaaggcatgtgtcctgaaggcagtgagagcccagatctgaagggtttcatctggtgggggtggtggggagggcctccccgatgacaaaaggagtaagctgagctctcagggaagaaccttctgggcagtgggagaactcgtgcagtcctgttgggtcttataggaggggctgccacgggacttgtatggccttaaccctccagccatcctaagaagtggatatttctcgtttcacaagcgaggaaaccaggactgaaggtggttaagagacttgccagaggtcatagaacccttaaatggcagagtccagatttgaacatggggaacccatgccaaggggcatgccccgttgctccagggagctggccttggcacttgctgccctgagggtgtctctttagctagggttaaggaccttgctcctgcagggcagggggcttcatggtggttgcctgagagtctttagagagagggttataggactctagaaagggggaaccctcaacagccacagccaggcctctttgctttcttgggtctttgcttccttttaatgacagcgtgacttgggtagttttctttttctttttctttctttcttttttttttttttgagacagagtctttctcggtagcccaggctggagtggagtgcagtggcaggatctcggctcactgcaagctccgcctcccaggttcacaccattcttctgcctcagcctcccgagtagctgggactacaggcacctaccaccacacccggctaatttttttgtatttttagtacagacagggtttcactgtgttagccaggatggtgtcgatctcctgacctcgtgatctgcctgcctcggcctcccaaagtgctgggattacaggcctgagccactgcacccggccatgacttgggtagttttctgatgatcaaaatgccaggtcaactagtgactcctctttcaaaaggctctgtaaataacacacttctctccccatgaaatgggttggtttattccctgcctctaatcccagctggactgtcatcaggtagggcctatcagttgtctgcagaggtgggtggaggtatggtcacctgaaggtgcttctaaggaaggtgcttgtgagttcttgtaaacttcccaaggtttcaggagtggcagcagcagataaggagagtccaggcatttcctgtgggcattatgaaggagcaccagaggcatcccactttgtcttggtgcctggttgtagctgagcatcatagtgccatgagaacctggtaaaaagattctggagccccaccctgggagggtcagggtcacaggtctaaggggggctctggaatctgtattcctgacaagccccaggtgattctgagacccactcaagtgttgagatccccagttagcagctctggattcttccgtctctgagagggtcacaggcctccaagggatggtggtagtggagtatacttttatcttcctgggctggatgtaacactgcctgctgccagctcaggaagccaggccacactgtgcccatagggccacatgtaaggcagagcctggtgctcagctgaaccccaggtgaggcaggaacttggcctgggatgctttgctactgctattgtccggaaactgagtttcatcccaaacttaggtctgactggctgtgccctgtcccttgcgaaatataaactgcagcccttcctggcgagaggctaagtgtttatgtgggctggttgcagagcccagctctttgtcctgctcaggttccatttccaaaataattctgcttagttcttcacataaacagcagggcccttagagactggccctgagagtatagaggggatccatccccgtcccagcaccccagtgtgctgccaggagacaccagtgggcatcctggggttggtacccagtgttctgctttctgctcttgctcctgcctccttggaggccaggagccacatgcctgaggcccaggaatgtgatggggaaacaagtttcccagattggccaaagaccaagatgggagccattgcaccaaggtaggcgtggtaattcagtgccacacgtttcccatggtcaaccctgcagtcactcttcccgctaagtcaaagtgtccactttgctgttgtcaggttatttggtgaatttctgtagcctctaatgatgagtagtgagtgggaactctgtctcctttgctcctagcatctaccaggaagactgtttcagcgaaggcaagtctcatacggagctgggccttgtgcacgcatgtgtcatagcaagcactcatgaagatgggccggggtctcttgtgagcctggggcagccccgggggaatcttgccctcagagaagcacttttcaccatagattcacccctaggtgatgctatgcagtcctcatggtaggaattaccaacttccacatcggctcaggggccaggatcttctaagtggtgggacttcgggtcaagcagaattctggactctgagtggcttcctaagagttggcctgctgcttagcctgaatctcagggcaggtacagacaggatggcggtgcccacaagccctttttatccagctagctaaaagccactcattgtactagcagaagcacgtttctacacatgagaggaaacactgcatccttttcggtgcagttttacagaaaactatttaacgcgcttgctgtagctacccctggcatgtggatcctgagaatccgcccctgggcagattcactcgggtcacacacttgtttatcacacggtgtgtaattgaccttagtatgtgtgcatatggacagcataccacgtagcagtgccctgggcattctgacctgcccctcctggcgtgtttactcctctctacccatagttctggctgccgtgcctcaccctgccatgtggcaaccacatgccgggcactgagaggaggcccgggtgagagtctggtcagggtcctgccttcctgggagcattctcctttgagcaccacctccctcttctttctctcttcccctccccctccagtcctggacttcctgctgttcctggtccagggggagggcaggtaccacacagtgatgggtgtcctgcaagctgagcctgggttgttgaaactcctggcccagaagcctctagcccccagccaaggtccctgtttgggccgcgttatgacagtcttgtttccggcatgtcaggtgtgaccatgccttctgtctcgatggctttccttgctggtggtctccctgtggggctgctgtccttatgtgtcgaggtttcagaatggccaggctcttggtggggaggccctggatggacatgctggtggcccaggagagagcgacccatcctcagtccctctgcctgtgaaggcagactctcctgcctgccctggcaacagctctgcgccagcctgtctgtgtggctgccggcagccgcggctcctgactggctgccttctcccagctccctcacgccctccaaggctcactcactcactcactggctgctcgcagcagctcaggcagcgttcaggcagatggtgcaagggaggcgtgggcgggggtcctcggactctgcttgcacacccccatgtgtgggtgaggtcacgcccaagggatgtcatcaacatacgctgggatgggcttggtgccattcaagatctatctgcagggacaacaaaacccgacttcgaggtcttaacaagtccctcgggagtctccagactcgagtccttacactgcatcacccactcccctgagccaccaggccctggtctcctctcttgacccacaggacactgcaggcaaatgctgggttgaaattccagctctgccgcttgtcagctgtgactttagagaacttagctaactctgcaaaatgggggatagtatcagttcatggcattgtcaagaggaatgaatgggatttgcagctaaatgcttagcagcacctggcgaagagcaagcgcaggagatgagttaaccgggattgtgtcatggagttccccggctcgtgttgtgtcctctctctggaatgctgccttctctttcccctgtgattcctactttgatcatacctgtctttcagatcctagctccttctgcttaaagctggctctgctccccctcccccagtcctaggcggacttcaaggccttcactttgctcctcattttttgtgcctgatttctgtgcttcacttttgggtccactccacctggtagcaagggggtgcttcatgagggcactggatgggatctcttgacatatacatgtcctgccctcactggtagaacaaagcaagaatctagctccttcatagctcctcagaacctccgggcaaacctggctatggtccccttactccctgcaaagtggagcacatgaccaagcccattcgcaaggccttaggatgagaagtcatagtgatccctttacagatgggcagctgaggccaggaatgaggaggggatgtacccaaggacacgtaagaagttggagaccctggcctgctgcttctgtgcctctctgctgggggttggggaaggagtcgggccatctctcaaggaatccgggaggacttcacagaagaagtgacaggagttaaggcttgaaagaggatgggttcatcacataaccaaggcagggaagggcatttaggcagagggaaccccatgagcctagtgctcagaggatgaaaaccttactctcttcctgggacagtcattgagactgcagtgagaggtgggaaagggcctggagcatcgggagagtgagaaatcattgggaagggcaggagccagcattaaggagaggcagagatagagaaggtgagctggttagaggcttggcccagacccgtgtatgtgccagattagactgggggagggagggcccaaggataagcatccctttgtgccaggtgcttcatctcttagtgcttacagtgacctgagaggtgtgcttgttttagagatggggaaaccagatgcagagaggtttggtggcttgaccaaggtctcatgggctagtaagaggcagagccaaaatgtgaaccaccagcaacatgactctcaagtcctctggtggccaccacctgtttgggatggggtggcagctcctctcagggcaggggccctgtagtctactccccaagcaggtgtgggggccactaagagagtgtatggcccacaaggttcattgttaggtcctaggcatgtgtccaggtgcacatagacaccttcagtgaaccagattgttcaccaagcctggcaactctcttcaactaggccctattggaaaatgggtaggatgccaggcagcctacagctgggcagctccaactctggcctctgttgcccagcagccaaaaggtggggctcttgtaagacctgagcccctcaccccgtgtctgggtcctgtagcatttcggtccttacttccttgcagttctcagggtgtggcagttgtctgtgtgcctcattgagtggcagatctcctgtggaccgggcccaggcctcctctctgggcctctggcacctagcatacagcctggcccagcacaggtgcccagtaaatgtttgtaccatgaacgatacattgagcacctactgcgtgccgggtgctgtgccaggccctggaataattaacttcggcatggcactttatgattcacagagctcctcccagtccccttaggagtctgattgtctcagatcaggtatttatttccctgttttccaaacaaggaaactgaagcttaggaagaggagggctgtagcctcaggtcacatctgtcagccagggaggggcagaaccagccccagccactgcccactccctgctccctgggcagtgagcacaccctggaggctgacagctgtttctttccaacccctgcaagcaagagatagagcaccctggctggcagggaagccaggccaacagagaatccgtatcccaggaagcagggctcctgggggctgcagtaggcacctggctcatcctcagggctccacccagcaggagcaggggcctcctcttccactaccaaggacctggttgctggggacaattgtctgtgtctggggtaagtcagaggcaggagaacaaagagaacccttcctgccaatgccactctgaccttgaaaaccctgtggggtttcatttactcgaaagaaaaagggaagagttggttaccagcttcaaagaggggcagacctcctgcaggcgagcattgaggaaaccttggctttgtgagttattgctgccaaatttctccttttcagtttaacagaagtcctggggatcactgtccatgggctggggaggaatccggccaccttttttagaaggcaggaaggtgccaggatcactgctcttactttggttgggctctaggtggcacagcttctgatgtaaagatcaaataacaatagggagatctggatgcagcctgaaggctcaccccagtgtcttgctgcaggtgtgcccagctgtgggaccaggaccccaggaaggaagggcattgttctgtccctgctgtgggagtctctcagggaagcagcatagcactcaggaaatcctgggcaccgtgaagggctgtgtatttattccttattccacaaacaataagcaagtccctgctgtgtgccaggcactgagtgggatcctgggagaaggattgatgtgttgtgggtcctgccatgtcctgcctgttgtgacagtccaccactgtagtggcatctgtgtccatctggagagtacatgttctgctaaggggggcagcagcccctgcaccatggcactgggcatttggtggcaggcctttggatttataagagaagccaaaaatctagaggtttttttgtgacattttaaaatttcacatctttaaatgttggcatttgattcaaaacttaaaaatgtcaacactgtgtgggctaaacaaaacatgaatgttgaccaaatacagctcatactctttagttaaagacctttatcttaaaggttggataaaacccagatgggcagagggcaataggcaaggtcttcctggggagggggcacctggacagaggggtggtggtgggaatctgcctgagcattttcagggcagctgggaactgggaagtgaggggcggaactgatggggccccgcccagtcatggaatccttgcatgccctggacgtgcagatgtgctgcaggcctgacccaggctgccctgagagcctccagctgtgtccatccctccagtcagcagcgtttacccaacaccgtcacataaatgaggctttggccaggcaggagctcaaggaagaagggtcatgagtatttaagagaaacctccaggacacacgatcctcatctccaggaaagctatggaatgggggctgtcgatctctccgttgtccatgcatgcatgtgacctcccctgccatttgcatttgctctcctgcagctccttcaggttctgggctgggccaggagggctttcgcaagaacacctaaaaacccttggaaaggggctcttcccttctcctcttcctgttcctcccctgcaggagtcctgcattgttcagagggtttgaacggctctggccaaagcctgtttgggtgtcttcctgttcggggcctgcagttatgactcctccctttttctcagtttctccccgtctgccactccccccatgatccatatttgagtttcttctaaatgatcacctgcagaaatggtccttcagattgtcccagagatttgcccaggaaactttcattgagcccctgctgtatgcagggccttgggccagagaggggactgaaacccagggctcccactgactggtagagtagacagccacacagacagccagtgggtttgaagaagaaactcaagtgtggatcatagggggagtgacagacagggggaagaaacagaaaaagggaagttatgactgcaggcctacctgggaggctgaggcaggagtatcctttgagcccaggagtttgagtctagcctgggcaatataatgagactatgtttcaaaacaagataagttaaaaaaattgcaagtatagagtaccaaattccaggcactataaagcaaaaagtaacaaaacttctatgccactcccaccatagaatctcttactccaccaaaagccacggtggactgttggtcggggactttttctgcagacttttttctgtggccaatgaaatgatcttatccacgtccctgtgcctggaacaggccacccagcatgctcctgcttccttggcctgcagaaggactgagggagcctagctgccatggcccagagccctctctcccagcacccacagcctttagtcccatagctatggtgctgggtggccctccatggacggagtctgtggctctggaaggaagagggcatggtcttttcccagcagtgccacacagactcaggccgtgggctgcctcagccagcagagagggaggcaacaagcaggctggctggctgaggacttcgagagcacacagggctcccccaagggatcctcgggattgagttatttctgtttttgctcacctgtgcctggccctggggacagagacaggaatcagctgcagtccctgcctccctggaggagctcccagtcaggtgggagaggtgcctgccacccctgatgaaactgtctctacctcaggttctccctgctgctcagaacaagggacagccaggaaccaggtccagggaggagtgtggtctgggctcaggggagccctggaggaagtggattgtaagctaagattgggaggaactctccccaccctggtttcacctgatgggtcttgcagcacctcctgctcagtaagcaaagaactggatgggaaagaactgacatctgtgcaatgcagacacttggagctgttgtttcatttagagtacagtgttttcccctagaggccctgtgtggatgaagacacagagctggttgaggattgggcccagggggtagggcggagaggagggtgcatggtgaagatttgtctacttaggctggtgagcccactcggggtggagcactggcttaaggcaccttggccctgcccactgctgctgggggaccttgatcaaggtacttcatcatcagtcaaatggggcagagagccctgcccacctcccagggcttctctgagagtctgcctgacagtctttctgccttgggagcagcagagcctgggcccatgttggggatgatgaggatgttgatggtaacgaggatagtgacagggacaacatgggggattgtttactgaggattccctcatgctggcgcttgaggtgacacaccctcactgtgtgctgtgtgccctgccgtcatggctccccactggaccctgcaccgagccctagacttgctcccctttcagtcagttctctgcccaggactcacttgttatgactcaggttccttcctgtggaccctgaatggggagcacctgactacctttccagttgcacttcccccacccctccccgttccctgccccacgagtgctccagcatacatctttgtccttgttccctcttcttctcttcctggaacattctttgttcagatacctgtgtggcttgctgccccacttcattcaagtgtgaatccaaccacccggtcaaacacagccccctcccatcctctagccaggacctggctctgcatttgtctctagctgttgagttcacctgatgttgttacatacttcgtgtacttttcccacactctagactgtacgccacatgcaagtagaacatttatgtcttgtaccctgatgtgtctctggcacctagaatcgggcctgacagaaagttggtgaatgaacaaacaaacatttaattgtaccccataatgtggacacattgctgtctacattttacagatggggaaactagactcaaagaagaggtggattgactagcccaatgtcatacagctgcagcgggacagaaccaggattttagcccagtgtctgtggcctctgagccctgtctcagccagtagacactcccacctccccagaatctaggatggacaggaatgggagggggcccaaaaaggtgggtaggattttaccctggggattgaggggtgaggccaaggagggggtgaaccatgagggtctgagagggccaggggcaggtcggggacttcagtgagggtcaggacagggaacccttgcaagacagtctctgaggagagcacccccggcaccagccactcccaaagaccagccgcctccaggcttcttgtgctggctttggttcctggcacgatttctgtttcccagaggagctcaggcctggcccggcttcccagggtggagaaacacatggtgagtgagtgtgtgtgcgcgcgtgtgtatgtgtgtgtgtgtccagccttgctgtttgcgttgtcgtcacgtcttcttaatcagcctatttctgggagcgatgacttcatctcctgtgattctcgacacagccattgtcaggcgtccatggaaagattgggcctggcagtgtccatattcccctaacgagccaggttgggagagccaattggcgggccctggtctgacctggctcgggggcttatggtcaggtctatctccaagagactccactgcccagggtcacccttagatttggcctctttgaccctggggtacccagtgcagcaaattccagccattgtttcctgtgtgcttcctctgtgtacgctctgctgtgggcagggggtaggggacagtcacgccaatctctgccctcaagggctcctgctgtctgacaatgcagatgagtcaacagacctcaccttagagggtctgtgcgtgaacagagaagggagtgaggactctaccagcgctcaaggaaggctccactgagttggtggttgggccacagggtgaaggtgaaggttcccttgagggagggaaagggcttttgggcatgccaggtagttgggtatcactgggcacggggcggctatgtgttgggcctggagagtgcaaggaatagaggggaaggtagcaggaaggcagcagggtatggacttgatcctgaaagtagctgggaaggattttaagaagagatgggacctagatagatcagcgattttagaagcaagtccttggctgtgtgtaagggtaggtgtggaaaggtgtgacactgggaaatatatacagtatttggtttcttggcacacgactcctgaaatccttagattctttaaagtgatgtctacttatttgctaatgagttgactgatggctggcagcccctaggtggcttcagaaaggggtcacagaaaagaccaaggcaggattagagggttagaactttcagcccaccccacagcccctggggcagggagagaggctgaaggttaagttagtcgccaatggctagtgctttaatcaatcatgcctatgaaatgaagcttttataaaaacccaaaaggacaaagcttggggagctttcagatagctgaatgcttggaggttcctggagggttcctagggagggcatggaagctccacgcccctgcccacatacctctccctatgcatcttttcattggtatccctttataataaactggcaaacagaagtaaatatttccctgagttctgtgagctgttgcagcaaattaatcaaacccaaagaggggtttatgggaaacccagttgatagccagtcggtgggaagcactggtaaaccaacacggggcttgcaattggcatctgaaggatggggggatagtcttggggactgagccctcaacctgtggatctgatgctatctccaggtagataatgtcaaaatggaacaaaattagaagacatctgggctggtgtctgctgcccaactaatcgcctgcttggtgtgtggggacaacccctcccgcccccaccacatctggtgttggaagtattctgctttgtgagagtataaaaggaaaggggagaaactgagttgggttttttctacagaaggtgtctgggacagggaggaagaagctggcgactgagggctcagccctgtattcccctttatcttcaaggggaagggtctctttccccaccctactccctcatactgtacttcaggaactggtgccaaggccagctgagctcagccaactgccaggagctcagttccccaccctggaatgctggtgggctggggatgggaggtggagaggagtagggatgtggggtggtctctcaaaaatattgtgctggacttactgcaggcttatgtatagctttgcctggaggcagggggacagttgaatgagtgccagcaggataaagcactctgaggggtgataccttgtgtcctgctcttggcctggacactcgttaccccctcacctccattccccatctggagatccctcaagccccaccttgaagcagagacactgatgtaacagttcaggctcctgagctgcactgcccgcggtgaagctgcttcccagcgttgtggcctctagcaggtgacttgctctgtagtgagttttagtttccctctctgtcaaatggggacaaaaagtgtaaccatttcctaagatacttgtgaggattaacatatgttttaagagggaggcttagcagagtgcctacacatagaggcgccagcgtgccttagcatggcagtgggggtgtggcaagggtgagggcaactgtcttcaccataattgccaaggctcccttaggattcaaaaagccagggatcagaggagtgaggaggtgtgatgggaaggcccaacaggagagcctgtttggcggagcaagaaagagactgggccctcctctccaccactctgtgacctcatctctctgagcctcaatttcttggcccaaagaaatggtgagaaaaggaatgttgggggcccccactgcaggggcaggtgaggagctaatgtatctgttaacacttgtgtatttccttttccctcaaagccgagaatcagctgcttgcctctctcttgggcaggcatccagcagggaaatgctttgaaggaagccttcccaagctgagggtagccaggctctcccacctccatctccttctcccacacagggctgtctgccttctcccttgtccctgagccaccacccatcatcctttgcatgccttcattgttccagctgctcagtgttgtctttttttgtaagaaaacagtccagttcagcaaacatttcataagcacctgttgtctgcctgggtcttttttgggctcagggcatacaggggatggttaaagtaccaacccagctattataggggagaatattatggaattgttttgaaagatctgaatgcaaaagcagcgatcccagggcaggaggccctgggttctaggcccttgttctcctttcttcccttgggaccttgggcaactcatggtacttctctgaatctcagtttcttcaactcaaaacccaggtcagtctgttgatgcccctggttctaagaggcatcctgtgatcagttttggagtaacaccctgtgggctcatcagttagagaggtctgtgggaactgcagtttcaggccatagtgagaacagcagaccccagagggaggagtctgatccaagtttgagtcccgttccactgcagcttttgctagttgcgtgaatttgggcccgttccttaactcaaagactgggttttctcagatgtaaggtaggcattgtgatatgcctgccaatagggaactcacgggtcttattaatgctactgagatcctgttctcagatacagggcctgctccatgccaagaatacatacccaaccctccagagctccttgtatcagagaggggcattagtgcccaacttaagaggagccagtgagggtggggaggcctgcagctggcccaggagctctagaatgactgcaggtgggctgggcaggggcttcttgatttcaacatgcactagtgtggaattctatctagctttatgaagaaaatgtttgctaatgttattaatagtgtaaatgagatttggggagggggggacagccaggggaaggggttatttaaacacacttcaaagaacacccttctccagtatttaagcagcatcatttgcatatgtaataattgtgctaattataggtggcctcatctgttaacgacaagtttgcctggttgagttacattattgtaatcacccaatcataattctctggcatgcttttcactaaagataacaacaacaatagtaataatgcctgtcattttttagtcttttgctctgtgccaggcttcctcccaggtacttgacagtcatcagctcatttaatcttcacaacacctctgtgtcccaaagattcttatctcctgtgtacagaggatgaaactgaagtgcagagaggttaggtaacctccctgggctcacacagccaagagccaagggggaaatgccagctcacaggctctttccactggctagcactacttctctggggacacttgacatgtgttctcaccctttatctctaagccttctctttctcatttgctcctctcagaaacccccattttaccgaagaggaagctgagaccctaggagagaatttggggctgggcaggaggtgagcccaggtccccttaactttatgacaaaaccagccccagcatacccacctgccttcctgcagtaagggatggagggcagcagctcctccatgttctcctctgaagtcttgaaggagtccagccttgaggaggagggtgctccttacctctgctatcaagcggggtaggcctggcctctccatcaaagaaattataagtaaacaggtgggaggactctagcacaccattaattgctttacataggttgtcattaaatcagagatagtatatggatggctggtggccagatgtagcccacaaacaggtctcatttggcccgatggggtggaaagtttttgttttgtttgtttgtttaaaatcattcaccaacactagaacatttaccttaaacattcacctgaaaatctaggtttctggcttctattttaagacagatgtggcttcagtgggcctatattcctatagggcaaataattggtttcttcagttcacctcagactccttttctccctggaaggctcctcccagcaaccttgggaggtgtgtgggtgtgtgtggggttatagtgttcccattctgcagataaggagcctggggcccagaggggaccagctgggccactccacaaagctgttggtaaggtcaggacttgaacctccatcctcatctccacgctttgtggttctcactccacctcgctgcctcccagccatgtccaacccccactggccgccaaggaaagaaagaaacttttcacaggcctaatgactcaaaaataagcaacagtaagcctgaagaactgttcctatctccctcctctccctttccacccttcccgaggccagaagggacatgggaaacctattcatttaaactcaattattttctcgaagacagaacagaactgaattgggtcaacggctatatttgctgtgctcagctgttttcctgcaacagcatcacccgccgggtctgttgctgggccctgcactgccaggctcaccaattatagctccatattggtagccattccttgggaagcttggctcaggaagagaggagtcagtgaatagaacctatcaccctctcctttttcgcccagcaggctgcaggggcagggtccctgggccagtgtgggtccaggctccgtaactgtgtggtcagcacctccagggacctaggcttcaggtattagacatttaatgtccaacacctatctgtaggggaggtgcatctgcagcagagtttctgcagatgaggaaactaaggcttagagaaatgaagtgcttgtgggagaagcagaccttagagtcaggcacagctggcactttctagctgtgtgactgggagcaaagaacctgactgccttgctcctctgatcccacctgtaaaggaggcataatttgacatacctcacagggctgggctgtcctgttgtagatgggttgcagtgtacatgccagcagcctgcccagggttaaccctcctggcaatgagaagtgtgcaccatgtgccaggcacagaagttggtgggggcacagaagttgttggggacacagatctctgaagaaggatatgcttggacatcgttctctccagatacctttcctgattccctgctcccaaactggaaatgctcctgcagtctctctaggtcccctgttggtccaggccctgccctggacacttttcaccacatcttctgggcctacagcctgttatatatatttttttgtttggtcctaatatttgtgtaccttcccctctctactaaactgccagtttcctgaggacagaccgggtgtcttgttcacctgtttggctcctggtgtcacttccttcccagctgggtggccttggactggttgtttaacccggtgcacctgttttcacatctgtaaaatgggaacagtgatctctctccctctggcacatgtcacggcaaggaggttaatatcacacatggcagcactgtgccagatggctgacggaatggagtctagagaaacattgggaggaaaccaaagcagaggctgcccctctgccctccttgaagtagggagtatctaaggaggcgaggcatagtggttataaatgctgtcttgttatagaattgctgtctggttacatggggaagtgggaacagagtggtggccagtgggcctttccttgtctcctccagcttcttgctgcagagtgctgggcttgccccaagaatggactgctctggcctcacggtcatctcagattgcccagtggggctggggctggggctggggctggggctggttgggacctacccacaaccactgacctccaggtgcccgggttacagtacctggcattagatctcttcttttggggtctgggtgtagagcaggatctccctgcactaccccacgatattattgctgatctcagggttggggagtgtttagggaggcttgagttccctgacctttcaggaagcatgcatgtgaacttaggcctcggacctcgtgtagacatggtgtggtgatggctgggccctactctggtggggtggacgcaggacttggggactaagcagcaagtgacctagccacagacacagaaatggctctggtgggagcccagagtggcactggactctctggggggccagggctgaggggactgcccaggttgatcccggcgtcttgtacaatagaaccagcagtcacaggctcataaactgtaaccgtcctctttccgttgcctcttggtagcattcagcccctggcacactatgctgggtgttgcctagtacttggcactgtgacaaccaagaaagaaaaatgctgaccatgtctcactgcttgttcgagtaaatttactctatattttttagagatgtcgcatgggtgggaatttactcccactaaatgttttgatggaaacattacatttttggagtgaacatgtgtcaacatcactgtggagaaaaggttccaggattctctgccagccaaagtcatcaccataagacactggttgggggcctggcaggcggaggtgatgcgaccaggctggtagtggggcagaggtagccagatgggtaggagtctgcctggctggtctggagggagaaggggatctgagctgggggaactgaataggtggtgaggaggaagggagtagggaggctgtgggctgatgacatacattaaccacccacacagctcaaaactaggtgagtggggagcttgaggggcaggaacagcgagcagaggctctgaagtgttgaacactggcagctcagacccgagggacaggctggggccagattgttgagggtcctagaatcccagctcccaccagtaactagcgatgtgagcttgggcaacttttccaacctttctgtgcttctgcttcatttttagtaaaatgtagcatggatagccacagcttatggctctttggagaattaaaggagataatgtctgtaaaatacctagcgctgggcctggcacatagcaggtgccaggacacatttgctgtttgttggtgatgataaagccacacaagtatagatgtactcacataaattaacagctggtgcactgaaactacttcctgagttggccctcaatctaataccaagtttgttttctcaccttcagctaagtacaactggtctcttcagaagcccttgtggtctcttgtaccttgtggtacaactgtggtctcttcagaagcccttattcatgaacagccaggccctgggctgactttgctacagggcatccgtctctggccctgtacctgtttctgtcctacagacggatcctggggcagttggtgggttttagcagcaccctcctttagaaaaagcctctgtcgtctgctcagtctctagaaagaagagatgtctcctctcccaggatgcatgcatctctccccacgggatgtacaggcgttgcctggaggtattccttgacagtcgtggcccagactctcttgtcattcaaagaaatgggaagctttttgaggtgggagggtttcagactcccccagagagcctagcccagttgctgaggacatcttcagatctgaaagaagataagacaggagcatcctgagctctggggagaagacggcctgcagtgtgtgtttctccatcactcacgtatggaatcccttaggccctgagaaccagagatgaacagaccccaaggaaggcctggcagggcaggcagcagtagccaggagaagggagtcagaccaggaattcaggcagagaaagggagagattgtgcactttcctgtgcccggggccactgggaaggcttccctcaggtgggggcagttgagctgggccttgaaaggtgaatgaaaattagaaatgggggcaggaggggagcctcgtggaagcaagtgtgtgactgtgagaaaggcggggcatgcactgggaagagtaaaaaaggaggcgggctttgtgactgttccctgtgataagctccaggtataaaggtgaggagtgtgcagggacaggtaggacctactgatgggcgaggcccaaggctctggacttgttctgtggccacaggagatgctgaaaccaggagtgactggatcagggcagcttctgaaattcccccagctacacgtggccaagaatggtcactgtgtactctgtacttttatgtgttactaaagatgttgctgggccgggcgcggtggctcacgcctgtaatcccagcactttgggaggccgaggcgggtggatcacgaggtcaggagatcgagaccatcctggctaacaaggtgaaaccccgtctctactaaaaatacaaaaaattagccgggcgcggtggcgggcgcctgtagtcccagctactcgggaggctgaggcaggagaatggcgtgaacccaggaagcggagcttgcagtgagccgagattgcgccattgcagtccgcagtccggcctgggcaacagagcgagactccgtctcaaaaaaaaaaaaaaaaaagatgttgctgaaaggagcctgcaagcggttatgcagacttctgagcaggggctaggaaggagggcacagaggaagcaacagcagacagctggtgagggtgggagacccactggagatggacatattctgaccctcagatgcaggctcatttcttgttagctcgtgactccttactatgagagctgtcatgcaaaggaaaaggccctgttatggggccctgttttcttataacaagatattataacagtggggatgactcaacaaggggatgcttcttgcctgagggaaatctaggaaggcttccaggaggaaggactattcagattgaggagggaaatgagggggctagtaaaaggtgcaaaaacagttgtctaggggtgaggcacactttcagatgtagttgggtcaacttgagcaaatgacttagctattccagacttgatttcatctataaagtggtcacagtatctgccttgcctgtttgttgccatgatcatgaaatcagtgggagcagacctggcttggagcctgcaccctggagggaggtggtgctcagaggatgcactctgctttcgccttccttgttggtttggctgctctggagccaaagggggcttctctggccccaggacctctctgagactctatcttcacctctcccctgctaggaaattttattaagacattggataaacagatgacagctctgagggaaaacttctcagaaggaaggggacaggacactaagtgctcttctggctgggagccttttaggcagtagggggagctgggtagctcttggggctttggtggtgtggactgatgcaaatgtgggcagacggggtggtgttggatcgcctggcctgtgtgcacggcagagctgagcctggagcctagggcccagcaggggatggaatgagtcagggactttccaggttgggggctgctgctggggacacagtaaaacctcttcaccagtcctgcaataaccccagacagtatcctgcctgcctgtacacagtaggtgcctgacacagtctgcagcttagtaggagctcagtagttgtttgctaaaacagtggcgcaggctgcaactgccaaggactgacctggggtctgtgatgccttagggtggaggatgcgaggagctgggcaggacctaggtgggactccagggtgtggctcttgttctcccactggcttctgttcatatttacatcgggaggctgtgcagcctcgggttcctggcctcagctggattagcacctcttgctggtggctgtaagggaaggaggtgtgacggtatgataccctgcatgtggtagagactcagtaagtggataccattgcggtggcttctctggtgggatgggaaaaagggtgaccccaggcaaaaatacctggttggctgggtgtgcctttcccctaggggtttttgtttccgtgtttaaatgacccaaggatgaatctccaggccagcaggtggggcaggggtttgtctgcccccaggcttctgggcgcaatcgggaacctgggcagctcacacagctcaccagcctgtctcctccttccctgcacccgacctttcccttctgtcctgccggactagccgggtgctttccagaagagaaaacccgggactgctgcctgggaacccagtgcccttctcagcttaggctgtctagacccaagtcggggtggggagtcgggttaggggatcatggtagacaaacccctggccttgtctggacctcagttgtgttcacttgttaaaatgttggaatggaaatgtggggaagggagagcgtttgccttggttgggtctctgggctgcgctggtctaagcccgacgaacccggggtggggccagcgggccaaactggaatgcgccgcgagagccgggccgcgggcaagtgaggggctggcggggccggtggggacccagactcgcacgaaggtggggaaggagttgcaaggcagagacccccgaacccctgctccagggcctgcgcgtcccgcccgcccggcgtgccgaagcgcagcggcgggtcgctagcgggaagtggctgcagctggaggcagctggccgcggaatgtcacccgctgccgggcctgggaagggctgggcctactgctgtggggtggggggcgggtgggagggcccggagggctggggctggggcgggccgcttccgggctggagagggtttggggcgtggcgcagcccgacgttagtccggaatgctctgggagcagcgctcgggggaggttaccttggcgcgcccccaaatcttttggttcccccgctcctgccttccactgctctggctgacctggctcagaccagcttgaaaaatgcattcattcattcagtacatctgtcgagtgtctactctgtgccaggctctggttcgaggtgtgctgggcttaccggggcgtgcaggtccctgttctcgtggaccggacattttcatgataggtaaaagacagaaacaaacaagatgacttcagggtagttctgtggagaaaatgaagcagggtgataacttgggaggtgggagttgcccctttagctagagagatcagggaaggcctcttcctgggacgggactttgggtctgagaccggaatgaggaggaaccagccttgcccacggaatggcaaatacaaaggcccagaggcggggcttggggcaggatatgaccttgggcggagtcagtatgttaggggaggagcctgtagggacggctcctccctctttcttgacccagacctctgtgctctggcctgcaccctgcccagaggccccagagggcgacttgccatggctggaagcgatagtttgctttcaggagtgtttctcgtcttcttggacctggaggttgtgccatgtggttacctgcatggaagacggtaattttccacttgtttcctgaaggacacggaaacctttagatgttgtcatcactgtgtttatttaagtcatttttgaaatttcagcttggaagacacagattcagcacgtgcctttcgggaaggggaagccctcctaggctcacctcttagatgccggcccggccgagaggccccctaatctgtccagaagagctgcctgggtgagcaccacccttgggaatgggcctctgtggccttggacttcttagtgacaacttcggcaagatcctgggccgggccggaggggctgctcactggagacctggccatcttcggaagccagatctggctccagagcctcgggggttgcaagtgcccagaaccaggtcagcagagaggcctgcgctcccaccacaaaggtctgtttgaagtcctgtgggagggaggacagacaccacaaggaaacttcctccccggtgggtgggtctccagccaggtatggggtcagacaggctttggtcgggctggagggtgaggagctgtttctccaatgaggcctggtcccaggactgagtcctcagtgggcagggcttgttggtgtgctgtgaaagtgcaaggcttgggggactgaatgggggactcccttggacatgggaggaagagtgaaggtgggggctggggttgctaaactggttcctcctccagggaagcaagccctgccctcctggagcttccaacctggaggtggggaggtgggctggggggaagctttagggcacagctcagagaaggccaagcaggcaaggttgtggggcacctggaaggtgggtgtccagcggcctggctgctgacctaggctcagggaaccagcatttggtgggtgagctgtgaggaacgggccttgaccctaggctgcagggctaatgagggcctttagccagaggctcccagcacaggtgagggggaaactgccggtgcccctgtgccctcgcgctctcccagccctgcctctctgagacagatttaataatccatgtctgtctctctctctctcagttagtattgcaggagggaagctttacttctaaaacttttattgatccagacactaataaaagtaaagggtttttttttcttctttcctgctagagcaaagaacatcagacatcagagccctaaaacacaaatgtgttttcctcctccctagatctgggagggagttgtgggttggccttgttcagatctagcctcttcaagaagcctccctaacttctcaggcctgcagtcatccacctgttccagagcagttaaacgaaactgccacatgtgcctctgtctgaccccagaaggctgggctgtcacagaagctttccttcccacctgaggtccccagggttagggagagacgccatgggaggcattcaagacctggctcttgatttcttgtgtctctcagggtttggggtttggttctttggctgctctggtctttgtttttgcatcttgatttcatcaggacttactgagctcttatactgtgtcagaccctctcttaagacacagaaatacaacacgtagagcttggccacacacagcttaccttgtgatgggagaggcagataagaaataagcagagaaacaaagtgattctgctttgggaaacatagtgaagttcccctactgaaatgtgagtcagggaatttctgtctgctttgttcagcacctgtgttcccagtgcctaaatagtgcttggcacatagtttgcacttaaatatttgctagctgcatgagcaagatgctatgaaggaaacaagccaagtgttccactagggagtaatgggggcagggcaggacctgttgtagatggagcagtcagggaaggattgagttgcagaagatgccagaagcctgccagtttgctgttagagtgtgctggagcaagaactcctagcctagggagcagcaagtacaaagtccttgagcaggaaacagagactttggtgtgtgtggtggggggcgttgggtgttgctggatgaggtcagagagtaggtaggtcatgactgccaatgtctttcacctgggtagcagttcagatttattcagtgcagtggggagtaattgaaggcttttaaggtgaggagttcagtaatctgatttgcatttctgaagggtccctctgactcccctggtaggggtaaggggaagcccagtggttggggaggctgcccggacagcaggctgcctggggaagatggagaggagtaaacaggtatgagggatttcagagggggtagcagcaggatttgtgttggattggattccaaaggccagggaaaggaagggctcctggctttgctactgaggctccacgctggacatttcagacgtgaagctccgagaggtgtcccagaggcgctgtcaggcaagcatggagacacatgggtccggagctcagaggaggatagggctggggatgcacttaggagtcgtgagcatgctggaggtatttagagctatgggagtggaaagaatcaccaaaggaaagtgttgtgctaaggaagtgtctccgaaacagccctgaggagctccagcactgggaggaaaggaggtgaggtgctagcagcctgtgagaacagaggaaagctggagcagggtggcctgggttcacggggtagtaaggcacagaaactggttgactttggcaacatgaaggcctttggtgtcctcaaggagacccagtggggtcggaacagacaggtgtgttgagtaggaaaaggaggtgagaaggtggcggggacagcagtgagcaaagaagtgcgtgaggacccagctggcccaggatgttgaggaggggagggccagggaggggcctgaatgttctctgtccacagcgtaggtttaccagcagcagctgacccagtggatctcagcctggagattctgattcaggagcgccgataggccccccacagtgatctttcccagctctctgagccctctccacccactctctggaaggcttgctcactgtgccctgtcacgtttttggactgaatgctgagtctgttgaccctgtgttccccccgtcagcccctttccttacaccagtctctctgggtccacggcccctaaataagagtatcctggagcctggcttacctcaagtgtctttcccagagcagagctagacttcctttacaccaagggtatttctctggaaggctcctttatgtgtttggcttctggagaagtttgagatgttttacacaatattttggtggccaggagctctaaccctcacccccaacaaccctgccccaagactttttgctggctctggggagggttcagaatgcatcggcttgagggtgcagggttggcatacacagctggagataacataatgtctgctagacgcctggtgggtttcagtgtctgttgaatgaatggcactcagatatttgagtttggggttcccagttgctttgttaaatgcttttcctggttaaccagtgtttttacatctgttatctgcaggggatagtgtattacctcattttatacatgaggaaactgagactcaggaaagtaaaaggatttgtccagggttccacagttgctaaatgacacgaccagaattggagcctgggcctgcaaaacccccaaattgggcctcttcttactgactaatcctgggggtgaggtagtaagggtggaggttaaggcacccaggtctcctactacctctcaagaatagtggccagatgttctgccagggctccaaggcattccttctgcctcccacccacctgtttcctctgatgctcgacaccccctcctctccccacatgcgcaccagatgcattcggctccaggaagataggatgaggcaagccttgaaccttgtcaaaccttggggatgcttgcggcaaagcctgtagcttttggggaggctgtttctgcaacaggcgtgtagggtggccctatggctgatgcagaactccccataggtaaggtgagctcagccggatcacatgccatgaccacacgtgagcatggaagacaaacccagagaggtctggaggcagggcccctcccggagaggcaaagccacttatgctgcctcctgacagcctgtgtggctttaggctctcgcttccctcctgctctgcccctcctactcacccagcagacttgcttagtctgggcttgggtagccgagacaggttgttttcaggcctcaaaggatttgggccacagcccagcctttctcagtgtttctcaccttctgtccttgtctccttatgggacggagcaggcatctggaaggtggcagaggggtgatcctgcctggaaatcactgagggtccttttatagaaagaaacaggctgagagaaagaaatgacttggccacagtcactacccaagaggctagtttcctgtttgtgcctccagctatcctggggcagcttccttcaccccagctgaaagcaggcttttgttacgcgctcactctcagcaaggctttgttctgtatcctctcggcaatcctatgaggtaaataatattatgtccatttttgaggaggaaacagagaggcctagggaggtgacttaacctgtccaagaccacacaggttacaagtggcagagtccgggtttgaacatagcctggcttcagagctcattttctttaccatcaggctacacattctgaaacttatttggcttccaggcatcacagaaacagagtgagggtgctaaatccttgaatgactcagcccctgtggagttggacctgaagacgcctcctggccttggcttttctgaccaaagatagccacactgggcagggcacggtggctcatgcctataatcccagcactttgggaggccaaggtgggtggatcacctgaggtcaggaatttgaaaccagcctgaccaacatggtgaaaccccgtctctactaaaaaaatacaaaattagccaggtgtggtggcccatgcctgtaatcctagctactcgggaggctgaggcaagacaatcacttgaacccgggaggcagaggttgtagtgagctgagattgcgccgttgcactccagcctgggcaacaagtgtgaaactccatctcaaaaaaagaagatagccacacagcacctactgtgggcccagccactccaggtgccagaatggcccacgcttctctgagggtgccgtagaccaggtgctgagacgcagacagtccagtctctcttcccttcctctccccatcccactcctattccagtaactaggcaggccctgcccacccttgccccaggagaagctccactcttgtggacagtggaagggcctcggccagcttgcctgagtcctgggcttggaaggacggttgcccccatctgccttggttccctgcacctgccttttcttccccgcatcctccctctgactgcccgcttttctctgctttcaccttcccctagtgttcctcttctttcgtgttgtgtcagaagccatgatttccagtcttctcatctggaagatgaaggaaaagatagacccgaccccacagggttctgaggctcaaactgaaagcctggtggtggggcacctgtgacaggtgagactcctcatcttgcccccttctttcttcatcatgaagaagagacactggaggatgtggagcagttggggcctgtggtccaggtgggatggagcagtcagggcctcgtggagggagcaggtgggaggaatactctggctgggatggacctcacggggtgtggcccagctttgcagctgacttgcatgaagtcctggcgagctggggagcccttgcaccctcagcttcctcatctgaaagatggggcaatggtaatgcctgtctgtggagtggtgaggaacaaatgagactgggccacaaagtacccagtgctgtgcccagcacatagtgcccaaagagggctgctatctcatctcttattcctgagatttagcttccttgttttgtttttgagctctttgggaccttcgtggactttgaatttttactattgttcattgtgtctaaaatcttcctcagaagccgagggcctctaacctgatcatgaattttggagtttcgttttttgttttttttttctttcctgtttcctgtataggaaaaagggacctgtacctttaagaccccagcaggcccaagtaggacactggccctttaaaagcacattacagagagttggaacatagcctttgttgaactagccatgattagtcccagcggacagggctggagtggcatgtctgggatcagggcggggctaggctggccggggccagccaggagcagcggacagcaggaaggctcgcccggccactcggcttcccgagcctggtggctatgctgagggatggtgagtggcctgagcggagcttagaataagagaggctgggaaagccaggagggaggcagccccagagcccagggagacctgaatgagctgggcggcagcagacaccctcagtgagtgactgtcacaggagctggtcccaggagggactccggagcaccctgcccctctacgcagacatccactgccggcccagaatgtagaaacggttaggagggacctgtgaaaaagcgggacaccaagaagagcactgttgctgtttttagtttttaaaataagaggaagcccagtgtgagttgctctgtcccccaggcgcggtgtcccctgtggtgtgctccgttgagaactgggaaatgccagggactgctgacaagttttctgagctgaggagcttggcctttgctctgagtggccgaacctttggctggctgggtggggctgcactggggtttgggggccatggtatctctgccccagctcctcagcagaactttgttttttcttctcccttcctgcttccactccctagtccatggggcccaggcccactgggtggggtggaggcgggtgggagactgggaagactgtgtctgggccaggagcgtgttttggctctgcttgaatatttgaaacagttgtcagaagccagatcactttggtgtggtagcgtctttactgggcaagtacccatttctgaaaaaaagtcagaggaaggattgggcttgttacagccaagtctcagtgcaggttggtcctaaccgccttcattgccacggctgggggcggatgagactgcctgccagtaggtgtcctcactgttttacagacagccacccaggaggtgacaaaggcagggctcagtacatttctggtgacccaggcttcctgtagttacttaaaagttggtgcatttggtcataggatttttgtaggtttggtgaaaacctgaggcattgacgggcagtgaagagagtttgaagttagagccgaagtgccaggtgtcctgttccacccttgtgcctgtgaatcgtgacctcaggcaagctgtttgacctctctgagcctctgcttcagagcagagggcgtgtgcataggcgcaaaccctggagggagttgtcagttctgggggaggctttgtggaggtggtggcctttgagccaggcgtagacggataggctgctggagtgcaaccccttgagcagaggcgtgcagtttagcatgatgagccagatagggccaagcagggctggcatggctgggttgggacctggaaacgtagcttgggaagctggattttaagtatgttgctttctcagttggaatcctgtgggccaggtggcagatgacagggctagcttagcctggagtcagccagtgtggaatgtgggggaaaagggcagacggtgaagtctgacacactggccttgggaagcccctggaggtgtcagagcctcattctttgctgcagttagctgtgtgagggtcagaggtgcagagacagccctacgtgcccttcccaggtatgtgggctcactgtggtgtggtgggtgagcaggtacttgagagccacaggtggctttggtgcatggtcactggcagcaggaggaactcagcagccacactcctggttttctttgacatggtgtctgagtttctgcccgtgccagtggcctggaaccctgtggcttactgagagccactttcctgctgtcttgctgctgctgaacactcctggttgtctcctgctagttacagcctgagaagcagctgctctggtgccccacgcagacttccagacctcaggctttgggaggaatgggcagctgacatccctaggcccatagccccacatgctcctgcagacatagtggaggcgctcagtggctgtgctggtggctggatcaactctgcccaggattggggcggggcgggggtggggggtggggtgccttagcatgatacatcttcagcaaattgtgccaggaggcaagggcaacccacttgacggggtaggatgctgaggtgcaggagaggcccatccgaggtccacactcctttggcccagtgctccttcccttcacatcttcacctcttctgtctctctgagctcaagctgccaacaaggagggagcctctgtcccaaatggtggctggaattgaagagatagctgagctggagtgaccactggggctggagtctagggtgccagcatttgttcgtagatttgtccatctcttcttaaatgggggtctttcagattcctgcttaaaacggcctgtactctggagcctgctcttgaggtaagggggtagagcaggtgaggtggtctggggtcagttggcagaggggctttttgagagctcagctgtggggggagagtcaggaaggatctgctgggcagagtgagagacagatcttggaaatgtcctgggcccaggaagaagccaggagcatccagagaagtgctggcaggaagggcgtgcgggaagggacagaatgccccgggaaggcagtctcagcccagcctggatggtaatgggggcagccagggctggttactgaggctgtgtatggagagctcgctgcaggtcagttgagccctacagccaaaggtggtggtgtccctgttttccagatgagaaaactgaggcacacaggttaattaatttgaccaaagtcacagagttttgtgtgtgtgtttttaaggaaccatgcctgcttaccaccttcaaccagcatagtgccaggagctggggctctgcggacaaatggctggtccttggttgaggcaggaaacctggccctcaaggatgagggaaggaggccatccctagatcaccccaacatgaatggcccacctggtcccaggaagtaacgtggcatggcgcccaggtcttgggtggaggagatgagatggaagaagatgctgcctctgcccccgcattctagggggggcccagcatgagctaaggagggcttcctggatgtggagagctgggaggaattagataagccagaggggaagcacttcctggagaatggaaatactcgcttttcagctaatttattcttttgtttcattatcatttcccacttgggtctcgcatccccagggccctgaggtggctgttggaggtatttatggtcccgggtggggtgcagggaccagttagaaaccagtcccactcaggccatgatgcatgggtgtgttcacatgtgaggaggagccaggcacagactgagctcaaggagagggaacgcatgggtcagggccttgaaacattctcaggagtggtgctgagtggagagatgggggagggcagtgggctagcatgtttgtggtgggctctagagcttgggagcttcagagttgctgcagttgtggctggggttggagccccaggtgctgtgcagggaggttgggctcttttcctggggctgggggtagggggactgtcactctccctaaactttctgagcagccaggctaagcctgatagtttttcctacaggccagggagggctgcagggttgtccctgctcagaagcaagaggggcaggggcagctagcccacagctcacttctgatttgcccaccactcaccctcgtcaatgagtgttccttagatgctttttttttttttttttcccctgagacagagtctcgctctgtcgcccaggctggagtgcagtggcactatcttggctcactgcaagctccacctctcaggttcacaccattctcctgcctcagcctcccgagtagctgggactacaggcgcccgccatcacgcccagctaattttttgtatttttggtagagatggggtttcaccgtgttagccaggatggtctcgatctcctgacctcatgatccacctgcctcggcctcccaaagtgctgggattacaggcgtgagccaccgcgcccggcctagatgctcttcttttaaaattcagggcacttcgctgttctgctgaggtttatgaatgtttaaaaactgctttgcggtccccaaagtaatttgacaagtctgacagctattgattaaaaacccgaaattattcaggctgcaggatgacttgggggattagatggaaagttttttgtttcttctctctctctctgcacccctcctcccccgcaaaaaaaaaaaaaagaaagaaagaaataagatgtggaaaggtaaatgtgttcctgaatgttttttgaaaactccattaggcttgcacagtttatacggggagaggatgttgaaggctgcctctcattcaggagccagtaccagcgccctctcgaatccctggtctctccggagctttggcccaagtcaccccaggcagcagtgagatgttgctattacattattacaggtgatggtagtggtgttggtagcagttatgatagtttatggtcccttatgttctagggagttgacgtagggtttttgtggctttctctgaagtagctcagcgtgtgaggaaatggcacctagaagggggaggaaactcgttcagggtctgtgatagaccttagatacagctgggatagagaccaaagactccttcagggagaggaacgggccgttgctggggtgctgggctgattggatgcctggcctccaggcctgactcactgtgaggtaggtgccaagagtgtcccacagagggtgaccaggccgttagaaccccagctttcacttctggaccatgtgacctagccaagccactccctgtctctaagcctcagtttcctctttagagaacgtcctaaagcttccattgagccttttggattaactggctcatgtattgccccatgagccagggcttgtgggacctgagcttgaatacccactctccctttcttctggggcagtgctgccttttgtgcagagttgttgggagaaggccatgagatgatgtttgtactttggtgagaacacctgcaactggcacatggtaggtgcttagtaagtggctgttaggtccaggctgccacagtgtcattcatttagtcagcctatattgggcaccacgggacaccaggcctcacagcaagcatgagctgtcccatcctcctgttttggttgcagggtgtggaccctcctctgccagctcagccctgtgatgtggggggaagcacaggctcccaggggtgagggcagaaggccacgtgtctccctgtctcacagcccagggcgttctgtgtgtatgggggcgtcacaactgggtcttggtgactgctaggacctaccccttaccttggcctgagggaaccctgggttgagagggaccacgcctctgggccctgtcatccctggaagacttcccaggcagggcagccaacctttctgcctttttaggacaggctctgtctccccagggccctgggagccaccaggcggctgcattcctctcctctcccctgggatcccagctgggccaggagtgagcactggccttctgagcagccggttcccaggccagcggggcaaggctgggcttggggagagagctctgctggacatactaggcagggcgctgccctgtttatgtcctgccgtttgattcccagcaggtcagtgcattcattgtgaccatgtccagactctctttttttccagtgtgggcagacgcttctagcacagcctctggacctgcctggctatgacaggcagaagcatgattggcatgttctgacctgatgaggcctagagagtctgctgaagtcctgactgcagaaccatcaggtcctgccagcctttgggtgggcaccaactctgtggagacaaaccttgtccaggatttctcttccttccagacctggttggggtagtggacagtggcttgggaccacacaggctggtgggctggagactggggctggagatggctgtgcttgggagtcccaggcagaggggctaaaggggcctcctcacgggggtctactgcccactgctaggcacaccttcttctcctttcatttcgcctcaggaaatgaagggctttttaaagaaatttgaggcatcccagagcatttgggcagatatgattgatccccattttgcagatggggaaaactgaggcatggagaacgtaaagcgtttgagtcgtcacgggacaggaacaggaaacagcctgggaagtccatatcttgtcactccaaattgtcaaaagtgtgacctatcccagaaatgtcagccttgatagcagcgtgtgcatcgttcaccagtgttgttcatagctgtgtctccagctcctgacatcgtggctggcaatgaggtgggcgaatggaacagaccaaagaggcatgaacagttatgagcaatggatgggagtcactgacacccctgccctcctgagcctcccgcctgcatggtctcatttgatccttagagcaacccatgaggaaggtgtgtcgttatcctcactacggatggggaaactgagtcctagagagtcgaatgacttaaagtatccaaggttgtatatttcataaggaatagagactcggtttgctctgcagccaggcacccttgacactaggccctctgtcctcctgcccgctcgcagctgcaggtgcatttctgtagcattcacttgtgtgcgcgcgcgcgtgtgtgtgtgtgtttaatcccagggcccactgcactgcctgcctttgtgtactgcccagcccattaccctggcagccctagccatgcagcatgtcttaaaggggccccccggctcctgcttgcacactttcagagacagggagcccactctctctaaaaccagacgagcctggcccattcaaggacagctgtgactgagctggaagtggcctctcctggtcccagccttgccctttggggccacacagggcagctccctctgagctttcgagatttggagggtgaccctgagccccttattttccgaccaaacaatcccactctcaattccccccacccaatagttgggaacacccttgctgtgtcaagtagggatttttaattactgtaagtttcggtttggggtcctttccctccttggaataatgagtttgctgagcttttgtgtcaccgaccttttaagagaaaaaaggatcagagttgaaaaacagcttgtgggttggctggaacgctatcagataaggctaggccccaggagccaggacagtgtccccattgttctgccaccagccctcacaatgagctgctgttgggccctggcgctgtctctcatagcagctccccgtgccttgtgcccacgtttcctgggccctgggcaggggctgccccatccctgtatcccccggtccttccttccccacctggagtgagtgggtcacagctagtgggttagctggctgtggacctttccctgctgcccggctgctgtggacctttccccctgcccggctgctgtggacctttccctgctgcccggctgctgtggacctttccccctgcccggctgctatggacctttccctgctgcccagctgctgtgggccacccctggacgatggaaaggccaagccaaggctggtgcagttagtcttgaactccgctgaactgggttcacatctgactcggccacttgctatgcatgtgatcttgggcaggtcacctcaactttctgggtgcacctttttagtcctgacaggattgtcacgagaattaagtggaacaggtgggagattgtggccctgagccgggcttaggtagcgtagtgtgagctgtctgtctggagagaccagggaccactttgtggtggtgacattgggctggcccttgaaaactgaggaaggactttgtttggcaaagaagtggagggagaggcagaatggacaggctcaggagactgcttggacatggacccctggaggataagagtttgcagctttgtcaggaagtagctggggaggagagtccaggtcacttgtgcgaggggcctttcaggagggctcggacaccagcttgaggcatctgggacttgattatcttacaggccatgaggcgagagaggagggacaggagtgaggccatgccaggcggagtggcttgttcagtggagggtgctgctttggtctagacaggagaaggccagtggaactcccattcccctctgccctcccatgccctggccaagctcctctgtagcagcggagtccagggcaggtcaccctagccatggccttggctgtcccgtgtgtgacctggatgtcatggtgccacctccttcctgggagcagtaaggattccatgccatggaggacaggtaaagggtctctagtccctggagcgctgtcatggggctagtgatctgccatgtttagaagggtctcggctggggccgtggggagcagtgtgcagccacagagggtaggatgagcctcctaaccttgagagggatgggggaagcggcccatacttggacagagcaagggcaggggcatttcccggagactctggaatgaacattggaatgctgctcttgggacttggccttgaacaggcagctgccctgacgacccaccctcaggccttcttcgtccctcctccaagggaacaaccacgtcaccagggtttgcaggctgagggagggctatccctatccccactgacctcccgttccctctgagcttagctgaccttggctgctggtgtgttggggttttggtccaggaactctaaggctctggaccttggagccagccagacccaactttacccacaaggagccccctgcctgacaaggagccagttctgtgacagaccttcccagcacagcctggatatggctgtctgcccagggagcccaggaaggcttcagggaagaaggggcactgaagctgggtgctgaaggttgggtaggaaggggaaggacagcatgtgcctggggccctgcctgagactcctgcttcctgggatggaggggcccagcaggcaggccgctgcgagagtgggcctggtcaggtggagcagggaggtagatgccagccagtggctcagagtgccaagttctggggctggcattgaatcccgtgtggtctcaagaggggatcccttcacccccacaactcaaagggctgggaaatacctccccgtgaaggcgctgtcttcacagcactttcagcatgtgccggctgccagtgttttctgggtgaagcaagccaccttcctcctttttcagatgaggaaatggacccaagaggtttgggtgtcgcagcaacactagatcaaagatgggatgctggggcacatctcttgccctccctggcaggcctcagtttctcccctgtaaagcggggtgaggtcagcatctgcctcttgggctcgtggagattctgtgaggtgacttgtgtggtggttcatgtgacgcatggcccaaggtaagcccggcctggggacgccagctccaccctggtgggaggcaggcagtgtggagtccacgccctggtttgagacctgcttctgtaggtagtagaggtgccacatcctggcagggttgttgtaagaagtagctcagacctgggccgtggaagtgatttgcaggggtggaatccccatgtgaaggccttttgccctccttggtgccacctcgcctaggggaccaaagctctagtctccaaggaccacaagaggtcagaggggaaagctgtcatgagactgagctaggcacagggtcgggaggatgccgtgggccatgcaattgggccaccttctcttccaccccagccttgggcagcagagagggacttgacccagggctgggggacggcagaagccctgaatacaggggcatcagcccccagataccacaccacatagggtagctgtgggcatggctcctggactgacctggttcccatcccagcagggggccttgggcggctcaagtaactgctcctccctgagcctgtcatacctttctgtaaaatgggtagatgaatactcctggcagggctgtgtgctgttgaaatatgaaaaaagggatgtgcaagtgaccagctgggcgctcaccttgtgctgactagaggtgggtgcctacaggcatcccttcctgggagtggaatgggagtgaggtagagaccagtgcctgcttccctcctttcacctgagcgtcccgggtagggaagctgagcctatccctgcccctttggagcctgggcagtctttggtacccatcttctgccctgcctctaatgcgctgcttccctaggctggcaaggcagaggctggaggtgaaaaaggaagtggcccaacaatgccagcatgggatgaagccagggtaggggagaagcctgccttgggtgactgatggagcaagcagtccctgctgtgaagtggccagggactgctgcaagcacaggacagggctggcttcccagagaggtggttcttgggccttgaattggtcctgctgggttcaggaagtgaccaaatgaccatttttccttccttagccccctcatcttatcagctaccaccatgggcacaccctggcagggtcacagcagaccagctccctctgggcccagatgagggagggaccgaggacactgtgtttcagggcctgtagactccaggctggtcaggaaggaaacgcataggaacgtgagtgagagagtacgggtccactggccctgcctccaccacccacccgcttgctgtactatccaggaaggagtagcctgggagagcttgcgggaaccacttggggcctccctgggcctgccctgcccctattcctcttcctcccagagagcttgggctgcagggatggatgcagcctctgctttacatcccaccccgtggagaagctcccagggaagcggggagggtcatggctgcccaggtaggccgggccagtccaaggtgtcttaagggccttgagcttccctacagccctctcttctgccaggatcctttccaggtcagccagagcatgcttgtgggacatggtggggaaggaaggggagggctctgcaaccacagactccaggatctggctgttttggggtctggcctgggcctgctgggctcctggggttgcaggaccagggtctccttgggtttccctgggcaggcccagcctgctgaagcatgcctcgcctctcctctccacagccagctcattcatgcgccccaggcaggaggcggcctcagctcaccagctccccgctctgtacttcctgggtccctaccccaccctccctggctcccagcatccttacctggcagagattttccaagctaggccagaaagcagcccaatcccagccagtgtgacttccctactatcaggcagggcgtctcttccactgaggtatgaagccccatgtgggagggaggcctggagtccaccctgggaggtgggcggctcaggtggaatctcagcccagggagggcaggcccacccacggcactggtcattgccgtgatggggaggaggccaggccgctcgagcaaggccttgagggattatcaggagaagaggcctgttccaacacagcggtgtggcggtgtgatgtggtggtgtggcggtgtggcgtggcaggtaggccagtgcccctttgtgaactggacctcccagggagagtgcctcagaggagcagaggcacatgctgggcttgtccatgggcttaggccacaacgggaagccccaggtgggagtccttgtgggagttggggagggttcccccctgtcttgaacttgtctcacagttttcctctggctctgcccattccctctgctttcagaggccagcttcgtgctgggtgtggagaggcagagggagccggttgactggggctcctgggctggcctctgtggggtatctaagggttgggattccctcagctctgactccttacggcatctagcatgggactccatgttggggagggctcttatgctcagagggctgttgccatggagatgtggagcttggggtgggagggtggctactgtcagcctgagtccctctgagcagggctcttcctgctcacctctggattcttgagcacccatggagtgggcctcagcccgctgacccggggcagtcgcagaaatgagtgtacagggtatgcatcctacagggaagtgtctggtggctctgccaagctgcgagcccctcaaggtcagggaccaagcctcagcatagcccaaggtaggggtcttggtttggcgaggcagggagagaatgatggactgagcacttggaccattggaaccaggagccaaagggcatagggcgttgggggtaggaggtccatgtgggctaagcctggagtaggtttttcaccaaccccagggtttgagccctggacacaagcagggctcagcttctgcaccagagatggtcttagcaggcccagcctgtcctcacgcttttcctctgtcccaccgtgggggctgggggctctaagaggacactgctctgtgctgctgactttggagagactttacctaaccctagagcaggtgtcatctgcggtgctttccctgtgatgcactgaggaaacaggctcagaggagaacgatttccccagggccacacagcaggggagcagcgggcccaggtctggtctgcgtttgggtgccgggtggcatcagccctgtgctctttgtgcctgtgtcggagccactgacctgggccctgagtcccagcatggggaccccgatggagtgtgtgtcttgggtactgtgcagagactgctgcatcccttctgcttcgagactcgcctcgcctcgctgtcctcatctgtaagatgggagcagcagggtccctgtggctttccctcgtgtgggtctgctggtgtgggacagtgtatgaggaagggctgttggcagtggtatgctggataaatgttggggcagagtgactgctcagtcttggacaaggaccagtgcaaaagagaggggaaatgggaaagcgcccagaactgcagacagctgcctgggtcaggcgggctttccttgggtctctgagacttctcaggagccaagctggcccaggccccgcaggctcacttgcaaatattaaccccggagtggcgcctaatcctcaccttcttgctctctgagaggctgagcccccagccagactcttgcagtcgggaggaggttcccaccagtctctgtgacagccctgcccccagatctgtcttaagacagaaaggagagagagtggagaggagtggctgcctgctggaaggggcacggccagggcagatgggtgggacatggcaaccagcttgacccgggctgtgggggcccacctgacacacctactgccaccccaggtcccatctgatgccgaggctgaaggagtctcgctcccacgagtccctgctcagccccagcagtgcggtggaggcgctggacctcagcatggaggaagaggtggtcatcaagcccgtgcacagcagcatccttggccaggactactgcttcgaggtgggtcccatcacaggggttggggtggacaccccatcctctcctggcctggctggtctcctccagacatcctcctggagtccagtctgctgtggcctcagcaggggccagggtcttggggacagtggctagtagttaccgatagctttcagctcctaagagacctggtggagctggggtggaggctgtccttcctactctctaggttctctggaaatgggccagcacctgttctccatgctagcctgaagctgctggggcccccagtggatgacagtgagtaggggaaaagcctgaatttcttaagcaccagagcccatgtcttagagcctgctcacctcccaaatgcagtgtggatagcagagagtctccccttgtctgggcctgtttcccactgtgaacaatgagagcccaaatctgtcctgccctggcattctgcgacctgaggtttgaatgcagagagccagtgacccacctggggatgacctgtccagtccctcataggaaatgggggatctgaggcccagagaaggcacaaagacatcagaggtcacacagcaaggctgagaccaagccgggagcagggttactattgttgcaggtgttcctgggagttactaattgcttctgcagttattcatattgcttcctaccagtttctgggaagattcctacccccaataatcatgcataactaggagagctctcttgtagaggaatgagcctggtaatgaaaagcagccacttggggactagtgtgacaatctcctggcacccccagccctggggaaaaaacagaatggtgcctggcacctgccccataccctgtgcccactggggaccatttctggttcaggactcctggccaagccaggcttgatctgggttctgacttccttgccagggatagggtgaagatggccctgtctgctggttcacagcagggggttctgtggagggtgcaggccctcgaatgccgtgtgaggagtgtgcttcccctgcagagacccgggtctgctgctggggacagtggaaacacacagcaggaattgcccggactggctcccttacctggcaggagatgtctaagctggaccagaggttgagtgagagtcagacagagagggaaggagaagggtcagggactggggaccctagggcctggcacatccagacagtccgagtctcatttctccagtctggcataaaaaatatcaggcttatattaccattgttgtcactgctgcttgacggaagagaaccctcagagttgtcagctgaggactgaggggattctggtacctacctttagttgtctccttggttcttgtggttccgcctttagggaaagtacgctcgggttaagcattgccctctgacctgggcaaggtcttcgttcattccctcttcccatctcagggagagggaggttagagttaggaagatgctttcctattggacagagggcactgagggacgagtgaggagcctgctcgtgcaggatggggccactctccggctgctgacttgccctgggacagtggctctcaagtgtaccacctgcaaaacatgaagtagaggcgtcatatgagccttgtcctggctccttcctgaagctgtgatgcagacctgatggccagagtcccctgagcctccaaggtcttcttccatcactgcctgcccttgctgtggtcccttccctcataacactgtcttgcctgctccccacaggtgacgacgtcatcaggaagcaagtgcttttcctgccggtctgcagctgagcgggataagtggatggagaacctccggcgagcggtgcatcccaacaaggtaagcctgcgcccctctcaccaaagcatgggggattgaaggtaggctcagataggaggaaacaagagagactatctctgtggtgtgggctgggattgggggtggtcagcctgcatggaggcagggcccgagtggacaatattggtggactctgaaagagacgtttgagttgaccaggttgagacaggtgctgtgtgcctctgttttctaagctacacattgaggctgggcttggggaaatgagtgctggaccctggggtccttctgctgggaccccttgtccctactccccagcccctggctgagttctgctcatcttccccttccaccttagatgtctgcccctcctccaggtgaggacccctgtcccaggctggtgccctctgtgttcccactgcccctgggctcccccattaggtcctgggagcccccactgtaatccctgcttctgtatctgtctccctagccgacttgagggcttgaccaagtcctggtcaccatagccatctcttaagttacagtacagaccagcatattaaggaagagttaataatggcatagcctgtgacgtgtcaggcgttgtgctggcctctctcagtctcgccctctatgagatgggggttttaccttagtgccgtttcatagacaagcaacccaaggctccagttaagttgcttgcccaaggtgagtgagcttctgtgaggtcgaccagagatccagcccttgtccatcatgccctgcctcatcctgacttagggcctaggcgcccgctgccgcctccaccttcagagctcctcctgggtctgaggactctctcaggctctgggctggttgggggttgcacgtggcacccccagctgaccaccctggacccccgtgcacatacaggacaacagccggcgtgtggagcacatcctgaagctgtgggtgatcgaggccaaggacctgccagccaagaagaagtacctgtgcgagctgtgcctggacgatgtgctctatgcccgcaccacgggcaagctcaagacggacaatgttttctggggcgagcacttcgagttccacaacttgccgcctctgcgcacggtcactgtccacctgtaccgggagaccgacaagaagaagaagaaggagcgcaacagttacctgggcctggtgagcctacctgctgcctcggtggccgggcggcagttcgtggagaagtggtacccggtggtgacgcccaaccccaagg

SEQ ID NO: 15537 - DNA, 133937 bp, Homo sapiens
gggagcgggagggggcaggaggcggaggaggagtttgagcgactttgtggggcagccagggcctcggcggccgctcgggcgagcgcgggagaacgcgtgggcgcccgccgggctgtccggagcggccgatggggcccgtgtgagcgcgcccaggcccggcccggtgcccggcgggcggcagcatgtccgcgggcggcagcgccaggaagagcaccgggaggtcctcctactactaccggctgctgaggcggccccggctgcagcgacagaggagccgctcccgcagccggacccggcctgccaggggtaggcgccaccccgacccctgacccctagaccctcctaaggccactaagccacctgatgccctgggatgctagggaccgggatcctccttccagccatttgccgggggtttcctcatccgccccttcctgagtctgccggaccccccattcccccagcttctgcttagtcctcctctcgccgggggaagccgaggctctagggtctcctcttaagccagggacagggagaggggagcctggaatctttctccgcatctcagatcagacctcctaccccactgtgcctcagtttactcagcagccgggcaataaagtaacccagggtggatctgagctttcccacaccttgccttcccagcccaggccgcggacttctttcttccctttccaggaacttaacgggctccccacctcttgggtgctaggacaagtgggtggacctcagggaaggaaccgtgacccctcgagcgggtgggcgccagctcctttgcaaagtttctctccatcaagctcaggaggcaggacgagacggagggggaggtgcgagcagcattttctttttccagtaacaggatcctcggctggaaatgcgtgtgatcccgggggctgcgtttgggcgggtggtggccgggacttccttccctggctgagtaggagggagggaagcccctgggaggaggaggccttcaaaggggctctggggaggctggagtcctaggcagaggttcaggcccaccgagggtgcccgtggggtggaagggaggagaaagacggcgccttagcagggacctgggccgagttgacaccatcaggttatcttgaaagtgggaagccgggccctgtgccaacaaatgccatgcagggaatctggtagaccaagaggggccacattcccaccctgcaggctgccgttgtgtgacctgggctgagctgcctctgaacttcagttttcttgtcggtgtgagggtaaatgaagcaggcaggtagtgttcggttgcttccaccagaatggggaagacttttcccacagtcaggtctgagtagcactgtgcagtccagggcttcctcaggaagtagtgagttccctgtgcacagaagggttcaagctgaggctaagtgtgtgcacaggtgtgtgctggtagttcagtcctcaagggtctctcaaagcctgcaatccccccactcctgcctttcctgaagtcttagtaagtacagaattaacagtactaagttacttagtaagtacagaattaacagtactaagcctttagtactccttggagggagtactaagcctttagtactccttggagggagtactaagcctttagtactccttggagggagtactaagcctttagtactccttggagggagtactaaagacctggggaaggctttatctcagtggttcaggttttggttcttctatctctgtccttctatttaattctgtacttgctaagacctggagaaaggcttagtactgttaattctgtacttactcccttcccctggacttggtctgggagaccgggaatctgggctcaagctttgtgactttgggcaagtcatttcccctttctgagcttagttttcctggttgtaaaatggacctgccgtatgtggaggattcagtgaagaaactgagaaatgggagctttgaaaatgcccagtactgttcagaccaccctggggcctctccttctgcacccacctcacgtcacctcacccacccgcccctcctttgcctcagaaatgccctgtgtgaccttttcctcttctcacctcagcccagttccatccctgactgtaatgggagtctcgctcctgttcagctgacctcctgctcagctgaccaggcaggggataatcaatgtgtcaggggctgtcacctgagccccagctcccagaccccacatacacaggatcactgcttgtgtcccagcttgaaggagctcacggcctgcagagcggggaggagactgtctctgaacagaagttatatctggggagatcagggagagcttcacagaggaggtgacatttggatgggatctcacaaaatggatagggtttcccttcgcagagggagtaattgagtcagatctgggttcaagtctcagctgtgcacacaactattctacagccagttacctctccaagcctcagtgaccttgtgtggtcaatggggctagcagtgacagggtcatgtgagggccagaagccagtgcctgggactaaggctgcagctgagggtgagctactgtcttctctctggacagaatgaacagactgcgcagtcagggagaaggaaaacggcttgggtattgagaatagagttcctcctgggtttggggaggggagtggattgggaagggggctgggtgagtgggtggggaagagcaggcaacagtagtttggatttgataaagggccttgaactttgggaggccaaggcaggaggaatccttgagcccaggagttcaagaccagcctgggcaacatagcaagaccctgtctcaatattgtttttgtttgtttgtttgtttgtttttttaaaaaaagaaggcctggagtgatgaggagttagttacagctgcagccagggtgtagggtggaggctggaggcaccctgtcctcctcctccttggtgggaggcagctagggcagccattgccctccctccactaaagcctcagacgcctgactctaccccagagccacaaccaccacctgagggcagggccccacccagggagaaactcaggctgaggaagccaccctgtggcctttgagccagtcccttctgaccttgaacttcagcctccccatccacatgggggcttggtcccatggtgtggtagcatcggacctcagaggagtgggtggtgcctagcatctcagcctggatcagactcttgcccccacaccctttctggcctctggcactagcagggaaggaaaatgaccaagaactcaggctgtgtatttgttcagaaacagaaaaatgcaaggaagagttggttgctgccaggttctgcaggtggccaggctgggggaagggagcagggctttgtccctggtagggctgtgagtgagggacagtatctgcagtctccctagtttgaccaataagggacttaggttcttcccttttctgggcttcagtttccccatctgaaggatgggcagagtgagacctgctgtggtggggggtagagcacgaagctggagggtagctggaggtggggtagaaacagtgaccttcggagggtgagggccatttgcattttcccactgtgtccctaactccacttgaaggctgggcatgtcccatggatttggggggatcctttccccagaagggtatcatcagcaaggtgcctccccacctagtcacaccaaaatcaagaaaagttttgtctctgacccctgtgtttccccagggctgctaggagaaacagaaattttcctctagccctggataaagttctgacccattcattcagccagtcagctcctcttaagcacctactatgtgctgggcttcagcttgggtgcaggggcacatggagatgaatcacatgtgctcccagcccttgccaagcccccagtctgttggggaggccagcttgttggggtgcactagggcacaagtctctttctaggggacagagcagtggttagtgggaggcaggggctgtagttccagctcagccgcggactggttgcatgactgggcacatcatagggcctcagtttccccatctgtcgaggggggttaatcttgctctcctgcctcttggaatgcctatacccatagccatgaggggttttgattatgttgttcatgttttcatctgagtttttctaggggtccagccacctgccaggccctggctgggagctgggggttttgcagatgtttttctcttgagatggtcaggtcctcctccgtgcctgtacacacccctcttgcatgcctctgtatcttgcccgcgtggtgggagaggatggtttcatacaactggttcctaaccaagagaacagttaggtaaggacctgtgtgccaccatggggggtgggtaacttctcaggggaccctggctttttttttttttgagacggagttttgcttttgttacccaggctggagtgcaatggcgcgatctcagctcaccgcaacctctgcctcccgggttcaagcgattctcctgcctcagcctcccgagtagctgggattacaggcatgcaccaccacacccggctaattttgtattttcagtagagacggggtttctccatgttggtcaggctggtctcgaactcccagcctcaggtgatacacccgcctcggcctcccaaagtgctgggattacaggcatgagccaccgtgcctggctgggaccctggctttgataaggtctgcaagaggcctctggggcaacagcttggacttcatgagttgggcgagcctgagaacagccctgaggtgggggggttttgtggttccccagttttcaaatgttccctgcaagggccctaggcctggctctctgcctccaccttggatgacacctgtgaaatcattatgcccttttctgccttgtctcttcttctgtttctgccaagacacaatctttcatttggggcttggccctagcctttccagtccctcctctcccttacatacctcaaggattggggagctcactccctctcaggttgtgtaatgagggtgaaaatggctcctttttgttacggctcctgtgtgctgcgtgcctgctccatgcctggcaatgagctcaactctgaacttgccttgtcttatgcagtgttcagaacaacactgtgagatggatactgatactatcctcatttcataggtgaggagactgtagcccagagaatgaaagctttgcccaaagccacacagctcagaaatggtggagcccagctctgcccacctccaggtcctgagattcaccttgcgatatccgtgggcaggcagacctttctaaggtcaggccctggctttgagaaggccacctcccttcacagccaatgacttcactgggtgttcatggcaattgtctctcacagtcttggtcaaagcttgggagggaggcaggggagtggccccgttggcatctggttgcctcctccacctgcctgggatagctcaggtgggacctccccggcctgcccctgccccctggatcctgctgtcattcatgacctgccaaccatgccctttcccagggcatgcgacaggtctcagggcctcagccatgtttctccaccaaagcccttagtgctgagggttcagagtcccctggtgtgaggtccctggagcctggcagacacctgaggcctaatccccagagctctctaggtcctcgaaggaggccacaggccccagtgaatctgctggaatgtcagcctcttgcccttgcctttgtccttcctgacccaccctcatcatctttaataatcaggaagagaacagctccctttcaccaagctgaatgtgtgcccggccccatgccaagagctccccctgattacctcatgtctcatctcagttctccaatcctcctagcaggtaggggttattgttgtcactttcctttaccaggtgggaaacggagctctgggtgtgatatttcctctgcattttcctgtcggggtggtgaaataactggtttgaacccagtccactggactcgaaagctcatgctcagaagccccagggctccctctaactttcttggttgctgcaactcagagagcgctggaatggacccagggcatgctcctcatctcagcggttcaggttttcattcttctatctccatccttctatttaattctgtacttactaagacctgggggtacagggaggggcttggagcctatttgcccagctgctgaatggggaggttggagagatggatacttatggctccagtaccaggagccaactgtttcccttgacaactggggaaactgaggcccacagagccaaggccacttgcccgtggttacctaaagatgttaacgagaaatccgggtctggaactcagatccctttgtatcctgtttcggtgttggtgtagtttgttgctttccctaagatgagcccagatagggaaactgaagtgcctgggctcctggttgggtcttctgcggggagagaatggcgattcaactcccgtgtactgttgaacttgacacaaacacgctcacatcccaggctgcatacgtgttttgctttagaaatgacatgaagccttttgactatttttaagagaaaggcaatggctgtgatatttcccctgcacctccctctcggggccacttggttaaatgtcaggaaagggagagtatttcctggtcaggaacattcagagcttgctgggagctgaagttttgttttccattaagtaggtattcggggagtctatttccctctgcctcctctgtttccctggaagcttgcgcttgacagttgcagggaggaggggtttgagaatgagcagccgagatgcccacgtatcgcgtgcccgctctaggagtggcggggtggctatttttagccatcccgattcagtagaggcatttcagcgtttgttcaatatttaattatccatctgaaattggcccatgtggccttcagtttggaagcagctctctgtgctgtgatttcccagttgcataaataaggaagcaagggaatctcaatagccctccaaataataataacgagaaaaaaaagtagactcgatactcagcaaagacaggcttggttcctcggtctagacagaccacctgtatgttagcagagaagcaccaccgaggacgcccatcacgcccttggaaatgcggcggtgctcagtctccgaatctcagatccacaactgcctgggttttattggggatgggttttcctcccttcgccaggttcctgtgttgactttgacagctgctgggtacctgagaggtggtttggggattttgcttttggaagccttgttagcttttatttccctcttctcttctccctgacagacaggagagtactatcggcatctgggctgtgctatttctttttccttggcctttggaggcgatgtgccgacatagttgtgaaatgaaaaaaggcagagcacagggagggagatgttggggccatgaggctctgccttccttccccaagcccctggctgatgagggagagaggggagaagaggagagagtggggcccaagggtgctgggcagtcggagatgactccttcctactgtcctgcttggcatggagatttgtggactttgggttcggagactggaaaccaataaattggtaatctggaataagcttggtttttctatccatttacacctctattctggggacacagagtttggcctaggagcgtgtacagagtcctgactaggtcataaatgctgtgtgactgcagacaagtcactgaacatctctgggctcagaagcacatgtaacagatagatatgatgcagcatagggtgtcattataggccaggagaattgtcattattagctgttcacccaaagtctgaggggttgcttgcaaatcagttagggctgatctagaaagaaaacgtttgggaggccgaggtgggcggatcacgaggtcaggagatcgagaccatcctggctaacacggtgaaaccccgtctctactaaaaatacaaaaaaattagccgggcgtggtggcaggctcctgtagtcccagctacttgggaggctgaggcaggagaatggcatgaacccgggaggctgagcttgcagtgagccgagatcgcgccactgcactccagcctgggtgacagagcgagattccgtctcaaaaaaagaaaaaagaaaagaaaaagaaagaaaacgtgatgccagtggggactggacccacctaggtggtttctcggcatccctaccctgagaggctgccacaggtctcactggtacttgttcagagcagcagagctttagcgagccacctagtatgtgtgacctgggtgccaggggctgccacagcagatatagccagcccccgccctcgggagctcagaggccaaggggaagagtcttggcataaggttagcagatggtgtgactggaaaggtaggcagggccttgagtggtgagcaaagaggggagaacagcccctggcagaccactgggaatcaaaggaaggattttgaaaataacaggaatgataacagtgatctccatgtcttgagcacttacacagcaccaggggttcttctaagtcctttacatgcatcctgccttaaatcatcattctcccaggtggtgttatcagctccactttctagatgagaaaactgaggctcagactggttaagtgacttgctgagcatcacccagctactgagtggcagagtccaggatgtttaaccctcactatacttaccagagctgtgatttaggaaaagaactcttaacaaccctcaagctagactggtatggtgcagggagaagaaagtgggaagagggagcagggaggccagtccgcttcctggggaattttgaaggaggccggcaggtgcaggatgggggaaggcagagggcaggtggagaggagctgggaagtttggaagggctgacacaggagagaggatgccgccatctgagggccagtgctgggctcctgccacgatctctccctggcctgcggtgaaatgaggactgtaagggcattgcagcgagtttcccataacatccatttcacttcagtaacccattttgatgcctcttttttattctgagatgatggtctttggattctttggggttagaacattccttttatgcaatacataaatgtctagtatgcaccatactaaatggtgttcttttttttaaacatctatatttggcaagaaaagaagtcagtggttctgtgtggcccaccctcatattatgctacttcatagttttcatttatagacattgaactagttcctggaattctcacaggatggtaggctgacacccacgaaggagaagtccaggggtcgtccttacagcgagaggagtgggagctggtggtgggataaggtggtgggataaggcccttggaaaggcgtgaagaagcgggaggatgagggtcattgagggctggggtgggggatgcccggcaggctgtggacatggctgatgggcctgccttggatgctgatgctgcaggggttttggcacaagactgggcaaggggcttttcagggagcagcttcaggagaaggcgagaaaggtgctggagcctgcaggggatcgattatttgggggagaggaggtgtggggtgcagaataggacaggattggagaagtttggtgaaaatgggggtgcaagagaagcttggatttcccattaactgtcaatacagtcatggttccacctggtatctagaaacctgttcacaattgtaggtttagcagcacacagggtggggtaagtgtctctccccatcaggagcagcctctgaactctcctgggaccctgagcttcagggaacccaggctgtggcccccctcccccactttggcaatgctgtctgcagagggaagggccggttttactagcacagggagtgctccggctcctgtgtgtcggggaaattctggaagaggctctcttccagaagttatggaaggtccccgggagacagaccaccagtttgggccaaacccctccatctacatgaaacaacaacaacaacaataataatgtttacggccaggcaccatggtttatgcctgtaatcccaacactttgggaggccaaggcgggaggatcacttgaggccagaagcttgagaccagcctgggcaaatagtgagaccccatctctacagaaaattttaaaattttttgttgtggtggcacaggcctgtggtgttaactgtttaaaaggttgagggtggaggattgcctgggccaaggacttccaggttgtgatgacctatgatcgcaccactgcactccgccctgggcaacagagtaagaccctgtctcgaaaaaaaaaaacaaaaaaacccaactcctaagattacaaaaagcagtaaatatctattacagaacagaagaaaataaaaatcacctttaatccagcacccaccaataagctctgggatcactggggggttatttccagcccttccccttcttttctttaagtttttgaaaattctaaaatattctaaagtagaacagaaaagcatagaaaataatattgcagacacccacctctcaggttgaacaaaccttaacattgccatacctgcctctcttctcttttctttctatctttcttagaaatagaaatgattcaggtccagaaggagtcaggacagtgtggtctactggccaaacccagcccctcatctgtttctgtatgacttgtgagccaagaatagtttttacatttttaaagggttggaacaaaaagtcagaagaaggagaacatagggagttatatgaaattcaaatttcaatgcccataaataaagttttattggaacacagccatgttcattcatttgtgtattgtctatagctgctttcacgctacaatggcagagttgaatagctgagacagagaccatatggacttgtaagcctgaaatatttgctatctggccttttatggaaagtttgctgacgcccaagatacagctaaagccacctactctctctccaggcataactggccacctaaaggtggtgggtatcctgcctacatgtgctttctgcttttacatagaagcctatgcttccaagtgtgtcgaattgcattgtgtgtttaaaaatggatatggtgaaattgcacatggcagagaggagcaaacacatatggacaccctgagacctccttagtttcctgaactccagcagcacagagtaaatgccagctctctgccagccctggaatgggccctgcagatgcagagaaaagaatcgtgggaagaaaactccagaagaaaaaatggggaaagtgacactgccgactcaaattactagaaatcctcagaaagtaaaaaaggaaaaagaaactcagggttgagagaagactttgggccggtgaattcatccttggagtgttcaggaaatccagagatttttggaaggctgggaattctttggaagtgaggcgtgtctggagataaggaataggaagcatgggctgtcaaaagcaattgttagggagctcaagtagagaagcaaaaggaaaacctggggacaaggtcgacagatgctgaaaaccttgtaggatttatactaggctacaccagactattaacgcggccaaccagagaccaacaagggagcaaacccttgcactgtccttgcggaagggccctacccagcatcctgggatgtaactgggaaggatgtgtctcattagcacctctgccccacctctggaataccagctccaagccaaacacgtcccctctgagcagctgctgtgccctgcccccgagtgctctatgttgaggatcctccgggcaggaatggtgggctggatgctgagccctctacagttgtccccatgtccctctcccaccagactccactccccagcagcagtgggcaacctcctctgattctgaaccacctcctgagcttacagaccattggaactcgatcccagttccctttaggagacagcaggctatcatagttccatggcctcaggacactgtacctgtaccacctccaaactcaacatcataaaaccaaaacgtgaaatcaacatccctcatctctttctgccaggtagctgggactgagctgggccctggggacatagagagaggccaagggccaggcgcgaactcagcttcctgagtcacttgggagcactgtcttctcactcatctctgcacagtgccattcctttcccacattggggcaacccttagattcagagatatccgggcttgaatcctgttttcaacgtttcctagctgtgtggtcatggtttgaacttcagtttcctccgattaaaggtggagctgatgtttcttaattcaggagtcgattttaggataaaaatacaaatacgtggcacagtcattatctctcttagatctgtttctccacatttcctggtgatccatttttattacatagagacaactagttgttttttagaactatttgttgaaaaacatatcttttccagcatcaatttacctcggcactgtttttgaaaatcaattgcccatgtatgtatgggtctatttctagactctattctgttccattgatctgtatgtctatccttatgctaatactacactgttttgtaaattagctatgtttcaagatcaaagtacttcttgagaccaggtaatgtaagtcccccaacctgtttcttctttctcaactttgtttggctgtctaggtcctttggtttgccatctaaatttaaaattcatcttgtcagtgtcctcaaaatttttattttggattttgattgggattacgttgactctatggatcagtttggggagaaatgtcaactaagcaatactgagttttccaagccttgaatgtagtatatctctttatttagatccttaatgtctctcagcagagtttctgagttattagtctcttatgtgttaaatttattaagtatattttggtgctcttggctaatcactgaagtggctgagattttactttacttgcagctaacaagttaaacaagtagtttcatgagtgctggcggaagacacgagacccctgggtcagagacaaaggactctatgatccatggcgtagcagatggaataagcttcaggtttatatcagttccccttcccgctaacttcctagtgctattgtagaacataaaatcatctatgctagaacataaaatcatgatctattctagaacataaaatgatcttctttgtagctttcccaaattataacctcatgtcccctacaggatcttatatacagtctgagtcaactgttctagaggctaaaaattacacaaaggactgaaattcagttttgctttagtatcaaatcattaaattagaactttggagataagttaaaatttgacttccaagttgtcaaatacagaaaggtaaagaaagtttcaaaatgatatggaaaagccagtatgtacacacttaaaaccttatgcctgtttatatttgttagaaaaaataagcctgttatttcatatagccatgttgttctaatttaataatatagatttcaaataaacatgggttggacatggtggctcatgcttgtaatcccagcactttggaaggccaaggctggaaggaggattgctggaggccaggagtcggagaccaccctggccaacatagtgagaccccgtctctaatgaaaataaataaagaaaagaacaaaagtgcagaacattactaaggtggaaatttggggggaaaatagtttacagttaatgaatgaaatgaaaaataagatgaattaaataatacatgtggatatttaggttttgataatcatggttccctctggagtgctataattagaatttatataccctaaagaagtattactgatgtacttagtacctatactaaaggtaaaatacacagagtgtggagtgactgtatgaaaggataacatgtgtacagatgtgaaaacatctccaagctatattatgaaagaagcaaccaaggtatcctatatttttgtggttttcaagctctatcgcatatgtcttttgataaaaggtgcattatggagaaagagcaaagcttaccttatatgggaataagtgtggtatttctaaaaggaagctcttctcttttattaagccatttgtagatttgaaagaggagagatgggagcccttgaaattccatagtcctgaatcagacgatgatctgaacctgtatctctctatctttactttaatgtaactagaatatgttgagcctggatccatggatgtattagtgcctgtggctgctgtaacaaattaccacaaacttgtaactcaaagcaacagaaagttattgtcttacagttctgggggacagaagtctgaaatcattttcgctgggctaaaatcaaggtgtcagcagggctgtattccttcttgaggctctggagaagaatccatttccttgcttttgccagcttctggaagttgcctggttccttgtctcatagccccatgtcactcccacctctgcttccatcatcgcattgctttctctgacctgcctatctccttcttgtaaagacccttgtgattattttaggcccacccaggtaatccaagataatctcctcatctcgacatccttaaattaatcacatctgcaaagtcccttttgccatagaaggtgacatatcacaggttctagggattaggacgcatggttccttggggaacattattgtgcgtagcacaggtgggtaaggtttagtaacctccaagcaacacctctcctccctgtcccagagaggcgtgcctaaaggctgagctagaaaaagtgtgcagtggtatgttctcaatcataagtgagagttgaacaatgagaacatgtggacacagggaggggaagatcacagggaggggaagatcacacgccggggcctgtcggcgggttggggggccaggggagggagagcatgaggacaaatacctaatgcatgtggggcttaaaacctagacgacaggttgatgggtgcagcaaaccaccatgtcacatgtatacctatgtaacaaacctgcacgttctgcacatgtatcccagaactaaaagtaaaattaaaaagaaaaagtgtgcagtgggagccaggagagctgccaatttatcaatgcattattttagcaaactctttatttggcttcatcccctatccccagccccaacacacacacacacacacacacacacacacacacacacacacacacacaacactcttaaatagacgtacacagaggcataagctggacagctcttcgtctggaaagttctaacaatctgaagattccatgacttgttgcatggtgtgttttgtttgttttcgagacagagtcttgctctgtcacccaggctggagtgcagtggtgccatcttggctcactgcaacctctgcctcccgggttcaagcaattttcctgcctcagcctcctgagtagctgggattacaggtgtgcaccaccacgcctgactaactttttgtctttttagtagagaccaggttttgccatgttggccaggctggtctcgaacccctgacctcaaatgatccacccaccttggcctcccaaagtgctggggaaaagcactttggggtaaattacaggcgtgagccaccacgcctggcctgcatggtgttttttacctttggcttcctgctcagttcacctggcccctccctcggggagcactagccagttcactttccacgtgggagctatgtttccccacccacaggtatgttcctgattcctgatctttggacttctctgatccactttttctttctttctttttcttttttttagacagagtttcactcttgttgcccaggctggagagcagtggcgggatctcagctcactgcaacctctgcctgccaggttcaaatgattctcctgcctcagcctcctgagtagttgggattacagttgtgcgtcaccacacccagctaatttttcatctttttttttttaatacagatggagttttgccatgttggccaggctggtcttgaactcctgacctcaagtgatctgcccacctcggcctcccaaagtgttgggattacaggcgtgagccaccacgcccagccagatccactttttctaactggccatttgtattagtctgttttcacgctgctgataaagacatacccaagactgggaagaaaaagaggtgtaattggatttacggttccatgtggctggggaggactcagaatcatggcgggaggtgaaaggcacttcttacatggtggtggaaagagaaaatgagagagatgcaaaaccagaaacccctgataaacccatcagacctcatgagacttattcactaccaccagaacgctatggggaaaccgcccccatgatctaaattatctcccaccgggttcctcccacaacatgtgcgaattatgggagtacaattcaagatgacatttgagtgggaacacagagccaaaccatatcaccatttgagctgttgttgatttttttttttttttgagatggagtcttgctttgtcgctaggctgtagtgcagtggcacgatctccactcactgcaacctctgcctcccgggttcaagtggcacgatctccactcactgcaacctctgcctcccgggttcaagtgattctcctgcctcagcctcccaagtggctaggatgacacgcatgcattaccacacctggctaaatttttaacttttcttagagatggtggtctcgctgtgttacccaggctggtcttgaactcctggcctcaagcagccttcctgcctcggcctcccaaagtgctgggattacaggtgtgagccactgcacccaggctgttgtggattttaatttgttttgttttgttttctgattttgtattttctcttccttctattcttttctcttcagatgtattcatcgagtacaatttgtgctgagtcatatcacctatttatattttaattttactattagttttgggaagtcttaattatttttcattcaggaaattgtacagtcatctgtttccattcatagcccgtccccttctccaaagagaacgtctgataacaagtttttggctactgtgtaatatgatatttttctatgtaagtgcatgcacatgtaaacaaagtaaaacatcatattaatcacatagacagcaagtgtatttcagcttaaagggtccatagtaagccttactttttttttttttttttttttttttggagacagagccttgctttgtcacccaggctggagttcagtggtgggatcttggctcactgcaacctccacctcccaggttcaagcaattctcgtgcgtcagcctcccaagtagctaggtttacaggcatccaccaccatgcccagctaatttttgtatttttagtagagacagggttttgccatgctggccaggctgagtgttggccaggctgatctcgaactcctggcctcaagcaatccgcccaccttggcctcccaaagtgctgggattacaggcgtgagctaccgcgcccagccagccttactttttattttgaaataattatagattgacaagcaattgcaaaaccagtacagagaagtcccaagaacccagttttctctgatggttgcatcttacataactataggacggatcctccagctgcagttgccctctagccaaagacccaccaagagtacacctctagttgaataagttgcatttattactcattgcagtgagggagagcacgcaccatggggcatctcagaaagtgtgtgttaggaagaacctagtataggatttgggttttggttgggtgacttgggggaggtcgaagggagtgggattcacactagatgaattgcatctgctgtcagaaggcagaggcaagtctataactgtgtagcttgagtcctatctctagggagaggaggctggcattgggggctaaagctgtgactggtaaagtagcagcagtcactgctttcagccaagagagggtgatgattggtattttgtgggtggcacagtgaccttgtctttatgggttacttcaacaaaaattaggtagtgaccttgttttgtctcacttcatcatggcctcagagtaaccttgtctgaggttgtgtcttttgcgattatgtctaaaaggagaataacgtggtatagccgtgaatgccaagccagcttcccgatgtcaggggcttttattccagatctttcgtgtacattggtaccatgcctgcgtatagttctctgccatttcatcatgtatgtagatttgagtaaccaccactgcaatcagcatccaggactattccatcaccacgaagatgtcgcttgtgctccccctttaacatcacatccacctgcctgccccaccaccatccctaacccctggcaaccactaatccgttttccatctctattgctttatccctttgagaatgccacgtacatggaatcatacactatgtgaccttttgatactggctttcctcgctcagcataatgcccaggagatccatccaagttgtcgtgtgtatcaatagtgtgtttcttttttagggctaagtagtattccatactgtgtgtatttgttttctatgactgctgtaacaagttaaaacttagcggcttaaacaacacaggtttttaatcttacaaccctgcaagccctctggcatgggtcttgccagaccaaaatcaaggtgtcagcaggctgcgttcttttctaaaggctctagggaaaaacccatttcattgctaattccttgctaggggaattcaattccaagtggttgtaagactaaggtttctgttttcttgctggctatcagctgagggctgttcccagtttctagatcaaggccatccacattccttggctcgtgaccacctctgtctgtgtcaaagctggcaacagcagatggagttcctctcaggcttagaatttctcctgcctctttcctcatcacatttctctgactcaccttcttgcttccctcttccacatttaagaatgcatatcatttggccgggcacagtgggtcacggctgtgatccaagcactttgggaggccgaggctggcggatcacttgaagtcaggagttcaggaccagcctagccaaaatggtgaagccccatctctactaaaaatacaaaaattaggccgggcgtggtggctgaggcctgtaatccaagcactttgggaggccgaggcaggaggatcgcgaggtcaagagatcgagaccatcctggccaacatggtgaaaccccgtctctactaaaaatacaaaaattagctgagcatggtggcacacacctgtagtcccagctactcgggatgctgaggcaggagaaccgcttgaacctgggaggtggtgattgcagtgagccgagatcgtgccactgcactgcagcctggcaacagagtgagactccgtctaaaaaaaacaaaaaacaaaacaaaacaaagaacaaaaattagccgggcatggtggtgcatgcctgtaatcccagctactcagaaggctgaggcaagagaattgcttgaacccaggaggcgaaggttgcagtgagctgagattgcaccactgcattccagcctgggcgactgacctagactccatctcaaaacaacaacaacaacaaattcttatcattagattattctcacctcgataattcaggatgatttcccatctcaaaatccttaacctcaaccacatctgccaagttccttttgccatgtaaggcaacatattcacaggttctgggaattaagagtgtggacttctttgggggaccatcattctgccttactcattctggatgtaacacagtttgtttaaccattcatctatagaaggatgtttggttgtttccagttttggggctattaaaaataaaggtgctgtgaacattcttgtaaaaaaaaatggtatataagtggattacacaccatttccttttgcaactgatttttttcactcgacatcatatttctgagttgtattcatgttgatctctatagctctaggtcctttgtagtgccattgtgttccatgtgaatagtgtcctcccttccttgctgtgtaatgttctattgaatgactgttcccctattggtggacatttaggttgcttctaactttttgctgctacaaagagtgctgcggtcagtatctttgtgcagatctccacgtgtgcaggatgaagcagttttcttgactggatgagtaggagggaaggttctggccctagcacatatgtgttgtcggttcctactggctattgtgtaattgttcttcaagcccttttcactccatcagcagtgatgaaagtgttctgtgcatctctgccaacatttggagtcgcagttctttttaatttctagactggtttctttttcatttcttttacttagtttcttttaaattctggactggtctaggacctttccaaaaggtatgaaatggcatctgagacttttaatttgcattttcccgatcactgccgaggacacagggacaccccagtccagcacctccttgttctacactcttgctgacttcttttctcctgacgttagcgttaagaggttgctgcctctacctgcctttaagtattaagatctgggcgatgcaacccgacaactgaaatttggtgtcttgtctgaaattacaggatgttcctcaggccgccgtgtttccatgggaacaagtaacagtcatccttcatgattaggtggtaaccatggcaaccaagccagcagcatttgaatgaaactgattttattttatttattttttgcaaacacatgaaggttaaaatgcatttctccagctgtggcttccaagaataggaagacagcctggtaaatggagaccctttccacctcctagaggaaaggggatccaggatcagctggtcccatggcctaattttgcagactaggtgaccgagaggtcacatagaagtcatgcaatgagtttgagccgaggaggaaagactgctggatcatgctcgaaggtctggggcgcactcttaagagatcggctgggtctcccttcccgtgatctaaccctaggaatgccactttcatactgtgtgatcttagcagattcacttcacctctctgggtttctactggcaccagctgtggtgctagacctatgggaccatgaggccaggcctcccagtgtctgtttgcccaaattagaaaagatttgctgcaaaatgaaaggccaaaggcagcatgctggggcctaggaccccgaggctgaatccccagggtccagagttagaactcagggtcagttccctgccttcttttcctgtgtaaaataatagagggtgtgtgtgtgtttttacttggttccaaggactggagatgaccactgctcttactccctgactcattggattgatgaaatcagctcagagagagaaaggggcagccatggagtcacacagcagagtcagggttgaatccaggctcctggtgtcagcttggctcctcacccaaccccatgctccatgtcccctccatcttctctggggctggaagtgtgggtttgggggcagtttaagggactttcggcatatactcttgcttcttccctggaggacttttagaggtagtcacttttgcttctcagaacttcagtttctccatctggaaaatggaactcactatagagctgcccaggttgtcctgtgggattacatttgaaagggtccagaacatgcattctcagcaggggcgagattgcccctaagtgggcaaaaagttggttcttgggctagaagatgaaaaaaaacctttctgtacaaagcccagtatacacacagtacataaaagatactgtatgtctgtgatattaaaattttatggaggggaaattaggaaaaaagtgtctaagaagacttttaagggagagcgacaatgaaaaaacattgagaaacgtgggtccagaacccagcgatccatgtcttcattaactttgtgtttagagcttacggcaggtggctggctccgtggggaaggtgtgtggggtgtcaggtcaggagagagcctggcctggcccagactctgccctcgatgttcagtgtgaccacgggcacatcacagctcctctcagggcctggtttccccatctgtgggtaaaggaggtcccatcagctccatgggtgactcccaggcagttgagctcccacctggtggatcagttcagggtctggagaaaagcaggtggtgcctcagactatggtgattagaggagcgtttaatagaggggctgcttatgaaggcgtgggcaggcctcgggaaccacggggcagtgcaggaccccaaagctagggacagcgggggctgcttccctgaggccccatggaggaggggagagcgtggttgctgggaggcaaaggtccagaagatagggtcatcccgatggtggctgggaccttccgtggaggaggcaggcagcccagatgactctccctcctcccctcatctcttgccagggttcctctttggccaaaccacatggaagttgagggtctagaagctcagatcataaagtctatacaggccagtgccctggagcagaaggcagtgcacagagacgtggagaatggaactaggggccacacaggagatacctgggaaggtgccccaggtttccctccagtttcgtatggagtgcaggccttgccctgggtgtgggctgggagactggagaggtcagggaggagagccagccgccctgtgcaggagggagagtgggcccctatcctccggccacctgggatccttgcggccttcctagcttctcaggtggaggggtgtagccagggcttctgaatggaagttaaagacttctgggagcactctttgctatagacctgttgttgagggatcacacacacatttctttgcttctggtctcagcttcatcatctgtcgaatgggagattggaccaagcaacctctgagagcttcctggcccagacccaggaggcaagaggcaggattctgggcatcagtgttggtctcagtggaaagacatcctcaccgggcacccagtgttctaccagggcactccatgcacctcttgcctggagtggtgagggcccacctacccaggaaagtgtaaagctgtggccagggtggtgtgtgtgtgtgtgtgtggtgtgtgtgtgtgtatgtgtcaggagagggagggtagttcctggaagctccagctgcttttgtcctggtgatcccaagacccctgtggggcagcctgactctgccaaccaggttccataactgcagtgggtaccccgtgtttgttggtttgatggaggcatcttgactaagcactgcagggtgcctggctctgggtgggggtgggaaacagacaacccatcttcctgctgagtcgccaagtagcaagtctgcagggctgactgatgtgcggggttgtgagtcatccttcctaaagtgatctgggcgcccccagcattgccccagagctcaaaggatgacagttcccgcaggaggccattccagggaagagaattctagggagggggagagcataggtaaaggtgtggaggtgggacattcctgcatcgtggcaggtacagcaaagagggttagcaagaacagaagccagagagtgtgtgaggtagaatggctttcggtgccaaggtgaggagtcccttctttctgagggcattgagggcattagaagcagtcgggcttagggtcctgactgtgcctggcactgcccatctcccacttctaccgctttccctagaaaggtggctgaacccgggggtctgcctctggctaaggtttgcatcctgagactaagccctgagtacctcctatgcgttggccccttggctgggtgttgggacccatgggacttaaggctgaaggagccatggactcggtccagacacactggaccctcattcctgttgtggtgctcagtagccctgtgaccttgggctggtgactgcaccctgagcctcagcttctgctctggtcattggtagcttggctgagtatagcagatgggacacaggttatgggtgacagcctcccagagggaggtggcatgtgctgtcacagaggacaggagggtgctccaggtgggtggtgcgaaggggtgagagatgaaggcagacaggaaagcatgggaagaattttcctagcaaaacctccagaaagagtggttatcccctgactgtgactagagagattgtggaggaggaggtccaaggaaagttctaagcaggaagcaccgtgcgggaacagcaagggccttaagagacggcgccaggctgaggatgagccatgtgggaagggagcttttctggaagaggcgcctggggctggatggtctggacctggtgtcaatgcctgccccaggcctgcctggaggtcagcgggcctgaaccagtctcaggacagctttgcctgcttggccatgagccaaggctcaggatgaagcctgtgcttctgtggactcctgtccatgtgactgtgtggagggaatggcctggaaagcacacagtgccccagcatcctgttctgccttctggaaagcctgctccttgtgtgaaccccatgtcatctgtcctgtgtgtgtgtgcgcacgtcccctgctcagtaggtacctggggtgggtctgggagtgtacacattggagtatctgcatgaatataaacatgcacatgtgtttgtctgggcattaccgtctcactccacacccctgtgtgttcacacctaccagggaaacctctgccctgtccttcttctcccttgcgagtcaacaggtctttcccaggcaccccccacgcaccaggctccatgcagggtgctggggaggtggagatgcaaccagcttaggcgtaggtgttaggagttctgcagacgcacacacacacacacactcacacacacacgcacacacactgcaaatgagagcgttgataggagactcaggtctagttattgctgtaggagccaaaagcgaggcaagagctggaagtagagggggtcacccaggacctcctccagggcctgcaggatggaccaggctggggaaggggagcaggaagggagtcctctgttgggggccacctctggagcaatggcaaagaggcagctggtgccacgctgttgtgggggaaccagtgaggaaagtggccaggttggcaggttggacagactcaggaggttttatgtaggtgtgctaaggccatgactaaaagttttcaatgagctgtcaccatttaagagtcagaatacttcatattttgaaaaacccagattatcagcctctcttgaaccatggcagctatggctgccctgagcccctccttgtgatgtagcagtaaccaattagcgccgagtggctggctgctttcctagattctggatttcctgctggcctctgtaggcctcccaagtttaaagcctctggaaaataactggaagccagaagtcacagattctcatgtttgaaaaaacgtgggggctgacatagtggctgagccctgtaatcccagcactttgggaggccaaggtgggaggatcgcttgaggccaggagtttgagaccagcttgggcaacaaaggaaacccccatctctacaattttttttaaaaaaattagataggtgtgttggggtgtgcctgtggtcccagctacttgggaggctgaggcaggaggattgctcgagcctaggagttctaggctggttgagtatgattgcatcactgcactccagcctgagcgaaagagtgagaccctgactctaaaacaaacagaaaacttgagaagtcatccaagctccccaagtgtggcatcccaggagatggctcagttatctgtctgcttatatgcctccagtgacagggagcccactacattacaaggagtgggggttttggggaacctttccccccgcttttttttgagacagagtctcactctgctgcccaggctggagtgcagtggcacgatcttgggtcactgcaactttcgcctcccgggttcaagtgattctcccacctcagcctcccgagtagctaggactacaggcacacaacaccacacctggctaatttttgtattgtcagtagagacagggtttcaccatgttgaccaggctggtttcgaactcctgacctcaggtgatcctcccgcctcggccttccaaagtgctgggatcacaggtgtgagccactgtgccaggcctttttcccccctttttaaaaaattgcgataaaatatgtaaaacataaaagttatcattttaactagttttaagtgtacaattcagtggcatgaagtccatttgtaatgttctgcaaccatcaccactatccattcctaaaactcttcatcaccctttacagaaactctgtaccattaagcaataactccttgttcccctctctcatcagcctctgctaacttcaaatctgctttctgtctctacgaattggcctcttctagatagttcatataaatgggatcatacaaaatatgtccttttgggttactcagcgtaatgttttcaaggtccatccacattacagcttaaatcagaacttcattcctttttagagcagaatggtattcctttgcatgtcagtaccatgtgtgtgtgtccattcttctgctgatggacccttgggtttccaccatttggctgttgtgaacatttgcatacaggtatttgagtacttgttttcaattattttgggttatacccaggagtggaattgctgggtcatgtggtacttgtatttttaatttttggaggaactgccagacttttccatagtgcctggaccattttctagggaccggtttgtctgttgtcctgactgggatgggagtggcaggaggccctagctgtgtggccttggctgttcttgttcaacctctctctcctcctctgttggcagagtcgcctcaagaaaggccgggctctcggcgcagcctgcctggcagcctttccgagaagagccccagcatggagccctcggccgccacgccgttccgggtcacggtaactatctctgcgtcaccaacaccgccactgccaccaccatcaccacctcgcccggggtgctgctctgtgaccccacggccccccttcctggagcctcatggacccggagagcatccggcctcccttgctctaggtatccgatccctcagctgctcccatctccgtggctcagccctggtcccgggggccacatggggggtcccatcctgagagggagggggcaggtggaggacagacagcaccgaaggctatggggcccagcgctgagctggcccggaaagagaagaggctcttgttagtttagataaatgtacccttgagggcgcacacacactgtgcttctgcaaccccgaaaagatgcactatttttgtttccatatattttaacacctctcatggcataccataatttaaatctttcttggtggtacataaaataatgctatatattataactgatgatggcttagaaccgacaaaacacagaatatatatcatagctattgaactgagtggtccccacaagcacacagactttttaaaaattacaaacctaaacaactttatggaaacagaacccaatgacccttaacgtctgactgttcatacccttctgcatttgtgcatgtacacacacacacacacacacacacacacacacacacacaccagagttctgggtcccttcactccctcgttcaggagcattactgtgtgtacctctctccagggctgtgccaggcaccagaaacgcagcgatgacatagacacattcctttctccacggagctcaggtctgtaggtcaggtggatgttggatggtttgttcatccattcattcactcatcagttattctggcatgcctgctgtgtgcaagcagaggaaagaaggttctgggtggcaggaacagagagtgtgcaggcctggctgtcactggatagcatcatataggggctccaggggagctggaagtgattggctattcacagtgggttgggagggggtcccacgggagctggcttttgagctgcatcttgaagggtccgtagaaaatggctaggcaaggacagagagagagagagagggacttccggggagggagaacagcagttgcaaaggtatggaggcaccctagaaatttcctctgcttgccatagggctggctcctcatcccttgggcatcagctcagatatcagctcctgaccacaccacctcaaggaagccctcttgcttttccgccatcacagcagcctgctcttctgtttcctaatacttagtgtcagcatgagaatgtgagctcataaggtcaggggctgatgtgtttgtggcatgcagaactgcttggtggagctggagttgaggggatctggaggacagtgtaggaggtgaggctgggaggcctggccgagtcaaggtcacgtggaacctccagtaccaggccaaagggatggggctttccccagggccactgattctctccactgccagtatgttataaaaatgccttaaaaactagcttattgtccttctttaagatttcagtccactgggccagggcagggcctgggaacctgcattttaacaagctttccccaggaggtgattctgagtccccagctgggggttgagcccatgggcaatgaggaggaagcctgcgctgagacgattcagggtcatggccctgagtttggccagggggtctcaggaagctggtctccagcctgcagggagcgcttggaggctgggacaagggtgacccccatcagctggagcgaagaccaagttctgatctctctggatccctggggccacagcaggcagggtgggccttcagggggaccctagggaacgatgactaataataattagtaatagtagccacctccattgatgaagtgcctactgtgtgccaggcactgggctcactgtcctacatccctgatctcttttttttttctttttttttttttttttgagacagaatcttgctttgtcgcccaggctggagtgcagtggtgtgatcttggctcactgcaacctctgcctcccgggttcaaatagttctcccacctcagccccccgagtagctgggattacaggagcctgccaccacccccagctattttttgtatttttagtagagacggggtttcaccatgttggccaggctagtcttgaactcctgacctcaggtgatcctaccacctcggcctctcaaagtgctgggattacaggcatgagccaccacgcccagcctacctgatctctcttcatccaggagacacacctacagctgaaacattggttaccccatttcccaggtgaggaaacaggttccgagaggtaaagtcacttgctgcccaagctccaactgctactaagtggcggaaccaagattcgaccccaggtctctgtgactccagggcatgaggcacacccatcctcaggctaggaggcggatccattgccccacacccccccagaaccccatcagcatcgcttttccggctatttccctttctgagttgctctaataggggtattatcacaccttaaagtttttataatttgcagctctttaagtgacagctaggatcagtgttttccctgtagtggtgtcttcattctgtctcccagggtagaaaccaccttcagtcagagccagccttgggaacctcgagctgcctgggactcaactcgcagtcccacctgcccggttagggtctgcaggatggagagcgtgttcaaggtggtcgttttgcccacttctcatggcaaccctctaggggaggcaccattagtgtgcccatttcacaggtgaggaaactgaggttcagaggtgaaattctttagctggtgtcactcagctcctgagtcaggactgccggacatctacgttttgtgtcctttcctgggcaccttggtccttaagagatgtgatttgagattctcttctgggctgggtgctgggagctgaggggactggagaactcagaggtggggatctgggttcaaatcccagatcttccatgacccatgtgatttcagtagccactgagcctctccgagccttgtgttcttgacagtaaaatctggaatgacagactttgcttggactgtggacttggtgaatgtggtcgcccaagtctgacccatggtaggtgcttcatggatgaaatccatcattaacatccaaatcgggtttccatttttggctgtaaaacatcagtaaagatctaggagggttggagtacaggcagaggacaaggtgtttgggggaaggtcagtggtgagcctggcctgggccttggggacagtccctcacacagaccctgtgcagggccagaagcaccctcctccctcccctagcccgtagcacacacttgctcacttacaggctcccaaaagctatgtcctcacgtgctcagctgacttttgctctgtgtagaccctcgagggaacccaggaaacatggttttgcctcggggaggcaggggagatgccacaggatgtactggaataactgccaccttcactgccatttcaaacccagatggcaggctgtcagcatctcttacaggggtgctccgcagggagaatcaatgagtcacggtgtaaggtctacaaggctcagcctgtccaccttctccatggaaactgaggcctgggaagggcttgtcagaggtcaccacccagctgacagcagttcaggagcctgggttgtttacaccatcacatgccacccctcctcattttgtgagtcagccgaggacctgcagccactctgtagggcattgaaggctcagtgctagtcctgcccctgcctcttgtagactgtatgaccctgggagagcctcagtttccccttttgtgaaatgtgggggatggactttgtaaggcagcgtacagttcaggcataaataggtgcttaaatgttctggtgcagtagctaagagaatgggctctagagagttccccgacccaggtttcaggccctgcacagcctcataccagctttgtggcttgctcaggagtggaacttttctgcctatctgggacaactccctccctcctatagggagagttggggggtaggggagtggctctccaggaccacacagtgctacgaggctggcatgtgccctgcaagttatagggggccctgaatgaggatgggggaaggggcctgggagtagatgaccagagaggcttcctgtgcatctgtggccatcagctctcaggctcctgagattcaaacccaggtctgtctgctctgtgccagtagtgtctcctggaagggaaggagggaagggtggcaggcagcaagctggggccctggatctgcatagaccaatggtcagactgggtctgggggctttgcatgtgcccacccagcttccccaggccctggaccccttagcagcaacagcatgctgttctttctctcctgccactccatggcagaggagccgtggtttgatttgggaggcaaagagctgatgactcttcctggtctccccacgagctccttagcctgctcccttccccagccccaaacttccctgttgcgggctgggtccttcctccctccctccttcctctgcccccacccccctcccatcaaccttgaggatggctggcaggcctggggtgtgggaggtggcagaggctcagggaaacttgacagccaattgattcctcctcgggaagttgaaagtggagagtcgtgtttgaaggtttagctgaaattaggtctcagggctattttttgcgagatggagaaggagaagtgtcagggaggggaaggcccaggggtctggcagaaactgcagataaactcaacattgggttgattatggatgcttctaggagcaggtctttggtttctttcaacaactcacttttattggtgcttggttgtgcacaccctgcataggatgctgtgacagaacaaggaacagttatctctggccaggaaggacagggaagaattcttaaagaagggactcttggggctgggctttgaggagtgtataggagttcgtcaggaaccaagggagaagagtatttcagttagtgaagtgaatagaaggaaacaagctaatggccctgtgtgattggagtgctggatgggttcagggcctggagagaagagtgagagaccttggtgggtgagctaaagcctttggactttcccctgcaggatacaagaaccacagtggatgatggctgtgagtggagctagcagtagacctctgagctgtggacctcaggttttccagctgctcaccccttttctcactcctgtagcctccctgcaccctccccatgtttcagctgtctttctgtcacacaaactcaagaaacaggcatgtgaacacaaacatgcaagctagtgggtgaccctcccgcccatgtcaccatggaaaggctgttggaaattaactggttcaacccttccctatacagaggagggactgagaatcatagacgggagggtcctttcctgaggtcacacagcatgtctagggtagggcctggagttgagcccaggtctctgtccctctcccccgcatccagtggtcctcaccccttactccttcctgtcctctcctcccagcacctggatatcagccaccccgtctgagctgagcccttctcccagcccccatcacatttcctgggaggaatgggtgttctttggtccaactgccctcggagccccacgacagctccttcccgctcatctgcacactgccccctcctggccaccaggccccagccccagctgtagagggacccgaagtttgggctgcgggctgcctgaaggaggaatgcatgacttcaggtccaggagggggcattctctgctccctgcagagccggccccgctgccccccatttgtgccccttccaagctacggaggctccgggtggctgttggggtggggaacagaaaagccagccaggctcacagatcagacaagccagatctgtcccagggtatatggggaaactgaggcctggagaggagcagcttgcccaggatacttgctggggctccctccactggcccaggctgctgtgggtccatctcagatggtcgttcacttgggacatatttatgtttgtggcccatcaaccagtggagggatgtcagccacgtggtcctggctgtaacagggcggtagtgctggacccctgggtggggtcccaccatgggcgccccagttttctccttgaagtatgaggaatttgcttagttctgctctgtgagtcagtctcctgacccagcatccggcgtgtattcagcggatgggcggggtggtggaagagcaaaccctgccccctccgccccctccaccctcactccctccatccctgcccttcacggaggctgattggtattaaactattcaaacccaaaaggaacattaccgtcattttggtctgtgtctgccttccgcggggggcatcccccttttctgcagagggagtgttggaaggtgggactcaggagttgtccggggtggccagggtggggcaaggatgttcttcggggcaggagtctggggacagggggtcttggagcctcctgaatccaagaccaggctagtctgaggcctgggacagaggtgggactgctgcagtattggtagggttgggaggctgtcgccccaccccattaatacacaggaaggtggtttcatcagctccattttacagttgaggatcccaggcttagggaggagagaggcctggcctcagcaggtctccagctggtgggtggtaggggcaggagcccagctctcgtctgcgagccttgctgcggtgtgaacgaacttactttcttctctccttttgcctttctttattctttctttcgataaatttgccatcatcaccaactatgtgtcagggcctatgccagtcattgaggatacaaagaggatgaaaacgtagttgctacctgcagaaatacagaagggccagccggggcttggtgaagtaatttccaggcaggtgaaggggaaaggacattccaggcaaaggccaggacatgggaaacagcatgagcaaatgacagcaggaactgagcgcagtttgggggctgaaatgtgaggaagtggctggaatggaagcgacaagagatccacggcagtgaacagagcagatgggatctaaggccatattaacaggagtatgaggtcctcagcaagggaggtgaggtgggccagagtaggccagagcagacatggagtgcagcatacttgaccaggctaggagagtctggagctccttcagtgggcagagaccaagactgggtggggatccagcatggggttggggggacaagcaaattgcttttctcaagcaggttctcaggagcctgttccaacccccccaacatctgtgctcagaatgcccttgggcaggggtagggggaagagcccacttcaaggatccctggaatcttctgcctcatcctggcaagtggcagctggcttgggcagtgtgagtgaggaggatggaagtgaagggaacaagccagcctctgtaccccctcctcttcctgccctggggacttccaaatacatcagaaggccatccctgtaaattccatttccccagccctgcacttaagcctgttgggcagcatggaatcagatgaactggttcccgttaaggtgtaaaggccaccaccccagtccctgccaggttcagtaactggcgagtggaatgctctctgtgggggcctttcttcctctcttcacacccactcagggtcttggggtacagtgctggcctctcccagggatagtccccccaacccagggatgaagcaggattagaatcttggccactgctcccttctgtaggatggctcaggcaagttgccccactctctttccctgtctgtaaatgggcaggaacccctccccacagagtggctgtgagggctcagtgcctggcacaaggcagcattccccacacctgttccctttgcttgtgtgaggggtgcacctccaccccacatttcctccagagccccaggtaactgggcagacccctcccacttccatacccttccgtcacggccccaaagcaacatcacccctgactgaacttctagggctcagccctggcagtagaaggtggagaggggctggaggggttcctaggggaccagagaccaagttcttaggtggtgagttcagatggagatggaggtgtctgcgcagggtggtttcctgccagttgggggcagcagagggtagcaagtggacttctgggtggctcctcccagtgagtgttgaagtcccaggggtttgtgtgtcaggggccacagggagctggcccaacaaggtgttagctggctaaacaaggtgtagaacatactgctgggggctgggagcagctcagatccgggagcacctgtcaatggctgggcctggcatgactggctgtgccagctgggcctaggttgaccagaaagccaggggttctgaaaggggaccctggtcagggacactggatggaacaaggtctggggctgggacagctgtccaccaagagaaagggcacagggtgaggtggaccagcatgtgatctgtcaggcagggctgctgcactgtggtcaccaggctggggccaacagacactcagtcactgccaccctttgatgggttataggcacctgttccacctaccactgctttgagagggggtaaggcgggcattgtgggagaggcagggtggtggtcagagcttgcactccaagtcccactggcctgggttcgaatcccagctctaccacctctgctgtctgtacgatgggggattttgaatcctgttctgcatagtactctgagtcaggccctgtgctgagcactttctaagtattgtctcatttaatccttacaactcgaggctcagataacacaaatctcactcatagaaggtgacaaaatcaaggcagatggggagtgaagagatagctgagggtggctcctctcatgggcctggatcttgaagttctcacagcgcctggaccatagcatgcagcccagtctttgctagtcagtgctgtttttctcttcatcttacggacgaggatgttgaggcccagagaggggaggtgcattgtcctgggccacacggcttgcagggacagagctgagatttggacccaggcctccccatctctctgccttatcttgtcctgcccctactttgagcaggcctggccctaggggtcagacacccctgggataggagagaactgctctcctcttgtcatcctgccctgtggccctgcaggtcctcccctttcctgggaggtgggggagcctgcatgtcaggggcaaggctcagacgccttcattttcccacctcctcatgctacaaaaatgaaacgatcaagtggtattttggtgggattacagacataattatatctgagttgtcaagcggcaattgttgtttccaaagccaggaggccctctgtggaggtggcagcagtgacatctgtttctaacacaaggctctgcatcgggatgagtaacttctcctgtggaattgcttaaagaacgtctaaaacgagctgagcttgttactcccctgctccagcaccttagatggctcccagcagggtgggggatccagctccccggcctggcattcaagccccccaggctgtcccagcttccacgcctttgtgtgggcggatccttctacccacaattcctccccatctctctctgtctccagagctcactagtgccatccagggctctgtccaggttgcagaacaccccatctgtacacgctccctcacggactctgtgacttcatgatccatcacttctgtctctcccaccagacggtggtcaccttctcaaggacagggactgtttctgatttgtctgaactcccagcactggggcaaggactcacctgtggcaggctcatgaggggcttgcggaatgaaggtgcacgagacagagagagacagggagtaaacgaattaaatggagtaagcgcagggtgagcagggaagagggtgagccgtgacctctccacttctgccagcccccacacttctgccagcccccacactgggtgtctgaggccagagtggtcccctgccttgggaggacaggtcaagacaagtgacccagcccaccagaggccagcaaggacaccagcccttgccttgaaaagtgccggacgtggtggctcatgcctgtaatcccagcattttgggaggttgaggtgggtggatcacctgaggtcaggagttctagaccagcatggtcaacatggtgaaaccctgtctctattaaaaacacaaaaaattagccgggcgtggtagcgcatgcctgtaaccccagctactatggaggctgaggcaggagaatagcttgaacctgggaggtggaggttgcagcgagctgagatcgcgccactacactctagcctgggtggcagagtgaaattccatctaaaaaaaaaaaaaaaagaaactgaccttgactccaccccatacccatgggccttctgaggccaggactcccaggtgaaccttggcccgcagatggtaaatcacccaggagaaatagcctataaaatcctctcctaaaatggtgcattttgtattctgtagtgaaaagggcttttaaaagcactgcttactcaggtggatttatggagtttcccccacccctccctcccactagtgtttactggtcctcagtcctggagctccctggggtcctgttttttccttggtggctcttggtccagggagagaaacaagatagcatctctttcctgccttgctgccttggggccccccgggccagctgggtgcctggaagtgcaggggaatcctacccaacagaagctccctgtggcccagcgcaaacctgaaagtcccaccattagtgcccatttgtccccgggagactccccccccatgtgttgtcacctgcaaatgggtcaccagggaggcacaacaaagctggaaagaattcagagatcagctagactaatccccgcattgtacagcagggaaactgagtcacagagcagcttaggtgctggctcaacgcctcagtctggtaatggaattacatgagagctttagctctggagcagcctgtctgctgtgttgaacccagctctgccgcttcctgaccgtgcggtgctgtgcaaattagttgccctttctgaacttctgttctcccatctgcacactgggttgtgagaattaaagagaagtcatgggaagctctaatacagtgcctgaagcttagacagggcttactaaacacatctgactaattctcagcagcgtgttggaagagccctcattagtattaatagcagagctgggttttgaccccagacttatagactccaaacgtggttttcttgccactcatgcagtgcacagagcacaggataggggagttttgctggggaatgagcactaaagtcagcaagccccgggaggactggctgggacctcagtgataggacgtgcaggcaggcggagatagtatagaccctgctgcaggggtgtaacctcctggtggaatcggcttccttgcagccacgaggccctgggtatccaactccccaccccttagccagggctggctgagagcttaaagagctgatgaggtgtttgtagccatccagacctctgggacaggcttattatgctaaggcaagtgtcagctggaggatctatgggacaatgagtcactccctggctgctctgggttgtcacatcccaagctgagaccttgggaatgcgtaactggtttctgttcgctgatgcccgcctaatcctgggcactggcaggtaccaggagggctctgctgacgtcctcagctcccctcccagcttcacctttaccctcttcaaatctgggctcccctctttttcctccgttagactctcagtgttccttagggttcccctttacttgggtgtcctctgccctggggaagggattacaagcccaggctcaggtggtggtgtataacttggaggctggagggacctgtgataactccaggggcctcccagggcagccagactccccgctgtcctacctctacacctctgcttatgctgtgagtctgcctggaatgcctttatgtggctatcctgccccagccaatctcagcaagcccacctgctgtcccaccttcaatgtttctaaaatgctgtcaaaagctgcctcctccagcaagtctgcccagattgctcccaagtgaaatccttttaaaaagccccacagagcactttatctttttccttttatatcattaaatatttgtgaattcattcaagaaatattgagagaatacctgccaggcgtccagcactggagacccaggttgccatggcccctgctctggaggctttacagtccagtatggggtgggggaggcactaaacaaacacacttataattacaactgtggtaagtctacagggagacctggcctagtgtggggacatccggggaggcctctaagagaaagactgaggaggtacctgaagggtgtggagagtcttccttcccaggcaggaggaacagcccaggcccttctggctaacggctgggctggtctctggtggtcaaaggaagtgatagcagtgagccgagatcgcgccactgcactccagcctgaggacagtgagagactccatgtcaaaaaaaaaaaaaaaaactatgaccatgaaagtgatcatgaccgcaatgatagcagttcgtatttattgtatgcagggaaatgggctaagtttcttccatgcgtgatctcattgaatcttcacaactacctcgtccccattttacagaagaggacacaggcatagaaggttaagtcatgagcccaaggccccagagccattaagtggtggaatcccctgctcccaccttcttccggaggaaggatgaaaattatttacattttacctggggattcctagagattgaattacccttaggacctaaagaggtgtgtcaaacagtggaatttcagctgtactgatgggcaggagaaatgtttagggcaggaagcttcagctcttgccagggaacagaactccaaaagtcacaggttctgggagctgtaagctgtaaaaacgagctttgagtgtgagagaagcaaacaaattgtccaaagtgaagccctgcgagaaaagcagggggagttatcttggaagccgttaagagctgttttcttgccttggtcctgagatctgggctcctaactctggagcttcctgggccacttgcccttcctgtcctggttgtgaatgtgagcacgtgagggccagcgtgtttagcttgtgtgtctgcacaattctgctggtgcctgatgatagctgagtacatgtgtatatttattggcttatttcagtgtatttgtatgttagcttgtatgtttcatggctgtgtatgtgtgtattcgtgtgtgtgctgatcaatgtgtatgtgtttgtgtgtgtctgtatgtgtggtggcactggggtacttgtatgcttacacatacatttctttgtgggatgcctttcctgtgtgcatttgtatgcatgcctgtccttgaacttgtgtatgtttctggccctgtatatttctctatgagaacatgtttaagtgtgtctttccaggcagtattttaactcaacagtgaccctagagtgtcagggtccagcctcttcctggggcttccctgaaggctctcaaggcctatgaattggttttctttgtttgacttaagtagtctggctaccttctccaggcggaatatgtggcgatctcactggtatgagattgtagaggattctgtgggcatagggtggcctgtgagtaggtggccaccaggaagtcaccaacttaatcccagcttaaggtgcctcccctctttcgcctgtcacagtgtctgacattccattagtgagtcattctccagctgggactctctttgatggtgcatacccttgaggggaggaggccagagaagcccggcagcctgctgagggtagagaccggggaacagggaaggggagggcaggaggaatgacgcatctgaaggatttgggcaaagccagagaattccctgatgccattagtgcctagcttggggcggcccaggcaccctggccctggcagctgctctgactttatagaatcatcaaatatcagcgctggaaaggagcttggtgatcacccagtctagcccctagtgttgtagatgggaagactgtggcccagaaagaggaagtgtgggcagactgggaggttcttgaagcgtggatgctgaagatgcaaagagcactgggcaaggagcaggggacccaggttctaatggctccgcctggtgacgctgggcaggtcccactgccctctgggcctcagatgtctcctcagtgtcactggcctggctgccctctgtgggccctcctgactctcactctgtgactctggaagcaggacccccaccacccccagcccttttctagtgcccccaccagcctgccgcggtgtcaggtcggcctgccagctcatgcacccagcatctctcccctcctggagccgagagaggtggcaggatctggatgggatcttctcctccctttcctgtttatttagatgtgcttttggcattcgggcaaagccccagaaagatattgagagacatgcctgtcaaaacagtctcccttctccaaggctctctctttggggatgggccttagaaactgccatgggaggagccgggccttggcggagggagggcccacagggttctgcctccatcctgagtactgtcttggggttccccagtgggcagctgagagcttaacgggtgacaaagttctgccaggcccacatgcccatctgcagcagcccaggtcagtctgttgaaaggggagagggtgatgaagacaggcctggaggaagaatgcaaggacaaatagatgctgggcttgggggaaggaacccgcccttgattgagcacctactatgtgctaggcatgttgctcagtgcttcgtattcagttgagaagcagtgcctttgagaccattggtgacgtggggctcccgggtgtccaggtggcggtgctgaaatgcagatccctggttccctaggggctgcctcctcggctgggagtgtggcacagacaaggacagcactgggcaaggttcccctccctgggggtgggaagcctccaggtcttcactgggagcccctgtgggacagctctgcactcagggagtgagcgggcctccctttcttccctcccgccttggctttggtccttgaggcctagtacagtgcctggggctgagtgtggggaggatgatcagagctgtccatctgtttccctatatgggggagtccccacgctgcccatcccaggggccagaactctcttggttacagtcccagctctgccactttcagcaggtgacttaacttctctgagcctgcattcccccacccggaaatccaaaacatcctgaattctgaagctcttatcctcccaaggattcctgataacaggcattgggcgctcctaggcatcctctcctagggtgggagtgattcgtcagaacagaagcttgattgctggtaatatatcatcatcatcatgtggaattcattgaaatgagtgaatgaagaaatcacgtgtcttgaattctgaaaggcctttgagacagtcgttcaggaccttctggagaagcagcagggttgtgggccagatgtcaggatggtggtgtagctctactcctggggtagtagagctgcttaagaacttgggtccttccagccaaagaccccccaggcctctgacccccactcaaactgccctgtgctttgctcagtgatatgatggaagcctagggcctaggggatcagctggcataggaagggtgtccagatgggcaatgggccatccacagagaggggcgggggctacacagctatccacgcccagccgtcagggaatgagctgggggggtggcaccaggcagcagccttgtgcagcagccttgtgcaaaagccctggggccttggttgacctcagcgtcgtggcacagctgcctgacaagtagatggggacatgggctgctttaatagaggcagagtgccccatctggggagggagccgcgggtccctgcagactgtgtaggctgcttgctgagctttagacatcagtccttgctccagtgaatgaaagctgaggcctccacctgagcagccctgcctgccccgtgcactttgggcatcgggagtctcagtgaggttgctttaggaaaaaaaaaaagtgcttgtttaagagagttcaaaactaccaaactggatgacattctgcggctccagaatcattttgcaagcatgttcattcatgtccctgtccccctgccgggcggcccacagcctccttggagagcccagactgactcccacccttggttgtcatttatccatttgggcaaaaagaggtggtggtgctcagccaacatcagtattggttgcaataaacctactactctgtgtagttgcttaatagttactgtctttctggcgacattgtacctcatttcatccttcccaggtcccataaagtaggtatcatcatcagtttattttacacatagggacactgaggttcagagaggtccagtaatcggcccacagcttgtctgaatgaagatttgaggccaagcgatgtgagggggctagagctgcccagtgggaatggtcagcaagcgtgggctcctgtggtccagcgccatctgcaggagaagtgggatacagccaggccttagtgggtgtggctagggggtcatagtctgtccctaggcaagggagtgattatggggaccacctataatctttgcagatgagctaggcccgacacatgtcactacaaacggagtgtttttaacagtcctgtacatgtatatgggaattgcacatggcttttgttgagcacttactgtcggctacactctgagcctagagctttatcagtttttcgtttttgtttttgttttttgtttttttgagatggaatcttgttttgttgcccaggccgaagtgcagtggccaaacttggctcactgcagcctccacctcctgggttcatgcaattctcctgcctcagcctcccgagtagctgggattacaggctcgtgccaccacgcccggctaatttttgtatttttagtagagacggggttttgccatcttggccaggctggtcttgaactcctgacctcaggtgatccacccgcctcagcctcccaaagtgctgggattacaggcgtgagccaccatgcctggcaactttatccacttttatctgccaatttaatcctcactgcagccccccacccacttcagagagaggcaaggggccttagctgtcttctcttgcagtgaggggtctgtggagctgggtttgacttggttcttagccactgggctgtcagtgggctccactgcggtcccggaaagtgggtatcaagaaccctgtttgactgaatgatttgcccactgcccctcaattaaaggttgtcttgggtctagaataagagtttctgacttgaagaccagtcagcccctcttcccaagttaggggctgtagctgcctccagaaatcaagtcccaggagctgcctctgaagggacagcagaaaaggtttgcctcccttcatctggcgaagagggagaggacgcccttggccctccacccccatgaaggagagcaacaagctgtgtggctgggcagagcagagcagaggactggagtccacggtccttgattaaccttgctttgtgatcttggggaagggccttccctactctggtccccagtcaccctgtaatacagcctttgcatctgagtccccttctggcagtggctttccaagatgatgagtatttgttaagtctgtcatatgcagggtcctgagctgagttctctgggggacacaggtctctaggtggatgtgtgatgtgatcggtgggtgggtcaacgggaacactctctgttccctggaagaatctcttttcccatgatctgagctccctgacctcttgaatatccatatactgctcactccataatgttcatggctatcttggccactgtgtctagcacataatggctctcattaaggtgaaagagtgaatatgacagggtattaggagtccccaaggtcattgtcagtttgggtgggggagttaccattctgagtaggctttaaggaggaggctgcttgtcagaggaacattaagtagagtcacagggggtggagtggggaagaggaagtggcacatgtgcatcaaacctcctagacgggagaaaacttttttgtttaaactcagaaataggataaagccatcaatattgctccagaatgagctacataaattgtgaaacatgcttctttgttcttcatacctcaagattgcaaaaattgtgaaattttcatcagtgtagaaaataaaaaccaagaaaaggtacaagcccattgggataacttgcttgaccacaacccctgggagaagagaacccatccaaattagccaggtgcagccccctctcctatagctggcaagaggcagagtttgggagagctcagagctcacgcagaggtgcaggcctctgcctccatgccatgtgtcctggagagcctagtgctctcctgacctgccaccgtttggggtccctctgcattaagcattgccttgtctatgggtcatgcctctggagaagggtccctcctgcagcccctaatacctaagagatatttgtggcggctgattagaataccctgatggataattccaggctgcagaggtgagaggcatttggactccactgcctgggatggccttctggtgaggtatcatttcagctgggccttgaaggacacgcagaatcccaacaggtggccacaggggtatgtctcctgtggatatgaatggctgaggaaggaggaaaaggcagaaggagaaagataggaaaagggaaatcttgaaagctcttgaattagccaggcccggaagctgggtgtccttgggtaagtcactttacctgtctgagcaagcttcttcatttgcagcaaatgtttttctgtcattttctgtctgtgcgggtgacatgagatgacttgtacagcccatgtttgaccttgtcatgttgaagatggacagatacagcccagggcctgtgccaaacatccactgctcctcttgaacacagagagggctgccaaactgaccctttattttgtgatggatggaatgtggtatttggattatgtacattaacctcaaattaaattaatatcccacttgccacctggaattgagactggggtgggtgagcccccagaacacccccctctttagaggactccccctcctccagttttcctctccctcaagctgcctgtagtttccaagcccggcaggacacaggctgtgtcccctggggcccccacatctatcccgtcacctgtaaagggaagattggtttgacctgtgtgtattgaacgcctgtctcctctgtctctgccattagaccaggagctcttgggatgggggaggtgggggattaagctctgttttcagtcagtgcaacctgttaggtggataaatggcgtgaataaggttccccaaatcttgaagcttttaatggggatactcagcaaacccttcagcccctcgggcccctccctgagctgagcactagggatcccgtcccgcaaggtggttgtccttgctggggtacatacaacggttccggggaggggccccaccctgacatcaagctactgccgctctgggaaggaaagtcgcccggaatcggggtctaagtggccagggcactgccaggcgcaggccagccggcgcctcagccgaccacgcgcccgctctcatcggtaccaccgagggctggagagcagcgacctcgcagcggaggaaggcgctttgtcaatccccgacggggtgggggggcgtggattcctccaggtgggtgtggggggtgtgacctcgcacggggaggacaagctcggaggcggcagggaggtgagcggggcggccggccctggcggtccccgggggtctccgcccctccgcagccccgccccctcgtcccggtactccccctcgccccggcgcccggggggctcgggcagcctcggccgcggtcggcgcggctcggctcggcgtcgccaaggcaacagcggcttagggggcgggggcgacgtggcgggcggggtgggctgggccgcgctgcgcgggccgggccgtcggcgctcggtcggcgggcgggcggcgcgggccgcgagctgctggggccgagcccgagcccggcccgccctcggccgcgcggccgcccagcaagggtgcgggtcccgcgcgggtcccggcccgccgccgccgcgctaaccccgcctccccttccccctcttgtccccccgtgcgcagggcttcctcagccgccgcctcaagggctccatcaagcgcaccaagagccagcccaagctggaccgcaaccacagcttccgccacatcctgccggggttccggagcgccgccgccgccgccgcggacaatgagaggtgagcccgccgccgccgcccggtcccccgcgccgccgccccgggctgcgcccctgaggacgcggggacaaagcgcgagcccggcccggggcgagccacacggcggtggggggaccccacgccgcccgccgggaacttatggggccacctcggccggactagggggcccgaggggaggaccctgtgcctccctccggggttaggtgagtagaagagaggagagcagagggtgcccgcggcggcccgggcgaggccgggcgcgaagtcccctcgcagggaagtcctgcctcgcctgtccgaggtgggcattgtttcccgggccgtgcggtgcccgaaccggggacggaagtggggcctctgccgccaggacccatccccctgccttgggagcccctgggtatcagatacaaaaggcattttcggccgggtttggccgagaccgggcgctgcccgtggtgaggggaagggtgaacatctggaggggaggagcagggggctgggccacttagggggcacatctgctctaagtagggcgcgtgctccactgggggctggcgctagcagagcgggcagtgcccaggccctgagctgggggcacagcctgaggctggggagccagggccatctcctctccagcctaggcagctgcttctctccttccctcacctctccactctcaggggtgtctcctgctttctgtttccttctcctgggccagccgggagcaggtgtggaaattccgcggggaggtggctggtggggcagaaggggagagggaggaggaggtggttcaacctgccgggagacgctggccagggagcaggcttcagctcgcaagggcaagccatcctgtcctccagggggcactgggcggacacagcctctcagggcccaggtcctcctcgagtggtgccagccacaggcacctttccacttaggcacaggcatggtgatggattccagtgccagttagaacatgtccctgcccagcctgtggaggtgaaagtacgggcaggcaccgaggagccttttcagcattcagcccgaacgtctcagaccactggcatctgccttcgtagggctgtgtccgtgttggcactccctgtaggggaggcgtaggtagcatgaaaatgtctctcccctcccccttggttctagcgggcagaggagtacaagttacagcccaactcctgcccaaggttgagtgactgtttaactgacccctagcatcttcctggagagtaacacttccacctcccagtagaatggctagacgtttaatttccatcgtcccagagccgcgctctccagtgcatcctcaccactgcctgcagctggtttcctgccccagctgccaagcccagcctgaggcgggaccctcagcctttctctgatggccctggtgccccaggggaccaggcgtgccctggcaggaagatgcagccaggccagagctcagcgctgggtgcagtcactgcgtctttgaaaatctcgcttcccatctttgttattgtctgggcggcaggccacccggtttgctgccttcctccctccaccgggcccctgccttcggctgtcttccccaggaacatgcccttctccgcgctttccttggcgggggtcaggaccctctgcacccgcatgcgggggcttgtgtacgtaccccgttttgtgtgcatgtggtggttgtccggggagcaggagagacaacaggcagtccggcttctgagtgtgtctgctctcccgggagcaggcggcatgcatgtcatgtttacctccttacagcgggaagcctgtacctagaagccggcaagtgctggctggccaccctagccagaggtcggggcatggccaagacgacctcgtgcgggtcctgccccacttggcctcaggtcagccttgccacatgctgaaggggcgcagagtgggggttgggagtgaaactacaagcctgtttctggaaacagtaggaaacggtagcggttggagcagaatgtcactggcagcggtgtggaattgtcttattaattttctataaacaaaatatggcttggtggcctctctggcacaggaagggagcctagatttcccatggacaggcagaaagactgggtttgaaatctctctacccagccttggagctgaaataggctttcccaggactggggtctcctgatttgctgctttgcttaggaacagattcgtcggctgctgctgggatggatgggcagaaatttctctggggctgtccctggagtcatcctatttggagttcagtgagtaaaaacaactatggtgaccccgcccgccccccagctcatggccaaacctggatgagtggagcagtgcctctccctgctctgatgtggtgtggttgtgatgttgaaggctgggagggcaggatgggctgtctttggcttggtttagcagcaaggaagggttgtgtcctggctccatgggacccccactggctgccatgcctctggctggggagagggtaagtgccaagacgctagcctcagtgagtgggtgggacacgagtgggaaggacggtgggggcttctagggtgtcgagcgggagtcctggtccccatggccttcccgtgtagatgagcggcacagggcactctggggcggccacttgagttctgactttggatgaatctatctggtttatatggctgctgaagaggctttgttgaatgctgtctgcgtgctccgcaagctgctgtgttggggaggtggtttttttgcgctggaattctctcatctggaggttggaaaccagttggttctgtgctgggatttttttggctccctggaaaaggagtcggtttcaggggtggggatgccgaacctggctggttgggattgagggttgctatctggttgtgaggctggggtcaggccaggcagtgcttggttggcacagctgggctctgggggctgggggctgtaggacaggcttgagccttcggacttattcttctgaaacggcctcaggggaggttgccagctggtctccacagtctctgggtccctcagacactcatttcttcttcagaagctttggcagtaagcaccaaggacaggtgatcatttctcctgggtaacaaacacatgctgcttggagcgctttccaggtgaaaggtgtgccggcaaaagcattttcattttgcacactggaaatgctgctgcttcatttacagggctgttttaatgttggtaaaagtgatatagaggatgtggttctgtcagcccagaggataatttccaagtcattcatttatttattaatgttactgaggagctaggagggtcagttggcaatattatgctttcctcattccttctctctcctgatgctgtttctgggtgactctagccctccacacctgctgggaatatgcttcctttggcatgctacctgtctaaacttaccacagtagttactctaaagtgtctgtacccccatcaagctcttcccagtcatcctggtgcggagcttagctcataaatgcaggcagctctggggcaggtaggcaaggctgctatgtgtggagttagggatcgattcccccttccagagtatgtgtgtgctggctggcgttcccacacctgaaagttactaatggtggaattccaagtgataagggactagggaaggagatacagtacttggatgttggggatggcagcttccagggaccctcacctggacctgggtaggcaggaatcaattctgccccttgtggtgagacagtccctggaggagggagagtgaggaaggttgatgaggaacaggggaaatggaagttagggtctattttcctgctttagttgctgacagtaagtgcaggcaggactgggcacccaagtctggtgtttcttgcccttgttccctcccctactatagacagggagggcctggtcctttttttggggactagtctgtctagtgtggtgatgtcaagatgatagtgcagtttagacaattgccaggagtcatgggatgtatgtgatctttggatttgaagccaagcattcctggggcaagtcacgtaaccttttgcagcctcagtttgctcatctgcagaatgggcatcatgataatcatgttgttgaagacattaacattaatacatttagcacacttttcatagaaattttctggttcagtgctgttttcttagcatttaacactgggtcttgcacatttcttaaatgtttctaaaatttaattaaataatgtgtgaaagaggttagattaatatgtcataggttttcagttaatattggtagggttaagtcacctcgtcttggtaagcctcagttttctcatccacagtgtgggaataataagcaatcatgtggcctcatcctgaggttcaagagataatagatgttgctgtgcctggtaaggtgattcgagcttaagatgggtcattattgccttaaacttaagaaacagccattattacctagagcacaggatgttttcctagggattcctgcttacacctgggaaagcaaagctctcatgtgtgttttaataatcagttttaaaagttcattgttccatcttccgtttgggtcatacttgtttttaatcatttaggcatttaggttatgtctaggttttctttattaaaaatgacactgggatttaaatccttgaatatttatctttgcctacatttctgatttttcccaaaggataaagtcttagaaacagaattactaggtctaaaaatatgaagagtttgagatttttcttagaaaaatgtcacccaccaaaatcctgtaataattcatacccctccccagtgatttttgagagtgcttacctgtttcctcacacccttcaaaacattggatgtcatcattaaagcagtctttatcgtttggataggcagaaaaagggcatttttttgttatttgcattcatttgcttgttggtgatcgaatagtgctttcctgagtttcatggccagtggcagtgcttcttttgagacttgtctattcctgtcctttgcctgagtgttctgacaagcctcttgcaggattcttggttgccctgtttggtcttcctcagctctgagaggtcccatgtaggtggatcctacacgttaaatgagcctctgccttccaagaggtatgacaaggaattcattaattacctgtaaggaaggctcacctggctgtcctctcctcctccccctcccttcttctttccaccttcctcccgtcctctcctctccataaggaaatcaggtttaattcctaatcctatcattcataaggatgccctgtatttacacagcactttaagaggtcttctgccctgtagggtaggtaggcagtgaaagggctgctctatggccaggaaaactgaggcacacagtcaaaggcatggagctggggcctatgcagaagccaggcattggaaccagatcccctctcaactgcagcattgtacttgagccccatgggcacctttgggggcagggctgaccggcccaggagcacatgattctgagtctcatctctagagaggaaggggagagccacagaatacgacctggacgtatagaagaatcaatttattttttgctttctcatttttattactctcctttagatctggagctcccttgtgtaccttcccaagatctgagctgggcaatgtttttaggaacggtggaaattagctagtgagaatgggatcagcaaggctggggtttcaaaggctggagaagcctttctttgcacaagcatatgtttgtctgtgtacgtcttttgtatgtgttgcaagtgtgcacctgtcctcatgaagatgtgtgtacattatatgttaatgtccttatacatgtctgtgcatttaattgagttaatacaggtgaagtatttggaacagtgcctggtacatcatatggggtgagactgtataaagttgctgttttgggaggccaaatacaggcaattgcatatgattcaatctatgtgttcaggttaagtgttggctactattgttattatcgtgtgttttcttcttgggtatgcatctgccagttgtttgtacatgtctgtgtacgtataccctgttgtgcccatgtgtatagtgtgttctgtgagcactcacgtgcatacttgtgtgcatgtgtgcactttctgtctgggtgcatggacactgagctggccggtgtgtgaataagctccccaccttcttggggagaacttcccagagagcaactctttgcctcccctctcaccttcggttaccaggcagagcccaggcccaggtgccaggcctgacaggtgccatgggactgctttcattctcctccaggtagccctgcctatttccaggccccatattagaatatgcaaatcgactctttaatggaattcctttgcaaaatattacttgaaccagtaagttaattaccaggctctaattaatggctattttagaaggccacagaacaaaactggaggagatcataagagaccaaaaaggcaagagggaaaagcatccagctcccccagtcggcttggtgactccttccagggtggcagggtgtgcttagcttctctctgctctgagctgccagtccgctcccttgtgatgattggctgtaggtgagtgaatgctccccttgcacgaagaacctctggtggttctagtctcttggccatcagtgcatccatctgcgaggtgtgtccagggcagcatctgcctggggatggggtgagaatgtgtggatagcaagcctgggctgaggtggggctgcaccaacctcagagcagccgggtgacatgcccaaggcttgggctgtgggagggacagtcactggccactctgttttcccacccctccaggggcctgtgggctatcgctgcagggaagccaccccccagtcagagcctgggagcctgaggcagcttctcacagccaactctccaccaagggcccaactccctcccctccacttctctctgagttcgcggtggagtcacctgtggcccatgtgtgatgtgagagcttgcttgcacaccccttccttgggctcttggtcaggccctgcctctgtgtgactatgggcaagccgtggttcctctctgcccctccttccactcatccatcaagaggagtgattgtacctgcccacctacctcaaagggctggctggaaactcgcaggagattttagtgatggaaatgataggggagtttcccctcccagctggggcatgcctgtgttaccatcccctcctgagatagaggtcgtctctgtcctctgtgagcatgtggctgtcctcccttgtgtatacaggccatgccacctaccacctgggcatgcacacatgcacgtccttgtggaagccaccagcgtgcagcagatatcccctctgggccacaggggcgatggggtgaaaacctacgggagggagagggaaacagggtccatccccacccacaaaggttcctggcaccctgcctgagaattgggggaggggtaagaagtgatcccaaggctggaggtcaggccccatcttgagggttgcccaaggagtaagacctcccttcctcccctccctgtgttggcttaggaggcctgcgttctgcagacccctagggttatccccttgtagacctcagctgatgacagtgccttggcggtgggctgcttggaggcactaacagagcactttgcgccctgtgccagaggcatttagagttggcctgtgaataactgagtgtgcttaaattttttaagagggatggactgactggtgggcagcctgagactgtactttttagaggttgcgcaaaaggcagcctgagaaggtttttgccacctccacccttctgccgcccccctcagttttcccatctctcaggtggggctagtggtacattactgcatcagatgctctgccgagtgagttactccttagcacaatgagatcccacctccacttttcagtgggcagcccccacgggggaccagagcagcccttctccctactgtcccagttaaccatcacctcctgcctgtcgccctaacttttctggaacaagcagggcccttgttttcaggctgggcctgattgtaaaagagtgcactggggagagatagagatggcaccagggtagcatgggccctaatttgatgcgacgttgtcatgggaagttttcataccaagggcagtgaattagtgtagtgtctccctgtgcccaatgactaaggggaagttaatttcatgctctgcctttttgacattcataatcagaacgttgtattgcagctgcagattgttagcaggtgaaggatgtgtgagcctcaacaattactgtttctggcttgggaggagattgattaatagattgttcccagccccaccccctctgcttcttactcccgtttgtgctttctttccctctttccaacttcaccacatttcgtcaggaaactaagtggctatgactaaatccctactcttgtactagaaacccagggcagaggaggacctgtatgaggaggaattgcctaggacacctgataaaatgcagattcttggactccaccccagaccttctgaattataccctctgggtggggtggtcttgcttccccaaagtttgctccttttgcagaggggcaggcattgtgccccagctgtgtgctagtgacttgcctaagcacttcctgtgctgtattcttactgatttctcatagcaagagggctttttgtttcccatttcacaggtgtagaaactgaaacccgatgtgtgagtggcccaaagtcacacactggaggaaacccagtaaccaggcaagtccattccctggttgatgtcaagatcccaccagtagcatgtcatgtcctttctcattaaggctgtgatgccttttgaaataaaccctctccctcctcagagaagtagcagtagcccccttctgtgcttgcactaggctcccattgtgaaaagctcctgcacaccagtgccctgggtctcctgagggtgcttggaacagtcagggcattcatgactgatctgcattttgcagctgtggtgggtgacgctcagagaggtgaaggggcagaggcaaggggagctggaacttgtctcctaactccaggtccagtgctcagcccacctgtgccaccaaggcctgctcttctcactgacttcctggttgcaggtggggaaactgaggttcagggaagtgtacccatttacttaggattgagcgagcagcagtaatgcaattcaaggtccgccaagtcaaattccacaggacaggactagtcagcattttaggagtggatcttgtacccttggctcccgcctgagaatggaagtcttccagaccccttggaaggtctcggctcagggaagagaatgactgtctttggagagactaggccaggtggggtgggctgcactcccaactaaggaggccaggcacctgctagggtagtgggaggtgatgggggatctgcgcctgtgaggtgggcagctggaatctgaacctagggctgccttactctaaaaccccgtcccccacaccgccagttgccatggaggttaatagcaggcgttcctgagtcagtctcccagagctggtccaaggcccagctccaccaactgcttccctctgagcttgagattctctatttcagtaaagcaaaaacaaaaacagaaactagtgtctcggggcccaggattcctggcacagggctggcccagtctttcctgggctttggtttactgcattcaggtcatgaagcccctggagctgctggagaatggagccatcgtagcggggcgggggacggagatgcctttcatcctgctctgttcatggcaagctgcttctgatgctgtgatagccccacccactgccccacccactgcccgtgagtggccactcaggatgggccaggctctgtgcctggtgctttctcgtgcatttgctcagctcattcttactatagccctttgaaggatacgtgctattactgtccccattttacagagaagaaaattgagtcacagagagactgagcagcttgttgaagtcctacagctcataagtggcagagctgggtttcaaacccaggcggttggctttattatgtaaggccccctgtcaagcaccgttctacatagcctgtgctcatgtgctctgtttcacattacatgttctgtcagtgatcacactgataaaccacctggtcacttaagaagcacccgtgtggcaggcattatgcatggtatgtgcatcatctctgattttcttgactaccctcattttatccttcccccattttacaggtgaggaaactggccttagagtataaaatcacatagccaggattagcctcaggttacctttagaatctagatctctttgtatccacagccagggccctctctagtatattagctgacatggctgggcacatcctatgcgccaggccctgctctctacacttcactgagctgaactcacttcaccctcacagcagcccgtgagatatatactgttgcagtccctggttcacagccaaggaagcgtgagttgcatggccagaaatggcagagctgggattaaacccaagccgtctggctcccacatcagtgtttttaaccaccccacagtactgccctctccctatcttacaggtgaggaatttgaggttccaagaggtaaaagtcacttgccctgagtcggacagcaggtgagtggcatagacaggatttgcatccaggtctttctagaatgtttttctgtctcccaggtgagagaatgtggctgctgccaggcggtttggaagtatgtcccaagggcacccggggctctgctgggggctgctgtgggtgcccaagtcctgaggtggtaggggtggcagtggaggcaggccttaagaaagagtcatcaggatgtgagggcaggctcggctcagtgactgcccctcctatttgcaacttatcacttattctcaagcgtctttttctgtggctcccccagggttctgggctcccacacctcttttcacctgggcagagctgatgagctgtggctgcgtttggatctgttgacttataatgctgggtgaggtggggcaggtacaagaaggggtcgtggctaggctaagtggccttccatagcacttcccttcctccaaggtcagaagaacatagaggtgacttccatcactacccaggagggtgaaggcaaacagggtgatgatgatggtggccagggactcccccaccagcctctgctcaggatctgtgggaagatgggtgaagctggcgctgaaatccccagccaccccaggcagtactacagcagactcaccaagggagttgcctattgtgctgcaggccacactgccctggtgtcaccaccttctgtggactggatgtgacgtagggaagtggtagtgccagggccagatgttctgcccggagcccatccagcctgcctgaggtggtcttgctcagttgccctaggatcataaagtccacgaatttgatggttgtttatgaggatagtgaaaacctattccagagagtttcagaattaaggaaaaatggagctggcagagaacttagtcttagagtctgtacaagccaggggtgcacttgaaaggccttgttgtctttcgtacctctgctgcttattgttcagagcacccataggagtgttttcccgaactgggttccatggaacacattcttaaagatgttaatgggcgtttgcgatgagagaattccatagtccaaacaggactggggagcagtctgtccagagtttctcaaactcagtgtcagaggttcttggaggtgagacttgatgttttactccagtggggtgattgtgtgctcaaatacattttacatcctcaaattttgcttcctcattcttgggaaatcatttgtgacccaggagatgaaaggccctgagaggtcctgcaatgaagaagtcagttttgctttgtttaatccagggtttcctgtcccccaaccccaggagcagctgttaacatctgtggagcagttgtattttgcagaacattatttggtaaacattcttttgaggtgttatgtctcctcagaagcatgttttggaggaaactctggaagtgttccctgcccttagtacctgcaggagtaagccttgaatgatggcattgctggctcagcaacaggtagtgggtcatatgtatttgaaaaaagtcatcctaggtcctcaatatcattcctcaaagcagctaccagctctcctgtgtgtgggatggggcctggctctggtcagagagccctctgtggggaggtggtttgtctgggaccagcctaggcctagggtgtaggggtttattcccctttttgcaggctgggtggcgtccatgtacctggcagcttgggctctgggcctccccatccccctctagactccctctgcagaaggcagtggtcaggcagaggctgcccacagatttgcataattgcaccgtctcctgaataattaataaagctctgtccttgctgggagcaaagtctgcaccgttatggatgggtttgccatggataggtttgccggagctcttccaggggagccgatggttcctggactcctctgcttttcctggcatggagcccccagagagaggagagggcactgggttgggggctggctctggtgtgtccacatggctcccatagcatgataaagggcaggtgaggggtagtgtgtgctttcttccaggatccacacatgggttttctagcacacagatggtttaggattcttattcttcttgctttctgtggtcccactaaccctttttctctgaagtgtgatcagctgttgtggggcttagccctcttttctggcagcccaaagggagcaatgcttatgcagcaggtaagagcaatgagggccagttttcagacaagtaggggagggggaggtgtttctgcttggggcccttcttcaatccctcccagtttctgggcttgttaaagttggaggtagcctgggagtgattcctatttgagatttctaaatcccttttgatggtgtttcattgacgtgaattttccctctgacgcatggccttgtctccctttcatgctagaaaggagagtaaggggtgggcctgcccccaacatgtggttgacattggggaaagtcctagagtctcgccacgccatgagtactcttgaaaggccttgctccaaaccttctgtaggagtatttcttaaatgggttctactgaacatattcttacagatgttaatgggtacttgggatgagggaattccacagtccaaacaggtccagtgaaccaagtcagtcagtttctttaatgcatggctccttagaggctttaatgtgccagcgtgtgtctgagcccctgggagggcgtacaggatgctctgcttcccatccacaccggcactccagagtgttggcacatctccagcaatggggagctctttccacctggagcggcccctgcccttggaggacagtgccaactcttgtaaacttccccctttgtggagcttccccaggcagcatttatgtggcaccttgtcattccccacatggccctcacaccagctaggaaggtggcagggcagggattattccattttatagataaggtaactgaggcccagagcgggtaattgtctcacccaggggcacatagagttgatatttaaacccacgtctgccagctgggccttcagctctttcctcttggccaccaagaaaccatttgctccctggatagatgtcagtatgttggctggggtggggccttaggacctgttgctctgacagtgcccttcccagcttgcttggagtgtctagagggtggaggcaggagtgagtgaaagccttccttcagggtttccaagctgtggggcctggctttggagccatttgtagacaggggcctaaaaccgccagatgcctgcttatcacaccattcccgactctcacccttttccttctcctgccctcttgttgtagggtgggaatgtttgaggtgccccagaaactgggtatgcactcaactttggccagtagtggtggtgcaggggtgaaggagcagggcagggggttccagctggcttgtctttctccaggccttcctgagagttactggacaagcttggtggatggccaggggagcctggggtgaatttgttcacagcagctgggcttagaggctgcaccggggctgagatgtgacttcaggactcaggccaactgttttatatctcaaaaatcttgggttataccatacaccatgaaaggtactgcattgccacacctgacacttccattctggtcccaaagcaagccacacgggggctctctgatgaacagaatcctgctctgctgacacatggacccagatccagatccgacgccctgacttcctccatgatctgggacaagtcacctaatctctgaacctctgtctcctcatttttaaatgggcaccatgattgtggtgcctacctcccagggttttgaggtctacatgggatcatgttacatggtaatttgatcatattctgtcatcacacacatgtactcacattctcacacaccatgcttttgcttttttgtttgagatcccacaacctgccagcacatccaacccagtcttcccagggtccacctcatcatatatatagcaagagatggcccaagacacatgaagtgatgtttgtgctgacatttctcccacttagaaaatcaatattctgtggtctgcctaattgctctgttgctgctaaatgagtcattatggagggaaaatagcaaatgcattgtgagattaatgggagaaaatggttggcaaatgactttggtttgcttcggaaactctgagaaggtgttactacgtgaaatctgcagagccatgcaaggccgagtcctgagcagcagggagacaggcaggcagctattggcgctgtgagcctcccttttagggcggggcaccgattcaaatattatagaggctggactcaggagttactgagtgatgaagtcaggagccaacaatgggacaggtgctctgacaacctggtctcaaagaagaggatactcttcagttagagccagttacatgccaggcatggtgctaagctgagggatgtaatggtgagcaaaaccagccccagctcctcccctagtggaggacacaggctgaagtgcaattgtcctacaggtgactgtgtaattgcaattaaggcatgtgtcctgaaggcagtgagagcccagatctgaagggtttcatctggtgggggtggtggggagggcctccccgatgacaaaaggagtaagctgagctctcagggaagaaccttctgggcagtgggagaactcgtgcagtcctgttgggtcttataggaggggctgccacgggacttgtatggccttaaccctccagccatcctaagaagtggatatttctcgtttcacaagcgaggaaaccaggactgaaggtggttaagagacttgccagaggtcatagaacccttaaatggcagagtccagatttgaacatggggaacccatgccaaggggcatgccccgttgctccagggagctggccttggcacttgctgccctgagggtgtctctttagctagggttaaggaccttgctcctgcagggcagggggcttcatggtggttgcctgagagtctttagagagagggttataggactctagaaagggggaaccctcaacagccacagccaggcctctttgctttcttgggtctttgcttccttttaatgacagcgtgacttgggtagttttctttttctttttctttctttcttttttttttttttgagacagagtctttctcggtagcccaggctggagtggagtgcagtggcaggatctcggctcactgcaagctccgcctcccaggttcacaccattcttctgcctcagcctcccgagtagctgggactacaggcacctaccaccacacccggctaatttttttgtatttttagtacagacagggtttcactgtgttagccaggatggtgtcgatctcctgacctcgtgatctgcctgcctcggcctcccaaagtgctgggattacaggcctgagccactgcacccggccatgacttgggtagttttctgatgatcaaaatgccaggtcaactagtgactcctctttcaaaaggctctgtaaataacacacttctctccccatgaaatgggttggtttattccctgcctctaatcccagctggactgtcatcaggtagggcctatcagttgtctgcagaggtgggtggaggtatggtcacctgaaggtgcttctaaggaaggtgcttgtgagttcttgtaaacttcccaaggtttcaggagtggcagcagcagataaggagagtccaggcatttcctgtgggcattatgaaggagcaccagaggcatcccactttgtcttggtgcctggttgtagctgagcatcatagtgccatgagaacctggtaaaaagattctggagccccaccctgggagggtcagggtcacaggtctaaggggggctctggaatctgtattcctgacaagccccaggtgattctgagacccactcaagtgttgagatccccagttagcagctctggattcttccgtctctgagagggtcacaggcctccaagggatggtggtagtggagtatacttttatcttcctgggctggatgtaacactgcctgctgccagctcaggaagccaggccacactgtgcccatagggccacatgtaaggcagagcctggtgctcagctgaaccccaggtgaggcaggaacttggcctgggatgctttgctactgctattgtccggaaactgagtttcatcccaaacttaggtctgactggctgtgccctgtcccttgcgaaatataaactgcagcccttcctggcgagaggctaagtgtttatgtgggctggttgcagagcccagctctttgtcctgctcaggttccatttccaaaataattctgcttagttcttcacataaacagcagggcccttagagactggccctgagagtatagaggggatccatccccgtcccagcaccccagtgtgctgccaggagacaccagtgggcatcctggggttggtacccagtgttctgctttctgctcttgctcctgcctccttggaggccaggagccacatgcctgaggcccaggaatgtgatggggaaacaagtttcccagattggccaaagaccaagatgggagccattgcaccaaggtaggcgtggtaattcagtgccacacgtttcccatggtcaaccctgcagtcactcttcccgctaagtcaaagtgtccactttgctgttgtcaggttatttggtgaatttctgtagcctctaatgatgagtagtgagtgggaactctgtctcctttgctcctagcatctaccaggaagactgtttcagcgaaggcaagtctcatacggagctgggccttgtgcacgcatgtgtcatagcaagcactcatgaagatgggccggggtctcttgtgagcctggggcagccccgggggaatcttgccctcagagaagcacttttcaccatagattcacccctaggtgatgctatgcagtcctcatggtaggaattaccaacttccacatcggctcaggggccaggatcttctaagtggtgggacttcgggtcaagcagaattctggactctgagtggcttcctaagagttggcctgctgcttagcctgaatctcagggcaggtacagacaggatggcggtgcccacaagccctttttatccagctagctaaaagccactcattgtactagcagaagcacgtttctacacatgagaggaaacactgcatccttttcggtgcagttttacagaaaactatttaacgcgcttgctgtagctacccctggcatgtggatcctgagaatccgcccctgggcagattcactcgggtcacacacttgtttatcacacggtgtgtaattgaccttagtatgtgtgcatatggacagcataccacgtagcagtgccctgggcattctgacctgcccctcctggcgtgtttactcctctctacccatagttctggctgccgtgcctcaccctgccatgtggcaaccacatgccgggcactgagaggaggcccgggtgagagtctggtcagggtcctgccttcctgggagcattctcctttgagcaccacctccctcttctttctctcttcccctccccctccagtcctggacttcctgctgttcctggtccagggggagggcaggtaccacacagtgatgggtgtcctgcaagctgagcctgggttgttgaaactcctggcccagaagcctctagcccccagccaaggtccctgtttgggccgcgttatgacagtcttgtttccggcatgtcaggtgtgaccatgccttctgtctcgatggctttccttgctggtggtctccctgtggggctgctgtccttatgtgtcgaggtttcagaatggccaggctcttggtggggaggccctggatggacatgctggtggcccaggagagagcgacccatcctcagtccctctgcctgtgaaggcagactctcctgcctgccctggcaacagctctgcgccagcctgtctgtgtggctgccggcagccgcggctcctgactggctgccttctcccagctccctcacgccctccaaggctcactcactcactcactggctgctcgcagcagctcaggcagcgttcaggcagatggtgcaagggaggcgtgggcgggggtcctcggactctgcttgcacacccccatgtgtgggtgaggtcacgcccaagggatgtcatcaacatacgctgggatgggcttggtgccattcaagatctatctgcagggacaacaaaacccgacttcgaggtcttaacaagtccctcgggagtctccagactcgagtccttacactgcatcacccactcccctgagccaccaggccctggtctcctctcttgacccacaggacactgcaggcaaatgctgggttgaaattccagctctgccgcttgtcagctgtgactttagagaacttagctaactctgcaaaatgggggatagtatcagttcatggcattgtcaagaggaatgaatgggatttgcagctaaatgcttagcagcacctggcgaagagcaagcgcaggagatgagttaaccgggattgtgtcatggagttccccggctcgtgttgtgtcctctctctggaatgctgccttctctttcccctgtgattcctactttgatcatacctgtctttcagatcctagctccttctgcttaaagctggctctgctccccctcccccagtcctaggcggacttcaaggccttcactttgctcctcattttttgtgcctgatttctgtgcttcacttttgggtccactccacctggtagcaagggggtgcttcatgagggcactggatgggatctcttgacatatacatgtcctgccctcactggtagaacaaagcaagaatctagctccttcatagctcctcagaacctccgggcaaacctggctatggtccccttactccctgcaaagtggagcacatgaccaagcccattcgcaaggccttaggatgagaagtcatagtgatccctttacagatgggcagctgaggccaggaatgaggaggggatgtacccaaggacacgtaagaagttggagaccctggcctgctgcttctgtgcctctctgctgggggttggggaaggagtcgggccatctctcaaggaatccgggaggacttcacagaagaagtgacaggagttaaggcttgaaagaggatgggttcatcacataaccaaggcagggaagggcatttaggcagagggaaccccatgagcctagtgctcagaggatgaaaaccttactctcttcctgggacagtcattgagactgcagtgagaggtgggaaagggcctggagcatcgggagagtgagaaatcattgggaagggcaggagccagcattaaggagaggcagagatagagaaggtgagctggttagaggcttggcccagacccgtgtatgtgccagattagactgggggagggagggcccaaggataagcatccctttgtgccaggtgcttcatctcttagtgcttacagtgacctgagaggtgtgcttgttttagagatggggaaaccagatgcagagaggtttggtggcttgaccaaggtctcatgggctagtaagaggcagagccaaaatgtgaaccaccagcaacatgactctcaagtcctctggtggccaccacctgtttgggatggggtggcagctcctctcagggcaggggccctgtagtctactccccaagcaggtgtgggggccactaagagagtgtatggcccacaaggttcattgttaggtcctaggcatgtgtccaggtgcacatagacaccttcagtgaaccagattgttcaccaagcctggcaactctcttcaactaggccctattggaaaatgggtaggatgccaggcagcctacagctgggcagctccaactctggcctctgttgcccagcagccaaaaggtggggctcttgtaagacctgagcccctcaccccgtgtctgggtcctgtagcatttcggtccttacttccttgcagttctcagggtgtggcagttgtctgtgtgcctcattgagtggcagatctcctgtggaccgggcccaggcctcctctctgggcctctggcacctagcatacagcctggcccagcacaggtgcccagtaaatgtttgtaccatgaacgatacattgagcacctactgcgtgccgggtgctgtgccaggccctggaataattaacttcggcatggcactttatgattcacagagctcctcccagtccccttaggagtctgattgtctcagatcaggtatttatttccctgttttccaaacaaggaaactgaagcttaggaagaggagggctgtagcctcaggtcacatctgtcagccagggaggggcagaaccagccccagccactgcccactccctgctccctgggcagtgagcacaccctggaggctgacagctgtttctttccaacccctgcaagcaagagatagagcaccctggctggcagggaagccaggccaacagagaatccgtatcccaggaagcagggctcctgggggctgcagtaggcacctggctcatcctcagggctccacccagcaggagcaggggcctcctcttccactaccaaggacctggttgctggggacaattgtctgtgtctggggtaagtcagaggcaggagaacaaagagaacccttcctgccaatgccactctgaccttgaaaaccctgtggggtttcatttactcgaaagaaaaagggaagagttggttaccagcttcaaagaggggcagacctcctgcaggcgagcattgaggaaaccttggctttgtgagttattgctgccaaatttctccttttcagtttaacagaagtcctggggatcactgtccatgggctggggaggaatccggccaccttttttagaaggcaggaaggtgccaggatcactgctcttactttggttgggctctaggtggcacagcttctgatgtaaagatcaaataacaatagggagatctggatgcagcctgaaggctcaccccagtgtcttgctgcaggtgtgcccagctgtgggaccaggaccccaggaaggaagggcattgttctgtccctgctgtgggagtctctcagggaagcagcatagcactcaggaaatcctgggcaccgtgaagggctgtgtatttattccttattccacaaacaataagcaagtccctgctgtgtgccaggcactgagtgggatcctgggagaaggattgatgtgttgtgggtcctgccatgtcctgcctgttgtgacagtccaccactgtagtggcatctgtgtccatctggagagtacatgttctgctaaggggggcagcagcccctgcaccatggcactgggcatttggtggcaggcctttggatttataagagaagccaaaaatctagaggtttttttgtgacattttaaaatttcacatctttaaatgttggcatttgattcaaaacttaaaaatgtcaacactgtgtgggctaaacaaaacatgaatgttgaccaaatacagctcatactctttagttaaagacctttatcttaaaggttggataaaacccagatgggcagagggcaataggcaaggtcttcctggggagggggcacctggacagaggggtggtggtgggaatctgcctgagcattttcagggcagctgggaactgggaagtgaggggcggaactgatggggccccgcccagtcatggaatccttgcatgccctggacgtgcagatgtgctgcaggcctgacccaggctgccctgagagcctccagctgtgtccatccctccagtcagcagcgtttacccaacaccgtcacataaatgaggctttggccaggcaggagctcaaggaagaagggtcatgagtatttaagagaaacctccaggacacacgatcctcatctccaggaaagctatggaatgggggctgtcgatctctccgttgtccatgcatgcatgtgacctcccctgccatttgcatttgctctcctgcagctccttcaggttctgggctgggccaggagggctttcgcaagaacacctaaaaacccttggaaaggggctcttcccttctcctcttcctgttcctcccctgcaggagtcctgcattgttcagagggtttgaacggctctggccaaagcctgtttgggtgtcttcctgttcggggcctgcagttatgactcctccctttttctcagtttctccccgtctgccactccccccatgatccatatttgagtttcttctaaatgatcacctgcagaaatggtccttcagattgtcccagagatttgcccaggaaactttcattgagcccctgctgtatgcagggccttgggccagagaggggactgaaacccagggctcccactgactggtagagtagacagccacacagacagccagtgggtttgaagaagaaactcaagtgtggatcatagggggagtgacagacagggggaagaaacagaaaaagggaagttatgactgcaggcctacctgggaggctgaggcaggagtatcctttgagcccaggagtttgagtctagcctgggcaatataatgagactatgtttcaaaacaagataagttaaaaaaattgcaagtatagagtaccaaattccaggcactataaagcaaaaagtaacaaaacttctatgccactcccaccatagaatctcttactccaccaaaagccacggtggactgttggtcggggactttttctgcagacttttttctgtggccaatgaaatgatcttatccacgtccctgtgcctggaacaggccacccagcatgctcctgcttccttggcctgcagaaggactgagggagcctagctgccatggcccagagccctctctcccagcacccacagcctttagtcccatagctatggtgctgggtggccctccatggacggagtctgtggctctggaaggaagagggcatggtcttttcccagcagtgccacacagactcaggccgtgggctgcctcagccagcagagagggaggcaacaagcaggctggctggctgaggacttcgagagcacacagggctcccccaagggatcctcgggattgagttatttctgtttttgctcacctgtgcctggccctggggacagagacaggaatcagctgcagtccctgcctccctggaggagctcccagtcaggtgggagaggtgcctgccacccctgatgaaactgtctctacctcaggttctccctgctgctcagaacaagggacagccaggaaccaggtccagggaggagtgtggtctgggctcaggggagccctggaggaagtggattgtaagctaagattgggaggaactctccccaccctggtttcacctgatgggtcttgcagcacctcctgctcagtaagcaaagaactggatgggaaagaactgacatctgtgcaatgcagacacttggagctgttgtttcatttagagtacagtgttttcccctagaggccctgtgtggatgaagacacagagctggttgaggattgggcccagggggtagggcggagaggagggtgcatggtgaagatttgtctacttaggctggtgagcccactcggggtggagcactggcttaaggcaccttggccctgcccactgctgctgggggaccttgatcaaggtacttcatcatcagtcaaatggggcagagagccctgcccacctcccagggcttctctgagagtctgcctgacagtctttctgccttgggagcagcagagcctgggcccatgttggggatgatgaggatgttgatggtaacgaggatagtgacagggacaacatgggggattgtttactgaggattccctcatgctggcgcttgaggtgacacaccctcactgtgtgctgtgtgccctgccgtcatggctccccactggaccctgcaccgagccctagacttgctcccctttcagtcagttctctgcccaggactcacttgttatgactcaggttccttcctgtggaccctgaatggggagcacctgactacctttccagttgcacttcccccacccctccccgttccctgccccacgagtgctccagcatacatctttgtccttgttccctcttcttctcttcctggaacattctttgttcagatacctgtgtggcttgctgccccacttcattcaagtgtgaatccaaccacccggtcaaacacagccccctcccatcctctagccaggacctggctctgcatttgtctctagctgttgagttcacctgatgttgttacatacttcgtgtacttttcccacactctagactgtacgccacatgcaagtagaacatttatgtcttgtaccctgatgtgtctctggcacctagaatcgggcctgacagaaagttggtgaatgaacaaacaaacatttaattgtaccccataatgtggacacattgctgtctacattttacagatggggaaactagactcaaagaagaggtggattgactagcccaatgtcatacagctgcagcgggacagaaccaggattttagcccagtgtctgtggcctctgagccctgtctcagccagtagacactcccacctccccagaatctaggatggacaggaatgggagggggcccaaaaaggtgggtaggattttaccctggggattgaggggtgaggccaaggagggggtgaaccatgagggtctgagagggccaggggcaggtcggggacttcagtgagggtcaggacagggaacccttgcaagacagtctctgaggagagcacccccggcaccagccactcccaaagaccagccgcctccaggcttcttgtgctggctttggttcctggcacgatttctgtttcccagaggagctcaggcctggcccggcttcccagggtggagaaacacatggtgagtgagtgtgtgtgcgcgcgtgtgtatgtgtgtgtgtgtccagccttgctgtttgcgttgtcgtcacgtcttcttaatcagcctatttctgggagcgatgacttcatctcctgtgattctcgacacagccattgtcaggcgtccatggaaagattgggcctggcagtgtccatattcccctaacgagccaggttgggagagccaattggcgggccctggtctgacctggctcgggggcttatggtcaggtctatctccaagagactccactgcccagggtcacccttagatttggcctctttgaccctggggtacccagtgcagcaaattccagccattgtttcctgtgtgcttcctctgtgtacgctctgctgtgggcagggggtaggggacagtcacgccaatctctgccctcaagggctcctgctgtctgacaatgcagatgagtcaacagacctcaccttagagggtctgtgcgtgaacagagaagggagtgaggactctaccagcgctcaaggaaggctccactgagttggtggttgggccacagggtgaaggtgaaggttcccttgagggagggaaagggcttttgggcatgccaggtagttgggtatcactgggcacggggcggctatgtgttgggcctggagagtgcaaggaatagaggggaaggtagcaggaaggcagcagggtatggacttgatcctgaaagtagctgggaaggattttaagaagagatgggacctagatagatcagcgattttagaagcaagtccttggctgtgtgtaagggtaggtgtggaaaggtgtgacactgggaaatatatacagtatttggtttcttggcacacgactcctgaaatccttagattctttaaagtgatgtctacttatttgctaatgagttgactgatggctggcagcccctaggtggcttcagaaaggggtcacagaaaagaccaaggcaggattagagggttagaactttcagcccaccccacagcccctggggcagggagagaggctgaaggttaagttagtcgccaatggctagtgctttaatcaatcatgcctatgaaatgaagcttttataaaaacccaaaaggacaaagcttggggagctttcagatagctgaatgcttggaggttcctggagggttcctagggagggcatggaagctccacgcccctgcccacatacctctccctatgcatcttttcattggtatccctttataataaactggcaaacagaagtaaatatttccctgagttctgtgagctgttgcagcaaattaatcaaacccaaagaggggtttatgggaaacccagttgatagccagtcggtgggaagcactggtaaaccaacacggggcttgcaattggcatctgaaggatggggggatagtcttggggactgagccctcaacctgtggatctgatgctatctccaggtagataatgtcaaaatggaacaaaattagaagacatctgggctggtgtctgctgcccaactaatcgcctgcttggtgtgtggggacaacccctcccgcccccaccacatctggtgttggaagtattctgctttgtgagagtataaaaggaaaggggagaaactgagttgggttttttctacagaaggtgtctgggacagggaggaagaagctggcgactgagggctcagccctgtattcccctttatcttcaaggggaagggtctctttccccaccctactccctcatactgtacttcaggaactggtgccaaggccagctgagctcagccaactgccaggagctcagttccccaccctggaatgctggtgggctggggatgggaggtggagaggagtagggatgtggggtggtctctcaaaaatattgtgctggacttactgcaggcttatgtatagctttgcctggaggcagggggacagttgaatgagtgccagcaggataaagcactctgaggggtgataccttgtgtcctgctcttggcctggacactcgttaccccctcacctccattccccatctggagatccctcaagccccaccttgaagcagagacactgatgtaacagttcaggctcctgagctgcactgcccgcggtgaagctgcttcccagcgttgtggcctctagcaggtgacttgctctgtagtgagttttagtttccctctctgtcaaatggggacaaaaagtgtaaccatttcctaagatacttgtgaggattaacatatgttttaagagggaggcttagcagagtgcctacacatagaggcgccagcgtgccttagcatggcagtgggggtgtggcaagggtgagggcaactgtcttcaccataattgccaaggctcccttaggattcaaaaagccagggatcagaggagtgaggaggtgtgatgggaaggcccaacaggagagcctgtttggcggagcaagaaagagactgggccctcctctccaccactctgtgacctcatctctctgagcctcaatttcttggcccaaagaaatggtgagaaaaggaatgttgggggcccccactgcaggggcaggtgaggagctaatgtatctgttaacacttgtgtatttccttttccctcaaagccgagaatcagctgcttgcctctctcttgggcaggcatccagcagggaaatgctttgaaggaagccttcccaagctgagggtagccaggctctcccacctccatctccttctcccacacagggctgtctgccttctcccttgtccctgagccaccacccatcatcctttgcatgccttcattgttccagctgctcagtgttgtctttttttgtaagaaaacagtccagttcagcaaacatttcataagcacctgttgtctgcctgggtcttttttgggctcagggcatacaggggatggttaaagtaccaacccagctattataggggagaatattatggaattgttttgaaagatctgaatgcaaaagcagcgatcccagggcaggaggccctgggttctaggcccttgttctcctttcttcccttgggaccttgggcaactcatggtacttctctgaatctcagtttcttcaactcaaaacccaggtcagtctgttgatgcccctggttctaagaggcatcctgtgatcagttttggagtaacaccctgtgggctcatcagttagagaggtctgtgggaactgcagtttcaggccatagtgagaacagcagaccccagagggaggagtctgatccaagtttgagtcccgttccactgcagcttttgctagttgcgtgaatttgggcccgttccttaactcaaagactgggttttctcagatgtaaggtaggcattgtgatatgcctgccaatagggaactcacgggtcttattaatgctactgagatcctgttctcagatacagggcctgctccatgccaagaatacatacccaaccctccagagctccttgtatcagagaggggcattagtgcccaacttaagaggagccagtgagggtggggaggcctgcagctggcccaggagctctagaatgactgcaggtgggctgggcaggggcttcttgatttcaacatgcactagtgtggaattctatctagctttatgaagaaaatgtttgctaatgttattaatagtgtaaatgagatttggggagggggggacagccaggggaaggggttatttaaacacacttcaaagaacacccttctccagtatttaagcagcatcatttgcatatgtaataattgtgctaattataggtggcctcatctgttaacgacaagtttgcctggttgagttacattattgtaatcacccaatcataattctctggcatgcttttcactaaagataacaacaacaatagtaataatgcctgtcattttttagtcttttgctctgtgccaggcttcctcccaggtacttgacagtcatcagctcatttaatcttcacaacacctctgtgtcccaaagattcttatctcctgtgtacagaggatgaaactgaagtgcagagaggttaggtaacctccctgggctcacacagccaagagccaagggggaaatgccagctcacaggctctttccactggctagcactacttctctggggacacttgacatgtgttctcaccctttatctctaagccttctctttctcatttgctcctctcagaaacccccattttaccgaagaggaagctgagaccctaggagagaatttggggctgggcaggaggtgagcccaggtccccttaactttatgacaaaaccagccccagcatacccacctgccttcctgcagtaagggatggagggcagcagctcctccatgttctcctctgaagtcttgaaggagtccagccttgaggaggagggtgctccttacctctgctatcaagcggggtaggcctggcctctccatcaaagaaattataagtaaacaggtgggaggactctagcacaccattaattgctttacataggttgtcattaaatcagagatagtatatggatggctggtggccagatgtagcccacaaacaggtctcatttggcccgatggggtggaaagtttttgttttgtttgtttgtttaaaatcattcaccaacactagaacatttaccttaaacattcacctgaaaatctaggtttctggcttctattttaagacagatgtggcttcagtgggcctatattcctatagggcaaataattggtttcttcagttcacctcagactccttttctccctggaaggctcctcccagcaaccttgggaggtgtgtgggtgtgtgtggggttatagtgttcccattctgcagataaggagcctggggcccagaggggaccagctgggccactccacaaagctgttggtaaggtcaggacttgaacctccatcctcatctccacgctttgtggttctcactccacctcgctgcctcccagccatgtccaacccccactggccgccaaggaaagaaagaaacttttcacaggcctaatgactcaaaaataagcaacagtaagcctgaagaactgttcctatctccctcctctccctttccacccttcccgaggccagaagggacatgggaaacctattcatttaaactcaattattttctcgaagacagaacagaactgaattgggtcaacggctatatttgctgtgctcagctgttttcctgcaacagcatcacccgccgggtctgttgctgggccctgcactgccaggctcaccaattatagctccatattggtagccattccttgggaagcttggctcaggaagagaggagtcagtgaatagaacctatcaccctctcctttttcgcccagcaggctgcaggggcagggtccctgggccagtgtgggtccaggctccgtaactgtgtggtcagcacctccagggacctaggcttcaggtattagacatttaatgtccaacacctatctgtaggggaggtgcatctgcagcagagtttctgcagatgaggaaactaaggcttagagaaatgaagtgcttgtgggagaagcagaccttagagtcaggcacagctggcactttctagctgtgtgactgggagcaaagaacctgactgccttgctcctctgatcccacctgtaaaggaggcataatttgacatacctcacagggctgggctgtcctgttgtagatgggttgcagtgtacatgccagcagcctgcccagggttaaccctcctggcaatgagaagtgtgcaccatgtgccaggcacagaagttggtgggggcacagaagttgttggggacacagatctctgaagaaggatatgcttggacatcgttctctccagatacctttcctgattccctgctcccaaactggaaatgctcctgcagtctctctaggtcccctgttggtccaggccctgccctggacacttttcaccacatcttctgggcctacagcctgttatatatatttttttgtttggtcctaatatttgtgtaccttcccctctctactaaactgccagtttcctgaggacagaccgggtgtcttgttcacctgtttggctcctggtgtcacttccttcccagctgggtggccttggactggttgtttaacccggtgcacctgttttcacatctgtaaaatgggaacagtgatctctctccctctggcacatgtcacggcaaggaggttaatatcacacatggcagcactgtgccagatggctgacggaatggagtctagagaaacattgggaggaaaccaaagcagaggctgcccctctgccctccttgaagtagggagtatctaaggaggcgaggcatagtggttataaatgctgtcttgttatagaattgctgtctggttacatggggaagtgggaacagagtggtggccagtgggcctttccttgtctcctccagcttcttgctgcagagtgctgggcttgccccaagaatggactgctctggcctcacggtcatctcagattgcccagtggggctggggctggggctggggctggggctggttgggacctacccacaaccactgacctccaggtgcccgggttacagtacctggcattagatctcttcttttggggtctgggtgtagagcaggatctccctgcactaccccacgatattattgctgatctcagggttggggagtgtttagggaggcttgagttccctgacctttcaggaagcatgcatgtgaacttaggcctcggacctcgtgtagacatggtgtggtgatggctgggccctactctggtggggtggacgcaggacttggggactaagcagcaagtgacctagccacagacacagaaatggctctggtgggagcccagagtggcactggactctctggggggccagggctgaggggactgcccaggttgatcccggcgtcttgtacaatagaaccagcagtcacaggctcataaactgtaaccgtcctctttccgttgcctcttggtagcattcagcccctggcacactatgctgggtgttgcctagtacttggcactgtgacaaccaagaaagaaaaatgctgaccatgtctcactgcttgttcgagtaaatttactctatattttttagagatgtcgcatgggtgggaatttactcccactaaatgttttgatggaaacattacatttttggagtgaacatgtgtcaacatcactgtggagaaaaggttccaggattctctgccagccaaagtcatcaccataagacactggttgggggcctggcaggcggaggtgatgcgaccaggctggtagtggggcagaggtagccagatgggtaggagtctgcctggctggtctggagggagaaggggatctgagctgggggaactgaataggtggtgaggaggaagggagtagggaggctgtgggctgatgacatacattaaccacccacacagctcaaaactaggtgagtggggagcttgaggggcaggaacagcgagcagaggctctgaagtgttgaacactggcagctcagacccgagggacaggctggggccagattgttgagggtcctagaatcccagctcccaccagtaactagcgatgtgagcttgggcaacttttccaacctttctgtgcttctgcttcatttttagtaaaatgtagcatggatagccacagcttatggctctttggagaattaaaggagataatgtctgtaaaatacctagcgctgggcctggcacatagcaggtgccaggacacatttgctgtttgttggtgatgataaagccacacaagtatagatgtactcacataaattaacagctggtgcactgaaactacttcctgagttggccctcaatctaataccaagtttgttttctcaccttcagctaagtacaactggtctcttcagaagcccttgtggtctcttgtaccttgtggtacaactgtggtctcttcagaagcccttattcatgaacagccaggccctgggctgactttgctacagggcatccgtctctggccctgtacctgtttctgtcctacagacggatcctggggcagttggtgggttttagcagcaccctcctttagaaaaagcctctgtcgtctgctcagtctctagaaagaagagatgtctcctctcccaggatgcatgcatctctccccacgggatgtacaggcgttgcctggaggtattccttgacagtcgtggcccagactctcttgtcattcaaagaaatgggaagctttttgaggtgggagggtttcagactcccccagagagcctagcccagttgctgaggacatcttcagatctgaaagaagataagacaggagcatcctgagctctggggagaagacggcctgcagtgtgtgtttctccatcactcacgtatggaatcccttaggccctgagaaccagagatgaacagaccccaaggaaggcctggcagggcaggcagcagtagccaggagaagggagtcagaccaggaattcaggcagagaaagggagagattgtgcactttcctgtgcccggggccactgggaaggcttccctcaggtgggggcagttgagctgggccttgaaaggtgaatgaaaattagaaatgggggcaggaggggagcctcgtggaagcaagtgtgtgactgtgagaaaggcggggcatgcactgggaagagtaaaaaaggaggcgggctttgtgactgttccctgtgataagctccaggtataaaggtgaggagtgtgcagggacaggtaggacctactgatgggcgaggcccaaggctctggacttgttctgtggccacaggagatgctgaaaccaggagtgactggatcagggcagcttctgaaattcccccagctacacgtggccaagaatggtcactgtgtactctgtacttttatgtgttactaaagatgttgctgggccgggcgcggtggctcacgcctgtaatcccagcactttgggaggccgaggcgggtggatcacgaggtcaggagatcgagaccatcctggctaacaaggtgaaaccccgtctctactaaaaatacaaaaaattagccgggcgcggtggcgggcgcctgtagtcccagctactcgggaggctgaggcaggagaatggcgtgaacccaggaagcggagcttgcagtgagccgagattgcgccattgcagtccgcagtccggcctgggcaacagagcgagactccgtctcaaaaaaaaaaaaaaaaaagatgttgctgaaaggagcctgcaagcggttatgcagacttctgagcaggggctaggaaggagggcacagaggaagcaacagcagacagctggtgagggtgggagacccactggagatggacatattctgaccctcagatgcaggctcatttcttgttagctcgtgactccttactatgagagctgtcatgcaaaggaaaaggccctgttatggggccctgttttcttataacaagatattataacagtggggatgactcaacaaggggatgcttcttgcctgagggaaatctaggaaggcttccaggaggaaggactattcagattgaggagggaaatgagggggctagtaaaaggtgcaaaaacagttgtctaggggtgaggcacactttcagatgtagttgggtcaacttgagcaaatgacttagctattccagacttgatttcatctataaagtggtcacagtatctgccttgcctgtttgttgccatgatcatgaaatcagtgggagcagacctggcttggagcctgcaccctggagggaggtggtgctcagaggatgcactctgctttcgccttccttgttggtttggctgctctggagccaaagggggcttctctggccccaggacctctctgagactctatcttcacctctcccctgctaggaaattttattaagacattggataaacagatgacagctctgagggaaaacttctcagaaggaaggggacaggacactaagtgctcttctggctgggagccttttaggcagtagggggagctgggtagctcttggggctttggtggtgtggactgatgcaaatgtgggcagacggggtggtgttggatcgcctggcctgtgtgcacggcagagctgagcctggagcctagggcccagcaggggatggaatgagtcagggactttccaggttgggggctgctgctggggacacagtaaaacctcttcaccagtcctgcaataaccccagacagtatcctgcctgcctgtacacagtaggtgcctgacacagtctgcagcttagtaggagctcagtagttgtttgctaaaacagtggcgcaggctgcaactgccaaggactgacctggggtctgtgatgccttagggtggaggatgcgaggagctgggcaggacctaggtgggactccagggtgtggctcttgttctcccactggcttctgttcatatttacatcgggaggctgtgcagcctcgggttcctggcctcagctggattagcacctcttgctggtggctgtaagggaaggaggtgtgacggtatgataccctgcatgtggtagagactcagtaagtggataccattgcggtggcttctctggtgggatgggaaaaagggtgaccccaggcaaaaatacctggttggctgggtgtgcctttcccctaggggtttttgtttccgtgtttaaatgacccaaggatgaatctccaggccagcaggtggggcaggggtttgtctgcccccaggcttctgggcgcaatcgggaacctgggcagctcacacagctcaccagcctgtctcctccttccctgcacccgacctttcccttctgtcctgccggactagccgggtgctttccagaagagaaaacccgggactgctgcctgggaacccagtgcccttctcagcttaggctgtctagacccaagtcggggtggggagtcgggttaggggatcatggtagacaaacccctggccttgtctggacctcagttgtgttcacttgttaaaatgttggaatggaaatgtggggaagggagagcgtttgccttggttgggtctctgggctgcgctggtctaagcccgacgaacccggggtggggccagcgggccaaactggaatgcgccgcgagagccgggccgcgggcaagtgaggggctggcggggccggtggggacccagactcgcacgaaggtggggaaggagttgcaaggcagagacccccgaacccctgctccagggcctgcgcgtcccgcccgcccggcgtgccgaagcgcagcggcgggtcgctagcgggaagtggctgcagctggaggcagctggccgcggaatgtcacccgctgccgggcctgggaagggctgggcctactgctgtggggtggggggcgggtgggagggcccggagggctggggctggggcgggccgcttccgggctggagagggtttggggcgtggcgcagcccgacgttagtccggaatgctctgggagcagcgctcgggggaggttaccttggcgcgcccccaaatcttttggttcccccgctcctgccttccactgctctggctgacctggctcagaccagcttgaaaaatgcattcattcattcagtacatctgtcgagtgtctactctgtgccaggctctggttcgaggtgtgctgggcttaccggggcgtgcaggtccctgttctcgtggaccggacattttcatgataggtaaaagacagaaacaaacaagatgacttcagggtagttctgtggagaaaatgaagcagggtgataacttgggaggtgggagttgcccctttagctagagagatcagggaaggcctcttcctgggacgggactttgggtctgagaccggaatgaggaggaaccagccttgcccacggaatggcaaatacaaaggcccagaggcggggcttggggcaggatatgaccttgggcggagtcagtatgttaggggaggagcctgtagggacggctcctccctctttcttgacccagacctctgtgctctggcctgcaccctgcccagaggccccagagggcgacttgccatggctggaagcgatagtttgctttcaggagtgtttctcgtcttcttggacctggaggttgtgccatgtggttacctgcatggaagacggtaattttccacttgtttcctgaaggacacggaaacctttagatgttgtcatcactgtgtttatttaagtcatttttgaaatttcagcttggaagacacagattcagcacgtgcctttcgggaaggggaagccctcctaggctcacctcttagatgccggcccggccgagaggccccctaatctgtccagaagagctgcctgggtgagcaccacccttgggaatgggcctctgtggccttggacttcttagtgacaacttcggcaagatcctgggccgggccggaggggctgctcactggagacctggccatcttcggaagccagatctggctccagagcctcgggggttgcaagtgcccagaaccaggtcagcagagaggcctgcgctcccaccacaaaggtctgtttgaagtcctgtgggagggaggacagacaccacaaggaaacttcctccccggtgggtgggtctccagccaggtatggggtcagacaggctttggtcgggctggagggtgaggagctgtttctccaatgaggcctggtcccaggactgagtcctcagtgggcagggcttgttggtgtgctgtgaaagtgcaaggcttgggggactgaatgggggactcccttggacatgggaggaagagtgaaggtgggggctggggttgctaaactggttcctcctccagggaagcaagccctgccctcctggagcttccaacctggaggtggggaggtgggctggggggaagctttagggcacagctcagagaaggccaagcaggcaaggttgtggggcacctggaaggtgggtgtccagcggcctggctgctgacctaggctcagggaaccagcatttggtgggtgagctgtgaggaacgggccttgaccctaggctgcagggctaatgagggcctttagccagaggctcccagcacaggtgagggggaaactgccggtgcccctgtgccctcgcgctctcccagccctgcctctctgagacagatttaataatccatgtctgtctctctctctctcagttagtattgcaggagggaagctttacttctaaaacttttattgatccagacactaataaaagtaaagggtttttttttcttctttcctgctagagcaaagaacatcagacatcagagccctaaaacacaaatgtgttttcctcctccctagatctgggagggagttgtgggttggccttgttcagatctagcctcttcaagaagcctccctaacttctcaggcctgcagtcatccacctgttccagagcagttaaacgaaactgccacatgtgcctctgtctgaccccagaaggctgggctgtcacagaagctttccttcccacctgaggtccccagggttagggagagacgccatgggaggcattcaagacctggctcttgatttcttgtgtctctcagggtttggggtttggttctttggctgctctggtctttgtttttgcatcttgatttcatcaggacttactgagctcttatactgtgtcagaccctctcttaagacacagaaatacaacacgtagagcttggccacacacagcttaccttgtgatgggagaggcagataagaaataagcagagaaacaaagtgattctgctttgggaaacatagtgaagttcccctactgaaatgtgagtcagggaatttctgtctgctttgttcagcacctgtgttcccagtgcctaaatagtgcttggcacatagtttgcacttaaatatttgctagctgcatgagcaagatgctatgaaggaaacaagccaagtgttccactagggagtaatgggggcagggcaggacctgttgtagatggagcagtcagggaaggattgagttgcagaagatgccagaagcctgccagtttgctgttagagtgtgctggagcaagaactcctagcctagggagcagcaagtacaaagtccttgagcaggaaacagagactttggtgtgtgtggtggggggcgttgggtgttgctggatgaggtcagagagtaggtaggtcatgactgccaatgtctttcacctgggtagcagttcagatttattcagtgcagtggggagtaattgaaggcttttaaggtgaggagttcagtaatctgatttgcatttctgaagggtccctctgactcccctggtaggggtaaggggaagcccagtggttggggaggctgcccggacagcaggctgcctggggaagatggagaggagtaaacaggtatgagggatttcagagggggtagcagcaggatttgtgttggattggattccaaaggccagggaaaggaagggctcctggctttgctactgaggctccacgctggacatttcagacgtgaagctccgagaggtgtcccagaggcgctgtcaggcaagcatggagacacatgggtccggagctcagaggaggatagggctggggatgcacttaggagtcgtgagcatgctggaggtatttagagctatgggagtggaaagaatcaccaaaggaaagtgttgtgctaaggaagtgtctccgaaacagccctgaggagctccagcactgggaggaaaggaggtgaggtgctagcagcctgtgagaacagaggaaagctggagcagggtggcctgggttcacggggtagtaaggcacagaaactggttgactttggcaacatgaaggcctttggtgtcctcaaggagacccagtggggtcggaacagacaggtgtgttgagtaggaaaaggaggtgagaaggtggcggggacagcagtgagcaaagaagtgcgtgaggacccagctggcccaggatgttgaggaggggagggccagggaggggcctgaatgttctctgtccacagcgtaggtttaccagcagcagctgacccagtggatctcagcctggagattctgattcaggagcgccgataggccccccacagtgatctttcccagctctctgagccctctccacccactctctggaaggcttgctcactgtgccctgtcacgtttttggactgaatgctgagtctgttgaccctgtgttccccccgtcagcccctttccttacaccagtctctctgggtccacggcccctaaataagagtatcctggagcctggcttacctcaagtgtctttcccagagcagagctagacttcctttacaccaagggtatttctctggaaggctcctttatgtgtttggcttctggagaagtttgagatgttttacacaatattttggtggccaggagctctaaccctcacccccaacaaccctgccccaagactttttgctggctctggggagggttcagaatgcatcggcttgagggtgcagggttggcatacacagctggagataacataatgtctgctagacgcctggtgggtttcagtgtctgttgaatgaatggcactcagatatttgagtttggggttcccagttgctttgttaaatgcttttcctggttaaccagtgtttttacatctgttatctgcaggggatagtgtattacctcattttatacatgaggaaactgagactcaggaaagtaaaaggatttgtccagggttccacagttgctaaatgacacgaccagaattggagcctgggcctgcaaaacccccaaattgggcctcttcttactgactaatcctgggggtgaggtagtaagggtggaggttaaggcacccaggtctcctactacctctcaagaatagtggccagatgttctgccagggctccaaggcattccttctgcctcccacccacctgtttcctctgatgctcgacaccccctcctctccccacatgcgcaccagatgcattcggctccaggaagataggatgaggcaagccttgaaccttgtcaaaccttggggatgcttgcggcaaagcctgtagcttttggggaggctgtttctgcaacaggcgtgtagggtggccctatggctgatgcagaactccccataggtaaggtgagctcagccggatcacatgccatgaccacacgtgagcatggaagacaaacccagagaggtctggaggcagggcccctcccggagaggcaaagccacttatgctgcctcctgacagcctgtgtggctttaggctctcgcttccctcctgctctgcccctcctactcacccagcagacttgcttagtctgggcttgggtagccgagacaggttgttttcaggcctcaaaggatttgggccacagcccagcctttctcagtgtttctcaccttctgtccttgtctccttatgggacggagcaggcatctggaaggtggcagaggggtgatcctgcctggaaatcactgagggtccttttatagaaagaaacaggctgagagaaagaaatgacttggccacagtcactacccaagaggctagtttcctgtttgtgcctccagctatcctggggcagcttccttcaccccagctgaaagcaggcttttgttacgcgctcactctcagcaaggctttgttctgtatcctctcggcaatcctatgaggtaaataatattatgtccatttttgaggaggaaacagagaggcctagggaggtgacttaacctgtccaagaccacacaggttacaagtggcagagtccgggtttgaacatagcctggcttcagagctcattttctttaccatcaggctacacattctgaaacttatttggcttccaggcatcacagaaacagagtgagggtgctaaatccttgaatgactcagcccctgtggagttggacctgaagacgcctcctggccttggcttttctgaccaaagatagccacactgggcagggcacggtggctcatgcctataatcccagcactttgggaggccaaggtgggtggatcacctgaggtcaggaatttgaaaccagcctgaccaacatggtgaaaccccgtctctactaaaaaaatacaaaattagccaggtgtggtggcccatgcctgtaatcctagctactcgggaggctgaggcaagacaatcacttgaacccgggaggcagaggttgtagtgagctgagattgcgccgttgcactccagcctgggcaacaagtgtgaaactccatctcaaaaaaagaagatagccacacagcacctactgtgggcccagccactccaggtgccagaatggcccacgcttctctgagggtgccgtagaccaggtgctgagacgcagacagtccagtctctcttcccttcctctccccatcccactcctattccagtaactaggcaggccctgcccacccttgccccaggagaagctccactcttgtggacagtggaagggcctcggccagcttgcctgagtcctgggcttggaaggacggttgcccccatctgccttggttccctgcacctgccttttcttccccgcatcctccctctgactgcccgcttttctctgctttcaccttcccctagtgttcctcttctttcgtgttgtgtcagaagccatgatttccagtcttctcatctggaagatgaaggaaaagatagacccgaccccacagggttctgaggctcaaactgaaagcctggtggtggggcacctgtgacaggtgagactcctcatcttgcccccttctttcttcatcatgaagaagagacactggaggatgtggagcagttggggcctgtggtccaggtgggatggagcagtcagggcctcgtggagggagcaggtgggaggaatactctggctgggatggacctcacggggtgtggcccagctttgcagctgacttgcatgaagtcctggcgagctggggagcccttgcaccctcagcttcctcatctgaaagatggggcaatggtaatgcctgtctgtggagtggtgaggaacaaatgagactgggccacaaagtacccagtgctgtgcccagcacatagtgcccaaagagggctgctatctcatctcttattcctgagatttagcttccttgttttgtttttgagctctttgggaccttcgtggactttgaatttttactattgttcattgtgtctaaaatcttcctcagaagccgagggcctctaacctgatcatgaattttggagtttcgttttttgttttttttttctttcctgtttcctgtataggaaaaagggacctgtacctttaagaccccagcaggcccaagtaggacactggccctttaaaagcacattacagagagttggaacatagcctttgttgaactagccatgattagtcccagcggacagggctggagtggcatgtctgggatcagggcggggctaggctggccggggccagccaggagcagcggacagcaggaaggctcgcccggccactcggcttcccgagcctggtggctatgctgagggatggtgagtggcctgagcggagcttagaataagagaggctgggaaagccaggagggaggcagccccagagcccagggagacctgaatgagctgggcggcagcagacaccctcagtgagtgactgtcacaggagctggtcccaggagggactccggagcaccctgcccctctacgcagacatccactgccggcccagaatgtagaaacggttaggagggacctgtgaaaaagcgggacaccaagaagagcactgttgctgtttttagtttttaaaataagaggaagcccagtgtgagttgctctgtcccccaggcgcggtgtcccctgtggtgtgctccgttgagaactgggaaatgccagggactgctgacaagttttctgagctgaggagcttggcctttgctctgagtggccgaacctttggctggctgggtggggctgcactggggtttgggggccatggtatctctgccccagctcctcagcagaactttgttttttcttctcccttcctgcttccactccctagtccatggggcccaggcccactgggtggggtggaggcgggtgggagactgggaagactgtgtctgggccaggagcgtgttttggctctgcttgaatatttgaaacagttgtcagaagccagatcactttggtgtggtagcgtctttactgggcaagtacccatttctgaaaaaaagtcagaggaaggattgggcttgttacagccaagtctcagtgcaggttggtcctaaccgccttcattgccacggctgggggcggatgagactgcctgccagtaggtgtcctcactgttttacagacagccacccaggaggtgacaaaggcagggctcagtacatttctggtgacccaggcttcctgtagttacttaaaagttggtgcatttggtcataggatttttgtaggtttggtgaaaacctgaggcattgacgggcagtgaagagagtttgaagttagagccgaagtgccaggtgtcctgttccacccttgtgcctgtgaatcgtgacctcaggcaagctgtttgacctctctgagcctctgcttcagagcagagggcgtgtgcataggcgcaaaccctggagggagttgtcagttctgggggaggctttgtggaggtggtggcctttgagccaggcgtagacggataggctgctggagtgcaaccccttgagcagaggcgtgcagtttagcatgatgagccagatagggccaagcagggctggcatggctgggttgggacctggaaacgtagcttgggaagctggattttaagtatgttgctttctcagttggaatcctgtgggccaggtggcagatgacagggctagcttagcctggagtcagccagtgtggaatgtgggggaaaagggcagacggtgaagtctgacacactggccttgggaagcccctggaggtgtcagagcctcattctttgctgcagttagctgtgtgagggtcagaggtgcagagacagccctacgtgcccttcccaggtatgtgggctcactgtggtgtggtgggtgagcaggtacttgagagccacaggtggctttggtgcatggtcactggcagcaggaggaactcagcagccacactcctggttttctttgacatggtgtctgagtttctgcccgtgccagtggcctggaaccctgtggcttactgagagccactttcctgctgtcttgctgctgctgaacactcctggttgtctcctgctagttacagcctgagaagcagctgctctggtgccccacgcagacttccagacctcaggctttgggaggaatgggcagctgacatccctaggcccatagccccacatgctcctgcagacatagtggaggcgctcagtggctgtgctggtggctggatcaactctgcccaggattggggcggggcgggggtggggggtggggtgccttagcatgatacatcttcagcaaattgtgccaggaggcaagggcaacccacttgacggggtaggatgctgaggtgcaggagaggcccatccgaggtccacactcctttggcccagtgctccttcccttcacatcttcacctcttctgtctctctgagctcaagctgccaacaaggagggagcctctgtcccaaatggtggctggaattgaagagatagctgagctggagtgaccactggggctggagtctagggtgccagcatttgttcgtagatttgtccatctcttcttaaatgggggtctttcagattcctgcttaaaacggcctgtactctggagcctgctcttgaggtaagggggtagagcaggtgaggtggtctggggtcagttggcagaggggctttttgagagctcagctgtggggggagagtcaggaaggatctgctgggcagagtgagagacagatcttggaaatgtcctgggcccaggaagaagccaggagcatccagagaagtgctggcaggaagggcgtgcgggaagggacagaatgccccgggaaggcagtctcagcccagcctggatggtaatgggggcagccagggctggttactgaggctgtgtatggagagctcgctgcaggtcagttgagccctacagccaaaggtggtggtgtccctgttttccagatgagaaaactgaggcacacaggttaattaatttgaccaaagtcacagagttttgtgtgtgtgtttttaaggaaccatgcctgcttaccaccttcaaccagcatagtgccaggagctggggctctgcggacaaatggctggtccttggttgaggcaggaaacctggccctcaaggatgagggaaggaggccatccctagatcaccccaacatgaatggcccacctggtcccaggaagtaacgtggcatggcgcccaggtcttgggtggaggagatgagatggaagaagatgctgcctctgcccccgcattctagggggggcccagcatgagctaaggagggcttcctggatgtggagagctgggaggaattagataagccagaggggaagcacttcctggagaatggaaatactcgcttttcagctaatttattcttttgtttcattatcatttcccacttgggtctcgcatccccagggccctgaggtggctgttggaggtatttatggtcccgggtggggtgcagggaccagttagaaaccagtcccactcaggccatgatgcatgggtgtgttcacatgtgaggaggagccaggcacagactgagctcaaggagagggaacgcatgggtcagggccttgaaacattctcaggagtggtgctgagtggagagatgggggagggcagtgggctagcatgtttgtggtgggctctagagcttgggagcttcagagttgctgcagttgtggctggggttggagccccaggtgctgtgcagggaggttgggctcttttcctggggctgggggtagggggactgtcactctccctaaactttctgagcagccaggctaagcctgatagtttttcctacaggccagggagggctgcagggttgtccctgctcagaagcaagaggggcaggggcagctagcccacagctcacttctgatttgcccaccactcaccctcgtcaatgagtgttccttagatgctttttttttttttttttcccctgagacagagtctcgctctgtcgcccaggctggagtgcagtggcactatcttggctcactgcaagctccacctctcaggttcacaccattctcctgcctcagcctcccgagtagctgggactacaggcgcccgccatcacgcccagctaattttttgtatttttggtagagatggggtttcaccgtgttagccaggatggtctcgatctcctgacctcatgatccacctgcctcggcctcccaaagtgctgggattacaggcgtgagccaccgcgcccggcctagatgctcttcttttaaaattcagggcacttcgctgttctgctgaggtttatgaatgtttaaaaactgctttgcggtccccaaagtaatttgacaagtctgacagctattgattaaaaacccgaaattattcaggctgcaggatgacttgggggattagatggaaagttttttgtttcttctctctctctctgcacccctcctcccccgcaaaaaaaaaaaaaagaaagaaagaaataagatgtggaaaggtaaatgtgttcctgaatgttttttgaaaactccattaggcttgcacagtttatacggggagaggatgttgaaggctgcctctcattcaggagccagtaccagcgccctctcgaatccctggtctctccggagctttggcccaagtcaccccaggcagcagtgagatgttgctattacattattacaggtgatggtagtggtgttggtagcagttatgatagtttatggtcccttatgttctagggagttgacgtagggtttttgtggctttctctgaagtagctcagcgtgtgaggaaatggcacctagaagggggaggaaactcgttcagggtctgtgatagaccttagatacagctgggatagagaccaaagactccttcagggagaggaacgggccgttgctggggtgctgggctgattggatgcctggcctccaggcctgactcactgtgaggtaggtgccaagagtgtcccacagagggtgaccaggccgttagaaccccagctttcacttctggaccatgtgacctagccaagccactccctgtctctaagcctcagtttcctctttagagaacgtcctaaagcttccattgagccttttggattaactggctcatgtattgccccatgagccagggcttgtgggacctgagcttgaatacccactctccctttcttctggggcagtgctgccttttgtgcagagttgttgggagaaggccatgagatgatgtttgtactttggtgagaacacctgcaactggcacatggtaggtgcttagtaagtggctgttaggtccaggctgccacagtgtcattcatttagtcagcctatattgggcaccacgggacaccaggcctcacagcaagcatgagctgtcccatcctcctgttttggttgcagggtgtggaccctcctctgccagctcagccctgtgatgtggggggaagcacaggctcccaggggtgagggcagaaggccacgtgtctccctgtctcacagcccagggcgttctgtgtgtatgggggcgtcacaactgggtcttggtgactgctaggacctaccccttaccttggcctgagggaaccctgggttgagagggaccacgcctctgggccctgtcatccctggaagacttcccaggcagggcagccaacctttctgcctttttaggacaggctctgtctccccagggccctgggagccaccaggcggctgcattcctctcctctcccctgggatcccagctgggccaggagtgagcactggccttctgagcagccggttcccaggccagcggggcaaggctgggcttggggagagagctctgctggacatactaggcagggcgctgccctgtttatgtcctgccgtttgattcccagcaggtcagtgcattcattgtgaccatgtccagactctctttttttccagtgtgggcagacgcttctagcacagcctctggacctgcctggctatgacaggcagaagcatgattggcatgttctgacctgatgaggcctagagagtctgctgaagtcctgactgcagaaccatcaggtcctgccagcctttgggtgggcaccaactctgtggagacaaaccttgtccaggatttctcttccttccagacctggttggggtagtggacagtggcttgggaccacacaggctggtgggctggagactggggctggagatggctgtgcttgggagtcccaggcagaggggctaaaggggcctcctcacgggggtctactgcccactgctaggcacaccttcttctcctttcatttcgcctcaggaaatgaagggctttttaaagaaatttgaggcatcccagagcatttgggcagatatgattgatccccattttgcagatggggaaaactgaggcatggagaacgtaaagcgtttgagtcgtcacgggacaggaacaggaaacagcctgggaagtccatatcttgtcactccaaattgtcaaaagtgtgacctatcccagaaatgtcagccttgatagcagcgtgtgcatcgttcaccagtgttgttcatagctgtgtctccagctcctgacatcgtggctggcaatgaggtgggcgaatggaacagaccaaagaggcatgaacagttatgagcaatggatgggagtcactgacacccctgccctcctgagcctcccgcctgcatggtctcatttgatccttagagcaacccatgaggaaggtgtgtcgttatcctcactacggatggggaaactgagtcctagagagtcgaatgacttaaagtatccaaggttgtatatttcataaggaatagagactcggtttgctctgcagccaggcacccttgacactaggccctctgtcctcctgcccgctcgcagctgcaggtgcatttctgtagcattcacttgtgtgcgcgcgcgcgtgtgtgtgtgtgtttaatcccagggcccactgcactgcctgcctttgtgtactgcccagcccattaccctggcagccctagccatgcagcatgtcttaaaggggccccccggctcctgcttgcacactttcagagacagggagcccactctctctaaaaccagacgagcctggcccattcaaggacagctgtgactgagctggaagtggcctctcctggtcccagccttgccctttggggccacacagggcagctccctctgagctttcgagatttggagggtgaccctgagccccttattttccgaccaaacaatcccactctcaattccccccacccaatagttgggaacacccttgctgtgtcaagtagggatttttaattactgtaagtttcggtttggggtcctttccctccttggaataatgagtttgctgagcttttgtgtcaccgaccttttaagagaaaaaaggatcagagttgaaaaacagcttgtgggttggctggaacgctatcagataaggctaggccccaggagccaggacagtgtccccattgttctgccaccagccctcacaatgagctgctgttgggccctggcgctgtctctcatagcagctccccgtgccttgtgcccacgtttcctgggccctgggcaggggctgccccatccctgtatcccccggtccttccttccccacctggagtgagtgggtcacagctagtgggttagctggctgtggacctttccctgctgcccggctgctgtggacctttccccctgcccggctgctgtggacctttccctgctgcccggctgctgtggacctttccccctgcccggctgctatggacctttccctgctgcccagctgctgtgggccacccctggacgatggaaaggccaagccaaggctggtgcagttagtcttgaactccgctgaactgggttcacatctgactcggccacttgctatgcatgtgatcttgggcaggtcacctcaactttctgggtgcacctttttagtcctgacaggattgtcacgagaattaagtggaacaggtgggagattgtggccctgagccgggcttaggtagcgtagtgtgagctgtctgtctggagagaccagggaccactttgtggtggtgacattgggctggcccttgaaaactgaggaaggactttgtttggcaaagaagtggagggagaggcagaatggacaggctcaggagactgcttggacatggacccctggaggataagagtttgcagctttgtcaggaagtagctggggaggagagtccaggtcacttgtgcgaggggcctttcaggagggctcggacaccagcttgaggcatctgggacttgattatcttacaggccatgaggcgagagaggagggacaggagtgaggccatgccaggcggagtggcttgttcagtggagggtgctgctttggtctagacaggagaaggccagtggaactcccattcccctctgccctcccatgccctggccaagctcctctgtagcagcggagtccagggcaggtcaccctagccatggccttggctgtcccgtgtgtgacctggatgtcatggtgccacctccttcctgggagcagtaaggattccatgccatggaggacaggtaaagggtctctagtccctggagcgctgtcatggggctagtgatctgccatgtttagaagggtctcggctggggccgtggggagcagtgtgcagccacagagggtaggatgagcctcctaaccttgagagggatgggggaagcggcccatacttggacagagcaagggcaggggcatttcccggagactctggaatgaacattggaatgctgctcttgggacttggccttgaacaggcagctgccctgacgacccaccctcaggccttcttcgtccctcctccaagggaacaaccacgtcaccagggtttgcaggctgagggagggctatccctatccccactgacctcccgttccctctgagcttagctgaccttggctgctggtgtgttggggttttggtccaggaactctaaggctctggaccttggagccagccagacccaactttacccacaaggagccccctgcctgacaaggagccagttctgtgacagaccttcccagcacagcctggatatggctgtctgcccagggagcccaggaaggcttcagggaagaaggggcactgaagctgggtgctgaaggttgggtaggaaggggaaggacagcatgtgcctggggccctgcctgagactcctgcttcctgggatggaggggcccagcaggcaggccgctgcgagagtgggcctggtcaggtggagcagggaggtagatgccagccagtggctcagagtgccaagttctggggctggcattgaatcccgtgtggtctcaagaggggatcccttcacccccacaactcaaagggctgggaaatacctccccgtgaaggcgctgtcttcacagcactttcagcatgtgccggctgccagtgttttctgggtgaagcaagccaccttcctcctttttcagatgaggaaatggacccaagaggtttgggtgtcgcagcaacactagatcaaagatgggatgctggggcacatctcttgccctccctggcaggcctcagtttctcccctgtaaagcggggtgaggtcagcatctgcctcttgggctcgtggagattctgtgaggtgacttgtgtggtggttcatgtgacgcatggcccaaggtaagcccggcctggggacgccagctccaccctggtgggaggcaggcagtgtggagtccacgccctggtttgagacctgcttctgtaggtagtagaggtgccacatcctggcagggttgttgtaagaagtagctcagacctgggccgtggaagtgatttgcaggggtggaatccccatgtgaaggccttttgccctccttggtgccacctcgcctaggggaccaaagctctagtctccaaggaccacaagaggtcagaggggaaagctgtcatgagactgagctaggcacagggtcgggaggatgccgtgggccatgcaattgggccaccttctcttccaccccagccttgggcagcagagagggacttgacccagggctgggggacggcagaagccctgaatacaggggcatcagcccccagataccacaccacatagggtagctgtgggcatggctcctggactgacctggttcccatcccagcagggggccttgggcggctcaagtaactgctcctccctgagcctgtcatacctttctgtaaaatgggtagatgaatactcctggcagggctgtgtgctgttgaaatatgaaaaaagggatgtgcaagtgaccagctgggcgctcaccttgtgctgactagaggtgggtgcctacaggcatcccttcctgggagtggaatgggagtgaggtagagaccagtgcctgcttccctcctttcacctgagcgtcccgggtagggaagctgagcctatccctgcccctttggagcctgggcagtctttggtacccatcttctgccctgcctctaatgcgctgcttccctaggctggcaaggcagaggctggaggtgaaaaaggaagtggcccaacaatgccagcatgggatgaagccagggtaggggagaagcctgccttgggtgactgatggagcaagcagtccctgctgtgaagtggccagggactgctgcaagcacaggacagggctggcttcccagagaggtggttcttgggccttgaattggtcctgctgggttcaggaagtgaccaaatgaccatttttccttccttagccccctcatcttatcagctaccaccatgggcacaccctggcagggtcacagcagaccagctccctctgggcccagatgagggagggaccgaggacactgtgtttcagggcctgtagactccaggctggtcaggaaggaaacgcataggaacgtgagtgagagagtacgggtccactggccctgcctccaccacccacccgcttgctgtactatccaggaaggagtagcctgggagagcttgcgggaaccacttggggcctccctgggcctgccctgcccctattcctcttcctcccagagagcttgggctgcagggatggatgcagcctctgctttacatcccaccccgtggagaagctcccagggaagcggggagggtcatggctgcccaggtaggccgggccagtccaaggtgtcttaagggccttgagcttccctacagccctctcttctgccaggatcctttccaggtcagccagagcatgcttgtgggacatggtggggaaggaaggggagggctctgcaaccacagactccaggatctggctgttttggggtctggcctgggcctgctgggctcctggggttgcaggaccagggtctccttgggtttccctgggcaggcccagcctgctgaagcatgcctcgcctctcctctccacagccagctcattcatgcgccccaggcaggaggcggcctcagctcaccagctccccgctctgtacttcctgggtccctaccccaccctccctggctcccagcatccttacctggcagagattttccaagctaggccagaaagcagcccaatcccagccagtgtgacttccctactatcaggcagggcgtctcttccactgaggtatgaagccccatgtgggagggaggcctggagtccaccctgggaggtgggcggctcaggtggaatctcagcccagggagggcaggcccacccacggcactggtcattgccgtgatggggaggaggccaggccgctcgagcaaggccttgagggattatcaggagaagaggcctgttccaacacagcggtgtggcggtgtgatgtggtggtgtggcggtgtggcgtggcaggtaggccagtgcccctttgtgaactggacctcccagggagagtgcctcagaggagcagaggcacatgctgggcttgtccatgggcttaggccacaacgggaagccccaggtgggagtccttgtgggagttggggagggttcccccctgtcttgaacttgtctcacagttttcctctggctctgcccattccctctgctttcagaggccagcttcgtgctgggtgtggagaggcagagggagccggttgactggggctcctgggctggcctctgtggggtatctaagggttgggattccctcagctctgactccttacggcatctagcatgggactccatgttggggagggctcttatgctcagagggctgttgccatggagatgtggagcttggggtgggagggtggctactgtcagcctgagtccctctgagcagggctcttcctgctcacctctggattcttgagcacccatggagtgggcctcagcccgctgacccggggcagtcgcagaaatgagtgtacagggtatgcatcctacagggaagtgtctggtggctctgccaagctgcgagcccctcaaggtcagggaccaagcctcagcatagcccaaggtaggggtcttggtttggcgaggcagggagagaatgatggactgagcacttggaccattggaaccaggagccaaagggcatagggcgttgggggtaggaggtccatgtgggctaagcctggagtaggtttttcaccaaccccagggtttgagccctggacacaagcagggctcagcttctgcaccagagatggtcttagcaggcccagcctgtcctcacgcttttcctctgtcccaccgtgggggctgggggctctaagaggacactgctctgtgctgctgactttggagagactttacctaaccctagagcaggtgtcatctgcggtgctttccctgtgatgcactgaggaaacaggctcagaggagaacgatttccccagggccacacagcaggggagcagcgggcccaggtctggtctgcgtttgggtgccgggtggcatcagccctgtgctctttgtgcctgtgtcggagccactgacctgggccctgagtcccagcatggggaccccgatggagtgtgtgtcttgggtactgtgcagagactgctgcatcccttctgcttcgagactcgcctcgcctcgctgtcctcatctgtaagatgggagcagcagggtccctgtggctttccctcgtgtgggtctgctggtgtgggacagtgtatgaggaagggctgttggcagtggtatgctggataaatgttggggcagagtgactgctcagtcttggacaaggaccagtgcaaaagagaggggaaatgggaaagcgcccagaactgcagacagctgcctgggtcaggcgggctttccttgggtctctgagacttctcaggagccaagctggcccaggccccgcaggctcacttgcaaatattaaccccggagtggcgcctaatcctcaccttcttgctctctgagaggctgagcccccagccagactcttgcagtcgggaggaggttcccaccagtctctgtgacagccctgcccccagatctgtcttaagacagaaaggagagagagtggagaggagtggctgcctgctggaaggggcacggccagggcagatgggtgggacatggcaaccagcttgacccgggctgtgggggcccacctgacacacctactgccaccccaggtcccatctgatgccgaggctgaaggagtctcgctcccacgagtccctgctcagccccagcagtgcggtggaggcgctggacctcagcatggaggaagaggtggtcatcaagcccgtgcacagcagcatccttggccaggactactgcttcgaggtgggtcccatcacaggggttggggtggacaccccatcctctcctggcctggctggtctcctccagacatcctcctggagtccagtctgctgtggcctcagcaggggccagggtcttggggacagtggctagtagttaccgatagctttcagctcctaagagacctggtggagctggggtggaggctgtccttcctactctctaggttctctggaaatgggccagcacctgttctccatgctagcctgaagctgctggggcccccagtggatgacagtgagtaggggaaaagcctgaatttcttaagcaccagagcccatgtcttagagcctgctcacctcccaaatgcagtgtggatagcagagagtctccccttgtctgggcctgtttcccactgtgaacaatgagagcccaaatctgtcctgccctggcattctgcgacctgaggtttgaatgcagagagccagtgacccacctggggatgacctgtccagtccctcataggaaatgggggatctgaggcccagagaaggcacaaagacatcagaggtcacacagcaaggctgagaccaagccgggagcagggttactattgttgcaggtgttcctgggagttactaattgcttctgcagttattcatattgcttcctaccagtttctgggaagattcctacccccaataatcatgcataactaggagagctctcttgtagaggaatgagcctggtaatgaaaagcagccacttggggactagtgtgacaatctcctggcacccccagccctggggaaaaaacagaatggtgcctggcacctgccccataccctgtgcccactggggaccatttctggttcaggactcctggccaagccaggcttgatctgggttctgacttccttgccagggatagggtgaagatggccctgtctgctggttcacagcagggggttctgtggagggtgcaggccctcgaatgccgtgtgaggagtgtgcttcccctgcagagacccgggtctgctgctggggacagtggaaacacacagcaggaattgcccggactggctcccttacctggcaggagatgtctaagctggaccagaggttgagtgagagtcagacagagagggaaggagaagggtcagggactggggaccctagggcctggcacatccagacagtccgagtctcatttctccagtctggcataaaaaatatcaggcttatattaccattgttgtcactgctgcttgacggaagagaaccctcagagttgtcagctgaggactgaggggattctggtacctacctttagttgtctccttggttcttgtggttccgcctttagggaaagtacgctcgggttaagcattgccctctgacctgggcaaggtcttcgttcattccctcttcccatctcagggagagggaggttagagttaggaagatgctttcctattggacagagggcactgagggacgagtgaggagcctgctcgtgcaggatggggccactctccggctgctgacttgccctgggacagtggctctcaagtgtaccacctgcaaaacatgaagtagaggcgtcatatgagccttgtcctggctccttcctgaagctgtgatgcagacctgatggccagagtcccctgagcctccaaggtcttcttccatcactgcctgcccttgctgtggtcccttccctcataacactgtcttgcctgctccccacaggtgacgacgtcatcaggaagcaagtgcttttcctgccggtctgcagctgagcgggataagtggatggagaacctccggcgagcggtgcatcccaacaaggtaagcctgcgcccctctcaccaaagcatgggggattgaaggtaggctcagataggaggaaacaagagagactatctctgtggtgtgggctgggattgggggtggtcagcctgcatggaggcagggcccgagtggacaatattggtggactctgaaagagacgtttgagttgaccaggttgagacaggtgctgtgtgcctctgttttctaagctacacattgaggctgggcttggggaaatgagtgctggaccctggggtccttctgctgggaccccttgtccctactccccagcccctggctgagttctgctcatcttccccttccaccttagatgtctgcccctcctccaggtgaggacccctgtcccaggctggtgccctctgtgttcccactgcccctgggctcccccattaggtcctgggagcccccactgtaatccctgcttctgtatctgtctccctagccgacttgagggcttgaccaagtcctggtcaccatagccatctcttaagttacagtacagaccagcatattaaggaagagttaataatggcatagcctgtgacgtgtcaggcgttgtgctggcctctctcagtctcgccctctatgagatgggggttttaccttagtgccgtttcatagacaagcaacccaaggctccagttaagttgcttgcccaaggtgagtgagcttctgtgaggtcgaccagagatccagcccttgtccatcatgccctgcctcatcctgacttagggcctaggcgcccgctgccgcctccaccttcagagctcctcctgggtctgaggactctctcaggctctgggctggttgggggttgcacgtggcacccccagctgaccaccctggacccccgtgcacatacaggacaacagccggcgtgtggagcacatcctgaagctgtgggtgatcgaggccaaggacctgccagccaagaagaagtacctgtgcgagctgtgcctggacgatgtgctctatgcccgcaccacgggcaagctcaagacggacaatgttttctggggcgagcacttcgagttccacaacttgccgcctctgcgcacggtcactgtccacctgtaccgggagaccgacaagaagaagaagaaggagcgcaacagttacctgggcctggtgagcctacctgctgcctcggtggccgggcggcagttcgtggagaagtggtacccggtggtgacgcccaaccccaagggcggcaagggccctggacccatgatccgcatcaaggcgcgctaccaaaccatcaccatcctgcccatggagatgtacaaagagttcgctgagcacatcaccaaccactacctggggctgtgtgcagccctcgagcccatcctcagtgccaagaccaaggaggagatggcatctgccctggtgcacatcctgcagagcacgggcaaggtgaaggtgcgtgcaggcccctcggctcctgacacaggctgggcggcagcactgggttacctgcccttcctcacatccgtacatttcaggcctaacagaggccttggaggcaccggtcactaccagaagggctccctaaacccaaaagttctatcgtgggctgggggttttgtactcctgctctgtggctggagctgatcactgaggcctgtgtggagccagtggatgggattgcagctggtagtgagggagtgggcttgggttgaggtgccttccaccactgctgcagaggaccgaccccctgaggcgccaggggaacaggctgggtggccacggctctcccagcacacaggtcccacaacgccaccagccgcagtgagccaaacacacgtcccctgtggggtatggagttcggcagacctccccagcacgatgcacagatgagcctccctcacagctctacctcaccccacactctcacccagacacacagattgtcacacaggtagacacagtcaaaattgtactattcgagggttagccagccccaccccagagcctcacagaagcgggaatcgtctgagacccacccaggcaagtcctagttcagggccagaggtgctcaatgtccatctccatgacccctttcaccttccgctcccgaagatgggcccagcagcccaccatgcaagccgtgcctcagccccacctacccggtttggggacaaatgggctcctggaccagggtgcccctaggaaggcagtagagcatggtctgtgggcctcgaaggcgaccttctctctttacatttgccacctgccattcaggaagctggccaaagagggtgggaaaaaggggctggacttgaggcctctgcagcgtggatggaccctggtgctgggctaaggactgggcctctgccctctggacagtggcgtgttgtgagccaagtggcaggtggctgaggggcaccctgtgtcaaggtcctaggcccttagctctgggtcggggaggcacagttgggagccataccccagggcagagtccagggcacaagactcgtggaggtccctcaccctctcacctgttcctagaggccctggaaggggaggccatggctggaagcctcagcagcctctgcagcccccctccctcttgcacttgctgtatgctgcaagtgcagggctggggcggggacctcctccccatggacccgcgatggggagcagttttcctctgtagtgctcagctacctcctccctcaccttctcccccagccttcagacttggctggctaggctgcacgttgggccagctctggctgccccgtccttaacatgctggtcaacactggggacgtatgctgggaaacggaatgaatcaaggacccatgggcaccagagagggagtgatgggggctgcagaggctgcattattttctgcagttgtgtctgatgtttcagtacctggttcccagggctgggctggggctggcctgggaagcggattcctccctgaagcagcctgaaatgataggtatgtccaggtgctcgtggagggaggtgaagtcagggctgcagccaaccccaaaggccctcagtgggattggggagcagtagatagaagcatagaaagtaacttgtgctgctggggtgacaggtacctaagcccccacccctggaatacttgggaactagcccctcttccgtctccacggctagaggagtaacggagtctgggaagcaagggacttggaccagatctggccccaggtggctgtgtggccttggacaagtcattttcctgctgtgtgtgcattggtttcccccttattgggtcctggctctcaggaagttctcatcccagcactggggcctggctctcattgcgggagttcaggaaggctgcagtcctgagcgggagccctggaggagccccgggggagatgcacctctgacccccgctttagtgtattcagagaatgagaccctggaggtcgcctgctggtcaggaaggggtcctcaggccacatgatccccaggaagccaatgacagcttcccctttgcccctgctgtccctctgtgcctctgctgtgcaccctgggttcctgtgtctagatctcagttctgttttaaaggaccccaaggtcgtgcatgtcggagtgaggaatttcttgagcacagatgcctgggtccacccctcctgggcaccttgcaggctctgtgctaggtggccccctgccctgactgtcaccctcccttgaaactatgacagtttttcctattttcttcccctcccccaagccacaggttagttgtgagcacaaggaggtgggggcttctgagggagggtgttagtatctgcatggttgctagagtagggggaaggtgtgggttcgggctcctgtgctggggttttcccacaacactgtgtgtgggacctgatgggcctggggctgctaccctggattgccaggtgggcagtggcgcctccaccttccctctccagccagttgcacatcacttcctgctctcacctgcctgagcatggtggctcacgacctccccgggcagtggggctgcacagaaggcatctgtgtctggtgtgggagcccccaccagagtcataggtggatactgatggccattcttaccatgagacagggcagcctcatttgtcctctttggcactgatggtgcggggagaggcgagtcctgctgtggtcaccaggccaggcctgatcagggctgtacatggaaatgagtccattctctgtggtggtgggggcttgtggctccacgtggcatgctctcattcaggctgcctccatccatagacccggctctactgtcaccagttctaggctcctaccctggctgggggcccctgccctgcccacactccccagcagcccccaaaggtgggcacactgttcctctccgggacccccgcagcttggtgatggaacagcctcaaaatgccaggacttctctggctaggtctggaatcctagggccctccatgccaggccagctcaggtcctgctctctccacctcctgcctccccaggacttcctgacagacctgatgatgtcagaggtggaccgctgcggggacaacgagcacctcatcttccgggagaacacactggccaccaaggccattgaggagtacctcaagctagtgggccagaagtacctgcaggacgccctaggtagggagtgggccagcagcagggcagagggtggggcagggcccgccaggtcctcactccccactccctgcccacttgtccataggtgagttcatcaaagcgctgtatgagtcagatgagaactgcgaagtggatcccagcaagtgctcggccgctgacctcccagagcaccagggcaacctcaagatgtgctgcgagctggccttctgcaagatcatcaactcctactggtcagtgcggtgcccaggtctccccaccctgtcgccttccccatcctgtccttcagtgtctggcacccgcagtgtgcctgatgctgcctggcccctgagttgtactgacttgccagtcccctggcctagtcccttttgagctctcaggtggggcagcgttcagcatgttgctgtggttttgtgatggaaagaacctggacacgccagtctgccgtctctggtgatgagggagcgcccttcatgtgccgggggctattgtgggtgcttgggctgcagcgggagtgagactggcaggccctgtgtgggcccccacttggggtgggcggatggcttcacctgaggctcctcacctgtccgtgggagctaaggtgctcatgtcacagccttgtgatggggccaagcaggggcacgttgggggcctgagcaccaggcaggcctcttgctgggactagagaataaacagaaaggactagactttgaagtagaacggggtctgcagactctgccagccccagaaagcagcagggcatgcagcagtgggctgcttagacaggcccctcagcaggaccggaatcagtcccggagaaacttgcggtaaggccgacttcacggccaccagcttgctcctgggatatatgtgtgtgatggccagccagcctggtgccgagtatagcctcgttctgtggtggcacacaggactgtgcgggagggccttgctgtcagcccaagcagtgggttcatattcaccccagaggagctgcccaggtttaacctgtgtccccctccagctcagggcttacagcccccacccacccaagcctccgtccacagcctgttctgacaccactctctccccggccttacctcactccttgttaggttcatctctttcactcacctgcaccttcccctgcatacactcctgcccttcctgctccgaggccacacctggtaccctctgtcgcagccctgatcccatcaggatagggttgtgcctgtgcctaaaacatttcctgtgaatgctggggcaccctgggggcaggtgagcccaccacctcaggactgggcacacaggaaggccagagaagtgtttgctgctccccaaggacaagaaaaggcagggggaatgggcaggccaggagggttggcacccagggccttagcccctgggctatacaaggtgcttgcctgggccaaatgggcacctcaagatgggccacaaatgtgcagctttccacacccctgggccggtggaggagagcgactgtagggccttgaactctgggaacacacttcccattcccagctgggctgtgctttccccctccccctcttccaggggggctgggcatgtgactcagggaaaacatatttgtggacagtgattttccatttcctctttctggcatttatcagaggcacctctccattctggacaaggccattgatagatgtcaccactcaacacctgccccctgtccagttctgtgccaggcactgtgagagccacggctaaaggtggctcaccttcattccccgctaggtgtgcccttgatgggtcagccagcatgcattgcaggagagcctgctgagcaggctgctgggcctgtgggggaagaaatttcaagttggtcaagcctgttgtagccttggggttttagccttacgatggctctgtgagcttggcagggcaggccttgctctcagtttaggggagagaaaacccaagccttccaggagggctagggccttggtcagatcaccctgagctcatggcagagccaagtgtagactgagttcacggaccactggggcctggcctgccccaggctgggagatgcatcttttagggaaaaaagataggaaacccacttaagggttggccaggtgggcctgaccatggcaggccaggatgcccagtggaaccaggagccccattgtctagggccagctctgccggcttgctccatcaccctggggcagtcactacctccctttccctccccatgtagagaatggagagctgtgttgtcccaccgtgttcaggggtagtcccatcttcttgatctttctgagcttttaggaaatcctggattcctgtgacattattcaagcaaaggaaattagtctcaaagccagtgatgggaacccaaggaatagtggtctattcctgttttcctcacttccccctagacccagatgcctgctgtttgggttgaaaaatgaagtagacactggcagagaggtggggagggcccagaccagaagctggagaggtggttcagcactggcccttggcagttaattccggttaggacggagagccagctcctcatgcctcctcccatcccacctgcccggcccttcactgagaacccactgcccgatgggagcctgggtctccctgctcctcctcctgcctgggcacttgctccagccaccctgtattgactgctctccccagatggctgtgtcctcagagctcagacagcggggctgacctcacgcagctggcggggtagagccaaggttggaatgcaggttcctgctctgtgcactcctgtcctgggcccctgcctgacagccaagcccacctttgtctgtccctacacagtgtcttcccacgggagttgaaagaggtgtttgcctcgtggaggcaggagtgcagcagtcgcggccgcccggacatcagtgagcggctcatcagcgcctccctcttcctgcgcttcctctgcccagccatcatgtcgccctcactcttcaacctgctgcaggagtaccctgatgaccgcactgcccgcaccctcaccctcatcgccaaggtcacccagaacctggccaactttgccaagtgagtgcctcctccctcaccaggcagagttgggcagggctggtgtccacagggcaggccctgggggtgtttctgcccccaagctgagcagagaccataaacaggccctggttttgtccctgtcatcctcagtccttctccttcccgctttttaaaaaataaaatctccacaccctgtccttctactcaaggtatatgtcattttggtatgtttcttaatttttaaaggtgacgacatgagacatttttttccttctgcttttttgaattaatgtattattataaggattctcacatatcccttaacattcattaagccctgttttgaaataaatgactaatattcctccaagggggactggcccatatttccttaatccattccctgtgcttgggcacttgggttgggcaccaccatcctggtgtcaggctatcaggatgtctttgctgataaagcactattggtgtttttggctgcatccttagagcaagtgggcagaagtagaagggctgggtcgtctcactgttgttcattctcaaaacatagattgagccccatcctggggccatctgtgtgctgggctctgacggcaccaagatgaatcagtcctggtggcgctcagcacttcagccagggagacgtgtggaatgagcaggagagcagtgatagacacacacgagcctcttaggagggctctcagcttgttgggagaggagacaggaaagcctccagggtgacatgatcccccaactgcatgtcagggtgaggcgttcattgtctcaagaggagcagaggctgggcatcccagggagggccatgcactgtgccaggtcaggagaagcgggcgatgagacctaagaggacagcagggacctgaaggccagacagggctgtgggagccaccagagggttttaaacaagggagaggatggccttcctctgttctggatcctgaaaagctcaccctgacagcagtgggcagatgggttggagggagcaggatggtagccaggagacgtgaaaggagagcatagctgtggttccagcaacaatagcagaaaattcgcagggaggggagcgggtacaggaggcagtggctgcaagggacaaggttaggggtgattagaaggcaaaatcagtgggccgtgccatttgggaatgaggaagagggaggagttgacagctgccagagattctgtctcaggtgtatctgtatgggtagtggggtctccacttagggtagggagctcaggaggagggcatgggtttgggtgttgatgatgacttcaggtgtggcaggctgagtaggagggactcccaggggtggtgcctgcagatatattaatacatgcctgaaagctcattgggagacctgggttgagcagggattgagcatcatctgcataccagggcagtgaaacttggaggaaaagccgaaggacactgttaacaggcagtgtatgggggacacagaacattccaggtcctgagataaaaggttcagaaaaggatcgctggacttaccatgagcaaggagggccctggtgacctgggtcagagcatattcagctgacttggggagtgaatggagtgggagcctgccatagtggggaaagcgggtggtggtgtcccagtggagggagttcctgggcagggcctgcctgggcccagtagtgctcacccaactgccctctctccagatttggcagcaaggaggaatacatgtccttcatgaaccagttcctagagcatgagtggaccaacatgcagcgcttcctgctggagatctccaaccccgagaccctctccaatacagccggcttcgagggctacatcgacctgggccgcgagctctccagcctgcactcactgctctgggaggccgtcagccagctggagcaggtgcctgttgccgtggggcggaggtggggccaaaagctgccatcaggcttttagtgttcccccttccagagtaaccatggagggcagagagtttgcccaagtggcatgatcaggccaggtcctgtcagaacacactggggatctgtgggccccattttctctgtgggcaaatgctatgttcactcagcagtatctgccaaggctgccccactctgggtactagagctggggtgttccgcatgcactcagcctttagtggacaagcgccactgtgctgcctgccagagcatgtgagaaatagaattggatcgtgaatccgcctgtatgaagaagatgactcaagaccctgtacctccacttgtccagcaggaagtcgaaaacctttctaggattgcccttgaccatcagttgacaaggttactccctagacacctctgacactgctgcagtcacctgaagtgagccctccctagcccgagacttcactgacccccagcctcagcccacacagtgagcaactagttcttggacttaagggctgggtctaccaggaactacttcccgaatatctgttgctttctagggctccaagggaccaccttacttttgtaaggtgctgaaactggcctggaaggcccttcatgcctcctggtcccattccctagaggtgaccgctcagagcactggtatgcagccttctggacacgatctgtgcatgtgtaagcgcacacacacatgcaggcgcacacacatagagctcttttccttcttcagtttgttttaaagcaagaacatactgtgtatgctgctgtgtgcatttcttaccactgtgttgtgggcctctttgcttgtcagtgcaatctccaccacccccagggactttttaatgactgcattgtatgaatgctatttatttcaccagtcccctattgatggacacttaggttagtcctgacttttcactagaaataggtcctgttgcaatcaaaggccatcatttttgctcatttgtatccacttgcctttggctgtgagagacacaggagggagaaatggaaatgagggctgagaccctacattccacctgttccagtccctgcactgcagccaacactagtcactgtcactgccaccacttacctttcccctgtgctgtccacgtatctgcacaaccaggcaggaagaatggaaggtgatcagtattgtcacatcggtgatagggtgcaacagggatttgaaactcaactgtttgcctctcaattgcgtgctctattgcctgcatgagttttcacactttgttttctcacagagacctctgtggaagcttgtgcataaacaggtgaaggcagtgtccccaaagcctagaatcctctgccccttaagttctctaaagcgtgccagcaaggttcagatgggttcaggcactgccttctgcctgaccagcacctgagggtgcctgcagtgtgcttggaccatctccactggggctcaggtgccaaggtgggtcaggccccagcccatcccgtggagtaagtgatgtgagaggggctgtcacagaagcctctggatggagaggtggaggtgtggaaatgctgggattccatgtgtgctttcctctctgcggaggcaccagggcagggcaaactgaaggagaggcttgcactaggtcagcgtctcccactgtgggcctcctactcctgccctagaaatgtccgggagctggttaaaaatgtagatttaccgattcctgggctcacccccctcccagacccagtggctctgactggcagcaggtggggatctgcacttctgacaggctccgcagtggttttgagccatagtggctgcagcacatacagcctacccatgtggtcccaggaggtcacacctgcctcttgctgtgcctttacagagcatagtatccaaactgggacccctgcctcggatcctgagggacgtccacacagcactgagcaccccaggtagcgggcagctcccagggaccaatgacctggcctccacaccgggctctggcagcagcagcatctcagctgggctgcagaagatggtgattgagaacgatctttccgggtaagagctgccagccatgttgggtgtggtgggtgcgtgtgcagactaggcacagcccatctgtaatctcagatggggaaagaggatgcctacatagtgtttataaaacaagcctggcaagacttgagttgtacaggtcctaagtggtgaacctccatttgggaaaaatcagggaagccttcctagaggaggtgatgctataggtttgttttgttttgggaaaagtagcatttccattggtggaaaaggcattctagacagagggacaagcacaagcaaagacatgatgtgtcagagaataattgctggtcccaaatacccccagcatttccagatcccctgatatttgttaaaaatacacatgttcctggtatttcctgagcctgagtcagaatctccagaagtgtttagttgggggtgttttcaataggaattcggtggctctgccaggctttgaggctgggaacagcagaaaacataaagtgatgctgagacccagtcctggggtctgctctgcctaaataagacacacacggcagagtggaaggcaaaatgttcttgtttaagtcaaaatagagacatttctatcagttcatgttgaagcatttctgctctacccctactctcccctctcccgccagtgatccttcttaccccagcatgtgaggccgcagctgtagcagcagagttgggagtgtggtctcccccaaggtggtggcagggcaggcttttaagcaggggagggtgctgagatcaagaacctggggttaggggagcccaggaggggccagagatgcaggtccactgagtcttgcattgggtctgttcagtgagtgtgccaagtgaagacaagcagagtcacatgccaagagtttggagtggggggtgcagtagacagcccttgagaggctgagaggcagccgggcccgtgagttctgaaaagactgacctggtgtgtggcctgggcagccaggcccccactgctctccgtctttcctggctcatctgctgctctagccagttctcccaggcccgtgagcactgcagcccatctcagggagtggcacttcctctccgtctgaggctaagccaacccattccccattccaagccatatcaagccccccaagtccttgcagccttcagttccccccacccacattcttctctccaaagcccccctggaccccgccacagttgtgctttcttccaaggagctagcttctggggaggggccagggagaggccagagaaaagcgtagaatgaggaggaggccagggcaagtgcagccctcccaccaagtcatgctctccacagagcctgctctcattccttgtttttgccaggaactccagcccccgcctgccagtcaaacaagggagcggcagcaggaggctgggcaagaggaggtttcaccgggcccccacttcagttaccagtctgattaggaacaagagggaagaggcagagggaacccagtgactctgaagttggggttctcaatgcaggatccgtggatagcagagagccactgagttgtggcttagggcttagctaaggaggagttttccagagcaagccaggccccagtacccattgtcccaagatgcagctgaacagggaaggggtcttccaggcagcgcggcctgaaatgtgcagtgctggcccctaaagaagaggttctgtgcaggagcagccgcctcagcctctggtccccggattctcccactcctgccaccccagcgcatccatctccccagcgctggctcaggctgccaggccccggcaggttggcgggtgctgtcggtttggacccgccttggctgcactcacagttcttcttttccccttctttccctgtgtgtgcttgtctccctgcagtctgatagatttcacccggttaccgtctccaacccccgaaaacaaggacttgttttttgtcacaaggtcctccggggtccagccctcacctgcccgcagctcgagttactcggaagccaacgagcctgatcttcagatggccaacggtggcaagagcctctccatggtggacctccaggacgcccgcacgctggatggggaggcaggctccccggcgggccccgacgtcctccccacagatgggcaggccgctgcagctcagctggtggccgggtggccggcccgggcaaccccagtgaacctggcagggctggccacggtgcggcgggcaggccagacaccaaccacaccaggcacctccgagggcgcgccaggccggccccagctgttggcaccgctctccttccagaaccctgtgtaccagatggcggctggcctgccgctgtcaccccgtggccttggcgactcaggctctgagggccacagctccctgagctcacacagcaacagcgaggagttggcggctgctgccaagctgggaagtttcagcactgccgcggaggagctggctcggcggcccggtgagctggcacggcgacagatgtcactgactgaaaaaggcgggcagcccacggtgccacggcagaacagtgctggcccccagaggaggatcgaccagcctccgcccccacccccgccgccacctcctgccccccgcggccggacgccccccaacctgctgagcaccctgcagtacccaagaccctcaagcggaaccctggcgtcggcctcacctgattgggtgggccccagtacccgcctgaggcagcagtcctcttcctccaagggggacagcccagaactgaagccacgggcagtgcacaagcaggtcagtgctgctagtcagagggcagggctgggcacttgggcccagctggggctgtcataccccataccatgctcctcctctcggtcatttcacctccaccctcacccagctgccatcccatcccaccagcctgccacatgcgccaccaccccctccccctggcttcttcctgaatcctgtgaaccagggacactgtagccttggggaactccaggctcctctgtcagtgcccctaggggcaggctggggtcagagagaaagaggaggagagtgcattcatcttcggttccaagcctgtcgaagcgcctacccagctctgcccccacacgcccctcccaaaatgttttcacaggctggacaggccttcaggcacaaccacctggagcatggatgaccctgtcacccaaaggctgcaggcagtgtctggagtggaggtgccttgggctgacagcccagcctggccctgtcccccactcagtgcagcctgccccggtgcccccagtggcagggtcactcactgtcctcttggcagcagagtgtggtgctcaggaggccacctggcacctgtcagctctgcctttggctgccgtctgagagacagttcccgggtggggactgcctcggtaggcgctcagtcagctggaggtcccctcttcccaccgtgtcccagagttgcttgtccttgtggctcacctgggccactcccgcccctcctgcttgccctccacctccctgcagcccctcacagctgtgtttcattgtagggcccttcacctgtgagccccaatgccctggaccgcacagccgcttggctcttgaccatgaacgcgcagttgttagaagacgagggcctgggcccagaccccccccacagggataggctaaggagtaaggacgagctcagccaagcagaaaaggtaaaactggaccctggcggctcgggacagggcggggctgcctcccggcagcagctggtaggagtctctcccccaggtcccccagcaacgggtgctgctgtccttgtgaagggcccgtcacctctgagcccctgttccctgtgagaatagcagtcagtggggtctggaagaaaagcaacaagagggatggattagcagcttagacctgaggcttcccatctgcagattggaatcaccagggaattgtcttggatacagactcctgggacctctgggaaggctccttagcccaggcaactgaggcagttgagcttcctgaggacctgggggttgagggctgagggtgcccaagtgacatatagaagcccccctgagggaacttggtacctgaggaggcagaggcatgggtccccaggatggctgggagagccaccccagcctggcccccaaggcttgtgcctgcccacggcctggctcttcacccctctggtctccaccagggcctgggaaagaaacagcagttaccagcttggggggtggggtcaggctgccattgagatgttttcttccccacccccgggaaaagaatctactctaaaaatgaaactctcactctgccacacactctgccatctgctggggcaaggggatgcttcgttggtctcccaagccttccagctgtggcagctgctctggatctgggggtagtttttgtctcctactgccagctgcagtccatgtagacggaggaaccagcgcaggccccagaacggcaggcgcttctccactcccctctggatgctctcgccccgctgggccccaggaaagcctgtggcaacctctcgagcaagggtattggggtcagaatggcagaactccttctccccggcctcaggcgaggcccgtctccatgctgcatcctgccaccgccaccatccccggtccgctacatccacctgctttcaccatagttacatgaaggggaccgggggacagggaacacagtgctcccagagccagagtttggctggggagtgaggaggactggcctcactccaggctttttgcatccctgtgtcctcatggcgtctggcccctctcgatcccggcgttggcctttcctcgctcagcgcagagcacctgactcctctctgcagccacgccgcttcccagcctcgtccacatccctgctcctccctgatggttggggtctgtgctggactgaggcagatccagagcctggaccacctgcctttcagttctctctctctccatttcctcatgccactgccaccccctggctttagattcaaacagaggctgggaagctgggatcttaccctgctagtcagtcgctcttcatgtgacatggtcaccttgtctgggcctcagtttcccctcctgcagagctcccacctctcagggtgctgtcacatgtccttcatgtatccaagggttttttaacctttgtcatataaaagttcaaagccctagttacaccctcagtcctgggacttgggtctaagtcttcatccccgctgtagccatacaggtcaggctgggagtttggagtggaggccccacggtggggcacaggcacgcgtctggctgcagcccccaccagctgggctccttgggcatctccttgctatgtgaagtgggcgggtcacagccactggggcctttcaagtggggctccctcctacccttcctcccactcgggctgacgaagctgtgctctctgtgtcctgggtgctgtgcccgtggacgctgccctcctggtaggacctggcggtgctgcaggacaagctgcgaatctccaccaagaagctggaggagtatgagaccctgttcaagtgccaggaggagacgacgcagaagctggtgctggagtaccaggcacggctggaggagggcgaggagcggctgcggcggcagcaggaggacaaggacatccagatgaagggcatcatcagcaggtggggcccacacctgcctggcctggccacaggcacaggcagggcagccatcgctgccttcgaggaggcccctggtcggggagcctcctcaaaggataagctgaatgtggagagaggagggaagagagtgtctgggcagtgggagcagcgtgagcacaggcctggaggcaggaggtggcctggagggtgggcagcccatgcagaatacaaagctggggatgaggctggaccaatgacagctggctcccgacgggcctgagcctctacaaggagccataccatcttagtaagcactctcaggggcgctgagaagctggattggggggtgccaggaaagacagggaggaccccaatacagggtaagaaaagtgggaatgagtctcagttacgtatagtagatgaaggtggaagacacagcgtagcccccagattcctaccaagagtgtctgggtgtgggcgtatcagggtaccagttactgagctgggaactgttaagaggagtggtttgagtggggagggagagggggatggtgccagtctgatatcctgagttttaaggggcctgggttatctgggaaagggcttcagaggaacagcgggttttaatgctgactctcatctttttgaaggcttatgtcaggccccatgttggtgcctccatctctgtctctggctctgcctatgggtagggcatccctaccttggtgtcaggcagggagtacaatcaaccccagggtcccagtcgtggagtttacttccttctcagtaataccaggcacgggaggagagacagtgtgtcttgtttgaattggcctggtctaagaccccatcagctggacagaccaagcaggtgtgcaagagccaggaaggcctctgctccatgttttgtctatgacataagcccttcccagattcctcctatttagaccacctgtttctctgttcctgactgttgtttgctccatttacttgtagtttggttcattatgaaatagttaacatgagtgaaaccagggtggctagaaacctgctgttcacttgttctccagctctgctcttggctcaccttgtgtgtgtttccaagaatggaaatgcttttcaatttaactgccttctctacattgtgtgtattctctgatatttgcatgttctgaattcagagacttgcttaacacgttcgtttctactaaccaatcctggaatatttcctccttaatgtaaatgtcagttaggtagatagtgttcaagtattccatatccttactggcttttctatttctcccttcattccaactggtttttgctttatgtacactgaaactattcttaggtgcatatacatttaggctgtttatgtactattgttgaattaattccaactggtttttgctttatgtacactgaaactattcttaggtgcatatacatttaggctgtttatgtactattgttgaattaacctctttgtcattataaaatcactttctttatcccttgaaatattctttgctctgaaatctgccttgtctgctattaatgtagccaccccaacttccttttgattcgtgttggtatggtatagctttttttatcctcctgcttttaactcattgtcttggtccattcaggctgctataacaaggtaccttagactgggtaatttataaacaacagaatatgtattgccctcagttctgaagtctaacatcaaaatgccagcagattcagggtatagtgactctctgcttcatattatagtgcaccgttgctgtgttctcacattgtagggggtgtgagcaagctcccttgggcttcttgtataatataaaagcactaattccatttttgaaggcaaagcccataggatgtaatcacctctcaaaacccctacctattaagataatcaatcaccttgggggttaggtgtcaacatatgaatttagaaggtgacacaaacattcagagcatagcacccatctatatatatgaagtgggtttattttacgggcaccatactattgggtcttgctttcgtctaaatggttctgcctttttattggagtgttttgaccatttacatttaatgtaattattgatatatttaaatctgttgccttgtttcctatttgtaccatctgttctttttttcctgccttcttttggactgagtatttttttatgattccattttctctcctattgacttattagctttatctctttgttgctctagggcagggattggcaaactttctacaaaggagcagatcaaaagtattttaggctttgtaggccatatggtctctattgcaactgttcagctctgctgttacagcagaactatttgtgtgagatggctatttacaaaaacaggcaatggtccagatttggccctcaccctgaggctgtaatgacagggagtctgtcattgtctttgttcctctgtactttatgtatctgttttccctggctatttataagatactttttttttaaatcactggttgtcagtagttggattgtgatgttcattggtgtggttttcttctaatttcttgggtcttggatttgtatgtctgcagtcccacctccccccatttctttctctgggattcctagcacacgtgcattaggctgactcattttgtcccgtatctcactgatgctctgttatcttctttcttcattttttttctgtttcttctctttgatagtttctatgactatgtcttcaagtttgctaattatttcttcttctgtgtgtaacctgctattaatctgatccagtattttttcacagcagataattatatttttcacctcttagaatttcattttgctttaaattccatcagttttaattctcattgtgcttttacttctgttttctgaaacatgtagaatatatttataataccttgttgttttcatgtccttgtctaattctatcatctgtgacatctgagtctgtttttactgatttattttccgcctgcttatgagttttcctacttctctctgtatacttggtaatttttggttggatgccaggcattgtgaatctcacagtgaggtgctgaatgtttttgtgttcctttaaatcctttctgggggctttattctgggagacagtgaggttacttggaatctgttcaatcctctcagggtttccttttaagttttgttaggctgcgtcctgcagagcctttagtcttggcctaacgtggccctgctctgagggggtttccttccccgggtcctctgtgattcccagtgttggtgcgtcactgcactctcactggtacaacatgaactgcttctgcgattgtttcgtgttctcctttctgacggttcttgcctagcctggtaattttctcatctgcatgcggatattattcagtcagagacacaaggggaacccccactcgggagctatgtggagtttctctctgcctcttgctcctctctggcttctgccctgcaaatcccacacctcttgaccttcctgacctgcctgtctcctcaactcagtgaggctgctgactccgccttccctctgcttccaggccgttcactgggctctccttgttggtttctgttctcctagaaattattgtactgcattgcctgtattgtgtccatttttctggtttgtttgtttggttggtttttaataaagagatggggtctcgccatgttacccaggctggtcttgaactcctagtctcaagtgatcctccctccctggcctcccaaagtgctgagattataggcgtgagccaatgtgcccggccctatttgtttttaagacaagagagtaaatacaatctccttccaatctaattttccttaataaaacaaataccctcctgccaccccacccccagcacaagctttcctcagagtgataccttcctgtactggggaacctgccccggagggtcccccccgccaccaccgctcctcccagttagtgctccctgaactgctgccctgctgcccccattacagtcccgtgcagaaccggccccggcacagtggctccctgtgtgtcttctgtgagtgggctaagtgcttgcccagtgtgcggtggctgctctaggctggaggaatcaagagggcagggatggagagaagccttgggagtggagggctcatctaagagtgtgtggagcaaggagaagggaggctgaggccaaagccctgtggacccccatgtccagaggcagacaggacaaggcatctaggagacaggcagacccagagagtgtggggtctcaaagccaaaggagagtgggaaggtgggagtgcccagcagtgagagtgtctcaggaaccagccaggtggggccaggagggctcccaggcagggagcagcaggacggagccggcctcctgcccactgagcttccgcgggtggtatgtcccccagctactgctcattgttctgcctgcacacctgtccttcagatgtctcctactgatgtgcgacctcccagcccaccctccagggaacgtcactgcttcctgctctttgttccagggacctgagctttccactagcgcagctgctccgtgcagggtgtagttagttactcgtgcctcctgccttgtgaactccttgagggaaaggactagagttcattcatcttggcacctcgcgtacaactttgtgaagatggcgggggcagggtggaaaaagttctagagcctttcagggccttcgtctttccaccacctgcctagctctaggggtttgaagatctaatgcccatttccacccatcttggctcctggaagaacatcgggaaaggggcagcccgggggcctctggggctttaggagcagcgagtgtgggatgtggaggtgaggaaggaggcccagcagtgtcagttgctgggagtcggctggagggcctctgccccaggcaagtatgggaggcaagtctctgacccaaggaggggctctcctagtgtgtccctgctgtgtgcgggggtgatgggcttgttctcacaccctccccacctctgctgcctccagggccagtctgactgtctctgtctctggctataggttgatgtccgtggaggaagaactgaagaaggaccacgcagagatgcaagcggctgtggactccaaacagaagatcattgatgcccaggtgggggctccggccctttggtcagccacaagagttaaagggcctgggattaggaggggtgactagcctctccatcctcagtcatacctcactgcagacactgaggggaataagaaaccagaatctgccctgagaagtcagacctgtggtcttagtgggccacaagctcactaggacaggctgtgaaaggagagaggcagctcctcccctgccagggctcttggcgggcattgtctttcaccaggactgctgaccaaagagtggaagccaccaggagggcagtgggggtaggagtgaaggcaggctggtcagagggagcagtggggctctcgttcacaactatggcatccgggctgcattgaggggagacgtgaaaggctctgtggccccagcctcctttactcagggctgcaccgctttcctttcactcacccaggagtaggctgggccttgctcaggctgtaaactgcacagaccaggagctgtgacctctggtgtgtcatgcacacacatgtgagcaagggtgcctgccctaggggccgcaggcagcccatagacagcactagagctgctgcatttgggctgataagcaggcagcgaggctgtgtccatgatgctgcagaggcctctgcctaccttctcttgccagctgctcacagcccggagcctgcctgccaccctcatctccaggccacccccttccccgatgcttgtcgtaggtatacacagccctaaggagcctgtcccatgacccccgctcacatccccattgtccacaggagaagcgcattgcctcgttggatgccgccaatgcccgcctcatgagtgccctgacccagctgaaagagaggtacagcatgcaagcccgtaacggcatctcccccaccaaccccaccaaattgcagattactgagaacggcgagttcagaaacagcagcaattgttaacctgcctgaggagggaggaagctacccaaggagagggggactatggtggccaagggcagggtctcggcctggggaggcacccacggttgcagccccagcgcgggtgtcaggaggccgagcctcccctccctgccgctgtccaggaggcggccgcagagggagccaccagagactgaagcagcgtgaggcgaggtcaccagccgctccctgtggggtgcgggcagaagagactgcacgctggggagtggggacagcctgatggggcagggggcctgccaaaaatatgtctgttggttcctgaatgtggtgtgtccttgtcctcctggatctggccgagtgcatgtgtccccccacacctgtgccagggagggggcttcctggaggggggattcaagggctaggggcctacacctgtggcttcccctcgcctccttggggggcccgggactccctggcagccaggccctgtcatgtgggacctggcacttggcagatcagttggcaggcaggaagataggaggacacagagcaggaggtcagtgtcccctgcctgtctccatccgaagcacctgccactgcatgcagcctgttgggaccttcctggctgtgaggaactgaggattcctacccacccaccccctctgaacctgtccccagagcaccacctgctaccttcttccctgccttagttgtattgccagatagacccagtgagggccatggctttttcttgtgagctcttgtccctgtggggaggacccacagcttcccacacctcccacacaggcccaggctgatgctctagggctcccagaagccagagatctgggcggatctggccagatggctctgagcactgtatctgccttctcctggggcccagcacacccagggcacagtggtcctgtagggagtgccacctggtgctcaccctgaaagaaaaggtgatccttcctctgagtgatggtttaaaaaaagattctaacgcctgcaggccctgagaaggtggataactgtgattttttttcctttcacagtatgcattagaaacaaaagcccgcttgctcgcttgctggaacacaggggccttttaagttgagcgtgcgcactgcatgggaaatagcggccctggaggatgttagacttgctccctctccaagacagcagcagcctgcacctgccccgtgtgtgtggccggcctcctcctcacccttcccggcccccggccaaggacccaggcgctgcatacaggggaggggcgcaccccacagctggggccggttttcctcagctctaggctgttctgtagcttatctgcccctcccccactttcaagacagatgagcaggagcttgggtctctctcggcccctgtctgttcccagcccctgcagattctgagcaaaggccctgggtaagaagggtgggagtggggcctttgccagcagagccagggcagggcgagctgcaggaatcacccctctgcccctgcagctggaatgtgccacagaggccccacctgaagggtggatgtgctggaggggtggcccagagccatactgcgtccaccctgagctcggggacaggtgacagtggctgctctgggaaggggcttttagatgtaacctacaattcagttaggctagagacagatgctggtggaggaagggctgggccaccagggatcacagaccacaggaagatgggaggtggaagcagaggccctgcccccaccccttcctgtctcactcttctgtcttgtccccacccatgcgccttcgtgcctgagaccagggtggccacacaggcagggcctggctccagtctcatcctcccattgcccagtgagccctgctcttctctccccagccccctcccaccgctgcctcgtagagtgacctcggacagagcccccctagcaatacagggaggctcccggggcctggacaggcgggctcggaggctacccgctgtggccggtgccagctgcccttgcagggtgggtgagctctcaggccgagagccttatttacctagtgcaaaaactgtaaaagtgtacagactcttcacagatttttatcttaattgcaagtctgccgattttgtaaatgttcttggtgtttgactgtaatgtaactatctcacctaatggttgtacatatcctttggtcctggtgctgccgagggctggccgggactgctgctctcccaagggttttattttatttctgaatctagagaacagtattgggcaggaggaaaaggcttggtgtctgcggggggtgtcttccctgcctgtggcatttgtgtgttggctttgcagctgctgtctgagtagtggccactggggtgccttcactgggccagtcaacggggggctcctgcccaggccacagagaacctgagttcccgggagctgggccctgcctgcagccagggctggggttgccagaggccctggagggaaggacagtccctgctggggaagaacagccccggggccccctggtcaccgagactcagcctctgctggagaaagccacgccctccctgctagcacagaggcctgactgacttttttgcttaacttccatgttctgggtgatggaaactgccaaacctcctgtcagtgaggactctttccgactgcccagaaagtgggggtggaggaccgaggctacagctccacacgccccggtcccccagagcatctgccccaggtacacctccccctgcgccccgcacgactgcgggagccagactgtccagggaaacagcctctctcttttctacacactcagccacaaagccccccagctcccacaccgcgtcccagctcccctcttttgtaagtatgtgaaaaggaaaaaatgcaaacgttggagtttgggctggagctcctccctccagctgcgacttttaactatgtaataatgtacagaggaagctgttggtgttctaagactctgtgtggctgtgcaatttctgtacatttgcaattagaaatattaaagatttatttagctattttaa
